United States Patent Application Publication US 2022/0211063 A1 - sequence listing, part 38

SEQ ID NO: 105 - DNA, 4395654 bp, Penicillium roqueforti (residues 1-1,465,218 of 4,395,654)
  misc_feature (85032)..(85336): n is a, c, g, or t
  misc_feature (96912)..(97035): n is a, c, g, or t
  misc_feature (167457)..(168881): n is a, c, g, or t
  misc_feature (174735)..(174875): n is a, c, g, or t
  misc_feature (186965)..(192855): n is a, c, g, or t
  misc_feature (360823)..(361014): n is a, c, g, or t
  misc_feature (391959)..(392118): n is a, c, g, or t
  misc_feature (496716)..(496904): n is a, c, g, or t
  misc_feature (596248)..(596477): n is a, c, g, or t
  misc_feature (682798)..(683428): n is a, c, g, or t
  misc_feature (719087)..(719175): n is a, c, g, or t
  misc_feature (843422)..(843591): n is a, c, g, or t
  misc_feature (1092721)..(1092892): n is a, c, g, or t
  misc_feature (1157553)..(1162652): n is a, c, g, or t
  misc_feature (1192588)..(1192765): n is a, c, g, or t
  misc_feature (1228267)..(1228378): n is a, c, g, or t
  misc_feature (1338795)..(1338950): n is a, c, g, or t
  misc_feature (1570178)..(1570379): n is a, c, g, or t
  misc_feature (1572427)..(1573064): n is a, c, g, or t
  misc_feature (1778995)..(1779142): n is a, c, g, or t
  misc_feature (2068487)..(2068564): n is a, c, g, or t
  misc_feature (2226929)..(2227148): n is a, c, g, or t
  misc_feature (2309644)..(2309799): n is a, c, g, or t
  misc_feature (2399265)..(2399444): n is a, c, g, or t
  misc_feature (2468197)..(2468413): n is a, c, g, or t
  misc_feature (2498734)..(2498793): n is a, c, g, or t
  misc_feature (2576637)..(2576892): n is a, c, g, or t
  misc_feature (2701425)..(2701645): n is a, c, g, or t
  misc_feature (2766528)..(2766643): n is a, c, g, or t
  misc_feature (2901310)..(2901574): n is a, c, g, or t
  misc_feature (2994310)..(2994455): n is a, c, g, or t
  misc_feature (3046176)..(3046296): n is a, c, g, or t
  misc_feature (3064322)..(3064652): n is a, c, g, or t
  misc_feature (3131107)..(3131265): n is a, c, g, or t
  misc_feature (3155041)..(3155788): n is a, c, g, or t
  misc_feature (3156743)..(3157054): n is a, c, g, or t
  misc_feature (3187005)..(3187665): n is a, c, g, or t
  misc_feature (3198552)..(3198823): n is a, c, g, or t
  misc_feature (3203257)..(3205231): n is a, c, g, or t
  misc_feature (3205958)..(3206270): n is a, c, g, or t
  misc_feature (3207716)..(3207874): n is a, c, g, or t
  misc_feature (3257409)..(3261006): n is a, c, g, or t
  misc_feature (3261812)..(3386811): n is a, c, g, or t
  misc_feature (3388273)..(3394703): n is a, c, g, or t
  misc_feature (3514038)..(3514368): n is a, c, g, or t
  misc_feature (3520886)..(3521278): n is a, c, g, or t
  misc_feature (3528699)..(3531253): n is a, c, g, or t
  misc_feature (3533644)..(3533755): n is a, c, g, or t
  misc_feature (3544131)..(3544318): n is a, c, g, or t
  misc_feature (3640988)..(3641179): n is a, c, g, or t
  misc_feature (3768183)..(3769905): n is a, c, g, or t
  misc_feature (3862530)..(3862864): n is a, c, g, or t
  misc_feature (3867901)..(3868538): n is a, c, g, or t
  misc_feature (3874100)..(3874791): n is a, c, g, or t
  misc_feature (3907480)..(3907707): n is a, c, g, or t
  misc_feature (4023569)..(4023725): n is a, c, g, or t
  misc_feature (4214675)..(4214820): n is a, c, g, or t
  misc_feature (4215907)..(4216419): n is a, c, g, or t
  misc_feature (4384696)..(4387115): n is a, c, g, or t
  misc_feature (4389540)..(4393053): n is a, c, g, or t
  misc_feature (4395652)..(4395652): n is a, c, g, or t
tacagttctaccgtaatcctaagtccggtcaagctttttttgtcaatggtgacttgggtaaagataggttttggagagagttttgtgaaaagaaaaagtaagcttaatggacaaaagaatttcacgcagctgcttttgtcctgctttgatctattttatagttagcctgcagttctccagacatataacagaatgagggaattacatttaagatccttgtcaacgattgaaactacatatttcggaagcagactcgttttatacgttacagattgacagggagcattccattaagaggtcgaacatattggaacacgtatagacaggagccttcagtaaaccatcagaatcaagtgaacgccgtaaattggctactgatatacctctgtccaaatttcaatttcacgcaggggtaaagagcttcaacgttctttctgtcagtggtttcgatactaacaaagcgtagtgcttccagaagccttttgaaagggatttctactcatggtttacgcgcaatatatgatagagagcgtctgtcatatcttcaatcgtcagtgtgggtaaatgatgacggatcttggaagcacaaaccaggacgcgtcagttccttcgaacaagtattttggattccaaacaagacctctcgactcagagatcccttccatagatgcaaaatagcttcacacgcttgcaggtctaatccctcgaaggcagatctatagaagttctccaggcgagctgcgtcgcaacgtttgagattcgagtgtgtattttccaggtttggatggttccaagttacaaattgctcaattaatgagaaggcaggctcattagaaaagaactttttgcaatgggtggaaaacagcgggctcctagttgagagagaccctcgcgcagtattgtcgttcatagggagggggctggatcggaggagcacacaaccgttgcgcccattatgcctttgtctcctatacaatctcgtatatcagcaatcaagcatgggaataatatttacctctttccaagctctggggcacagcttgccttgacttgggccattccatccctaggaatgacttctgaatactgccaaatttgcttcctggccgtggaacccaattgtgcgattgacgagggtataataattgaagtcctggggcctgctttcttccacctgaggcaaggctggctgtgatttaccagagttggcctgcaagtactgaacagagaaattctcggccataccattttttgggtaataaacaccatttataacttcgtggattggccttaaggactctagacgtcaggcagtggtggattacctgtttcgaagggatgactgttgatactcccactgagcggatataaatggggactcggcaccggggtgctggaagtttgggaatgtacatgtggaggccagtggccattgttgtttgccatagtccaaagaatcgaagttgagatgtttcgggggcacactgcgaatgaagagggccggtcgtaccaggctggagatcaaggacgcagcgctctgggcgggagttatatacgttatgaagggtaatgaccttccatcattacgtaagagagcctttcacgcttcgccgtgttgggtggggaaacttgtgatgcatgccgtcgccctgactggctaacgagatctggggcacttcttgatttggaattctcatgagagatgagagtatttgggaataatccacaaaaaggccaggggcgctttacaacgatatttacacaaggggtgagtaggattagctactcagacacttcgctgcagcgaatatggagcatatgtagggcacgtccgtctcgatacaagcgcagtcaaaaaatgaaaattaccattttattgaaaggtattgtaatatttacatccgtgcgccgaggtatattactccattccaaaatcttaatatactaagagaaatcccccaagtagtttgtcctctcgattgtgcatacacctgtcctccccctctgcatttatcatagaaatggacggcaccaatatggtaagggcaattgtgttcgcttcttttcccatactaagattgattatacagattcccgaagccgacctcgagatatcagcccgaatatcattgacagctttgcaaatttggtggctgggtaccccagacctgaaagacgcaattaaacagcatcacaaactcgatcctgggattgcatcactagtgctggcctgtcaacgtctcaggaagaatggatacagaaagggacggatccctcttacccagaacagcattttaaatcgacatgtgcaagccatggtggatgacctcaccgaagacacgctcaaaatatttggccttctcacctgtcacttcaacgaagattttggagtgcctctcccccgtcagcttcttcgattcttcgataccccctggaagcttctcggctatcgaagctatcactcccactccaaaacctggaatatacaaagggagatccccatgcaagttgcttgccccttcgattgtgcatacacctgcccagtcctcaacctctgcacttatcatagaaaaggacggcatcgatatggtaagggcaagattgttcgcttcttttcccatactaagatttattatacactttccccaagccgacctcaagatatcagcccgaatattattaacagctttgcaaatttggtggctgggtaccccaggcctggaagacgcaatttaacggcaacgcaagctcgatcctgggattgtatcactagtattggccagtcaacgtctcaggaagagtggatacagaaagggacggatccctctaacccagaacagcattttaaatcgacatgtgcaagccatggtaaaagagcattgcggacaaacggttggtgggatatccagtagatgagcatgccgtacacttcgtcataatatgaaacatgggttgtcgaagctgctggctgtcagactcatcccatcgcaaaggaagaattacgtactgaagtagcctctcactagctcatcagcagcatcgcaatactttacttgcgttattcacgtttatgatattggccggtcaaggctttattcgtgctcaattcattagattttggttcatatgcatgaaacccatgcctgtgcaaccactaacttcgatttattttcgcgatatccaagccccaaggcccccaagcaccagaagactctctgagtggcatcaattgggtcaattttactttccctttattccctagtcataacaatccttgtgtgtataagaccatgtctgtgggtccaatccacgtcggtatgtaccttgaccagaacaatacctcaatcactaatttgcttcatagcttcaagttgctatattcagcccgaggaaggttgtgattttgatatgtggtttctgagttcaaggaaggattttattataactatttttgtacttctaggcagagctcgataataggtccagtcaatatatatttgtaaaacgaaatctttaactatgcggaacgattcattaagcttaaagaatattgatatgccattttttcattagtagaatgtttcctttgttaagaccatttcaacataaaagctcaaaatgcagtagacggagacttcggatagcctaacaatctaccattaccctccaatttgtgctgctctttcttttctacttctcattcgctctaattccaccatatctactatttttgtactgccgcttaatatgtatcccaatccaatacacagactaaaaggaaggaaagtcggattctggacggaaattcactggtggttcatacgcaatgtatagttgttcaggtcaggagcgcggtggaagatcttctggtagatctccgtgagcatacgggcatcggcgcggatggtaggtgatatatttccattttggacaaggaagccgattgtgcgtttgaggatacgctcgagatcatgttcagcgactagtttgctcaggcttgacatgtaggtcgcggagagaacaagcatgttgccaaattgcctatataacatgaaagatcattagtattgccctttagcgtccacatttctccagattagttgggtccgcatacgaatgggcagtgccaaagatattggttaccaccaaccgatgggtatctacacaatcaaaagccacagtactccgaattgcagaatcaatacagatcttacaggcatcctgtaaattttcaggcagcgcccggagttggacttcagcggcggtcgatccgttagcgagtgaggtggttggtgttttggccatgtttagagcataggtgccatgcagagcgtggtagaggaacggtcggtggataatatacagggcaccgtagtacgttgcccgcatgtgggcggcgtttatttcattggctggctcgtcggtttccttccactgcatactgtcgggcagggatctgcgccagagatccaggttttcgctcaaagctccttgggcggtatatgaccacagtgtttccccctgttttttgattttgtagaggtcggtcgggactcgattcaggattttgcgcaggtggatttgagcgtagtagaacatcatgatcatacttgggcttgtactgaagtgttctgggagactaattgtgaattgtcctttagggaggtgcatccgaccttctgaatgagagatgccactggctggaagatcaagccctgcaagtaagtcactctccaactctaggcatgcccagtatacggagctatggaggtccttcactgagccctggttgagactttcataccgctttggtcttgtcagcacctgacaagccctcgaggcttgtgaaatccaactatgactctgaaacggatgagctagctggccggcatatagtccagcaagcagccccgcctgaacgtgctccagctcgtttgcaccctgcaagtggctcaaaattcctgtagcatatctgtacagcgtaataccagggatgctttggttgttcatcgtattcgcatcttcattgcgcattgtgggcgagagtgcaccgttcgcataatctgtctcgatatgggcgggaagaggtgatgtggtgcgctggccgcggtagccgatcttcctgttcatgatagaccccgagaggggagtaggagcttcgcaaattgcacccagggccaggcatagcaatactatggaactgtgaatatttcgatccacgcgtggtcgtggcgagttgcagcaggtctccttatcctcgctgtgtataccaaggctgcgattgaagctcctccgtttcttcgacggtggctcatcgcgtgctggctgtacacagtcggtgacagagcctggagaggaattgaagtggcagtaagattgaataaacctattcaccttgttgtcgagttcattccgatcaaggaacgggtgaagcttatacatgttagagaggtagctcccaaagtaacgttgagctgcgacaccacccagcttcacgttaccaagcatatcaatatcgacgtctccgtcaaatcccactctgcacccatcaggtccgtggctacaaacgccgggatccaatggtaaggggctgttatccagagtgtccagcatctccccatgatcatacgtgctaagaagaccgcgctcctcttctaaccgtatcacataatcttcgtcgtatctgtccggtaacagctgctggatcgagggccacagcaacaaatttcgggccgcagtgtgctgaacgggggtcgaaagcgcatattcagcctcaagcttggagccgacgtgaattggattcacaaggccaagattctgaccataatttggaacagccacaccatgtcccctgaaattcaatagactcctctctgtgaggtgggttaatgtctcgtcttgtcctaggagagagacgatgttaccggaatgttcatgtgtaccctgaataggcttgtagggctggtttgggtttccttgcgcagacaacatttgattttgtagcgttcgaaattgggctgtaaagttgtcctccatcttcgtcaaatggtctagcaaagtttgagtagacctattttccttgcgtagcgactcctctttatacgagcatggcagattgctttctctgcagtagccacaatttggtcgtccctcatcacacttggcctttttagctcggcatctatcacaggcctatagctctcgatgtcagctatatctttctcagggcaaaccagccaactaacctgcgcggcccttgcagccttcgcggtcctacgctggtgcggtccataggcctggtattggccaatcaccgagccaaccatttgtggaatggatgccattatgtgcgaatgtagaacaaaaagatccggttcttgtcgggcttttggttgtatcaactttcagttaaaacggttagagaaattcaaaacaaacgagcttgctttacaaacgaacccgtctaaaatcgttcgtttgtgttcgatgtagtaagataatgtcgaataagaagtttggaactttcagctagtggttgaatctgaatgtgcaacactatcgcaggctaatatgctcgcccttgagtcaccgtagcgtattcttggactgcgtagagataactgatgagcaagctgatttccccccgtgtatttaagaaaaaggccgaaatagaaaaactaagagcaaaaactgactatcataatttacagagttgaataagtacgaatcgcacggaaataggtggctgagagcgagtgctcgtaacaccacactaaagtatccacctcatttccagacttctggttccgctccattcctccattagttcactgatcactcagctccttgattaaagtgctattcttgaccgcattaaatttccacctcaacattcaaaaccgcattcgcaatatgcacgaggtgcttttattcgatactaaatcacatttacttaatccaatggtggggtaaatataatgtcgtcctcataacccacacctaccctcatagctatctccatctctagggattaggtaaagggggattgaccgcatatccccagtcccgcaagaaatcgggcgcagcacagctgataatatgatcctcggacacttagtaccattttaaattaccactaatgcattcaaggatttaattgtcacattcctagcttttcatgatccggtgcggtctatagatcagtgaagagaggttctacccgggcgatgtgatagctgatggatgatacatgaagagcccaattcccaaccatttatcaatatagctttcaaaatccctcccacggattacttcggctcaaagcactcacgaacggctctcaaagtcattttaggtcggcagttgcaatgttccagagaaacatgccttgtcccggttggcaaaagccttgggtctttctgcgaagtgtgctgatcgatgctgggtcaggttggactaggccccttgggatacgtaatagcttggtttaatcacaacaaagttattggtggagacttttaatcatggtagcctgtagtggctttgggtctggatgttcatttctgggaaccccggccatgcaatgcgctaaaatgaaaatttcagacgtgtcaggcgactgacgccaattgattgggccataagctttgcttcagggactagatctgagcgttggtacaaaagacaagtgctagtctaactgcgatggtgctgcagtagcaccagtccggcaacactagtttctttaatactacgtgtgaccctgttataacataaatgagatttaaatacccaatgtcagttattttactccttcatcgttcttctgttgtttttgttcatggagggaattatgaccaccaaaaacccgttctcccaacaaccatcaatatctggtgacccgatggcaattagttcactcttgaatgatcaaacattatcctcgcaccagtatccacgacctagctcacacaagacgtcccagggccctggaagtgccatgtttcgggcagtcaagttgtcggcatcatccgtccaggaaaacggcacccataccaagagtctgaatttgcaagatcaagagcaggattcattttcagatcgacaagcccgttcttccaatcccatcaaatgtgggatcaccaagaacgaaactccgccccgccaccgcctgtctcagaaagtatacaataaagaagaaacgcatttcatttggttccaccgcgtcattctcagggataaatggccggatgttcttgagaaattcagccgtcaatttccaagccgaccacgccgtagctatggaggacttgaaggcaggctccgaagatttctccaggaagaaacgttgtcctcttcccaaaagaaaaatcagggctggaagtatgggggaaagggtgggcaagccatttcctatacgagtagcgagggtgttgttcatatatgcacgtacccgtggatgcaggaaactgccggtccccaatccaaagtccaaagtcattctcaaaagaattgccggtattagactatgtttgcttaaaacccaggatataccgttcaaaaattcaatagccattgacgtgttctatatacaaccatcttcagtcagcctaaaaaggaaaaggatatggtaattcatacaaggtagatttttcatcatctgacttactcataaacgtacaaaggtagcatatcataagtgatatacatttctgtcacctgctggctgatcataccaactctagacacccaagagcaatgtgtaagttatgtattgttcatccaatctaggttgagaagacgcaggtttattttcgtttctttgtccaatatccatctttgaaccgttcggccgcttgaatttcaaatactgaaggatacttctccatgtaatcctgcacaatgctcaacgattgcagaacttggatcttttcaagatactctgcgaattaaacagaggctgctctcatggcatttcgactctgacttagctcaaagaagcgactaggccatgaaacccgggtatctgatgaatcgagggagcagtgcacgttatggtgataggctgagcgatcggcaacaagagcttcggaagcaccgttagggaaaaagggaagtcgggtttccaggattgcaggatcgttcggtggtaagaatgaaaaaggtgtgacagaagattgttgacttctcgagaacaggccggaatccatgtattagcagaccggtacgtgactgaaactttatagttcttgagtcatcctggatttgtggaagggatttgtggaagtatcagtcaatttggcaattcaaacctctcgcccatgggtctagcaaaagagaccatgttggtatccatctcaggtcggattggctttgactcgacatgtctctcttgtggccgccgttggcgattccagcacattttaccccttcgacgacgcggggcttgacctgcagtgtgtcacacacaattccgttgtttttggagccagtttgaatacatttgacttccactcccatggatcttctggagagtattgtggtgaagtacatgagcttggataactcatacgacccaaaaagaacagatctcgggtgcccatgttgacacagaggaggctcccttcaatggatgcgtgagcttcgagtatactagtaaaagggctgcttcagtatatttctcaaccatgaaccgtgtatatgatggtggatgagaataaaaatgagggttggacattgccggtgagtggtttattcctccattattggagatttggggtggcacgtttttctcgctctcgggcattgtagtagtgagacctctgatcacatgtccttctacgcgagtatgtgagcgttcctattggacgataatagttggtccgagatggccgcaactgacctcaatgccttggtctgaaccttgacctattttgtgggctgcatgaagcaggtcttcgcagtggttgatcctcgttatcacgggcccacgcacgaattttagaggtaatgtcgtatttcctttcagatcgagcaggatggcacgcttatgaatggtaatactttcatcctgggacccacgacgcattattattgaatgtcaagagcacataaagtacgaagctatacctaggcattactaggggtaatatgtcataaggtcgtcagtcgatacattcccgctcacattctgatctctaatcatcgtcctcattcccttagtgataagttagaggaaaccggttcctcaagcacactcaactttcctctatccagtcttccctgactctactttccagaatgacatggctataaggcggacttatggatgcaaaatcccaagacaatccagattcaggtaacatctcggtagtggtgaacgggagtatccatgcgcatccggcgaaaactgctatggtatcatattctcgtgcttagttccttgttgccttttgctaatgaatccttaaggtacaccccatacccatccaggtcaatgccaagtcgatttcgccttccatcaaggagattcctaggggtcaggtacgtttggccacaaaattccactgagagaccttccatctccaaatgacctgttgctgacctttatttgtttacgcatgacccacagcccgcgcaggatgaagaaaccccatccagtcagcctctttccgattccaacgaactgagacacactcaggtacccataacgcgatttttggataagtgaaatagacattgacttgtaccaggcaccatcggctgtcgtgaaaagagcaacggtatcaaacacaagccccagacgacgtataccctcaaagactgcgaattcgatggagaatccatgttatccaacggaagtgcaagatctacgagtgaattacagttctaccgtaatcctaagtccggtcaagctttttttgtccacggtgacatggatatagatacgttttagagagagttttgtggaagagaaagtgtgcttaattaaaaaaagacagcaggttgcaataaaacatgggaactaagtgagggccgtaaaatggctactgatttaactctctccaaatttcaatctcacgcaggagtaaacgagtttcgacgttccttcggtcagtggcttcaatactagcaaagtgtagtgcccccagaagccgtttgaacggaagtttctctccgtggtttccacgcaatatataatagagaaagtctcccggatcgtcaatggtcaatggtgatggggcttggatgcagaaaccagaacatggcggtttctgtaaataagtattttggattccacccaagatacttagatccagaactcccatccatgcagccaaaatagcttcacacgcgaccaggttcaatcctcggaaggcagatctatagaaatcctccaggcgagctgggtcgcaacgtttgagattcgacagtgttttttccaggactgtattattttgagccacaaattgatcaatcaatgagaagtcaggctcattaggaaagacctttttgcaatgggtagaaaacagcgggctcccctggaataccgtctgcatcctgccaaatgctgccctctggccgtaaaacccaatggtgcgattgacttgggcatattcatattcctgaaaacttattgcttcgtcttgggaatatagaacgaaattcccttccgcctggagcgaggccggctgtgatttattgcagctggcctgtgggtactgaacagggaggtactgaacagggaatctctcggtcatgctctcttatttttactaattagcaccatttataacctcatggattgactttcaagaatatggatacaggcagtggtggattggtggattacctgtttcgaatggaggtttgatgatactcgcactgggtggatctgaccggggactcggttcaagggcaatggtgaaaggtgggaaatgctgatttggaggccagtggccattgttgtttgccatgattctaaagaatcgaagttgagatgtttcggaggcagattgtgaacgaagagagtcgctcgtactaggtcaaagatcaaggacgcagcgcggatgggcggggggttatatacgttgtgaaggagaatgaccctccttccttgattatgagagcctttcacgcttcgccgtgttgggtggggaaactttttatgcataccgtcgctctgactggctggctggttctggggcgcttattgatttatgatccttatgagagtattggggagaatccacaaaaaggccaggagcgctattacgaggaaatatacccaaggggtgagtaggattggctgctaggacttcgctgcggcgagtatggagcaatcgtgaactactaacgagggcacgtctgtctcgatacaagcgcagtcaaaaaatgaaaattaccattttattgaaaggtattgtaatatttacatccgtgcgccgaggtatattactccattccaaaatcttaatatactaagagaaatcccccaagtagtttgtcctctcgattgtgcatacacctgtcctccccctctgcatttatcatagaaatggacggcaccaatatggtaagggcaattgtgttcgcttcttttcccatactaagattgattatacagattcccgaagccgacctcgagatatcagcccgaatatcattgacagctttgcaaatttggtggctgggtaccccagacctgaaagacgcaattaaacagcatcacaaactcgatcctgggattgcatcactagtgctggcctgtcaacgtctcaggaagaatggatacagaaagggacggatccctcttacccagaacagcattttaaatcgacatgtgcaagccatggtggatgacctcaccgaagacacgctcaaaatatttggccttctcacctgtcacttcaacgaagattttggagtgcctctcccccgtcagcttcttcgattcttcgataccccctggaagcttctcggctatgtttgcattggctccaccccagatacacgacaatggtcaaatcggagtcaatcaaaagctttaagagaaagtttatcaacctactagggcttgtggaatattatgtggttagggggaaatgggttctgtgtatctaaaccgtcggattgtgctctcatcgttggaacaatccatcaggagctagctactctactcaacggatagcttttgctaccagattgaatgaaccaaccagaatgctgctctgcgtttgccgcaccacaaatcacacttttacctcaataatggcattctccattctgcttctccattacttgacgtcgtctgatccaaattttgacacatgtgttgaaatcactgttgatgcgtaaactgggcctgcttcatactacctctggtcatgaacgttccacaaaaaagtcatatttcttttcttgcatgcctggatgcacggaattcatatcctgacacagaaataaatgactgaatcaagcaagtacacccgggcggtccaagtttgctgcctaggctgtctccaaaagcttaaagcatgcagatgacaaaagtatcatgcctctatacaaaagcctcgttaatgctgtgggcacgctcaaacccatgtgtcaatccttaaatttcctgtcaatcgagtaaaattccttgagaattaggcaattataaagggcgaaatatcgagcacaaatcttcaagtgaacttatccgagagaccctcggccggaaatcagaaaaagagaactcaatcctccacgctctaataactagatcagagtcgacgacaggctgaaacacctccagcatggctttttcggcgaggacagacccctccgtgtccccggttattgcggtatagccgcgcatgtgatagaatatatcacaacgaataagcacttctcgtttgaccgccagagtaatctgaatgagacgacccatatcagttgccttgggccactcatcttgaagatgatcatacaacaattgccgaaaaagctgacccaattcaccgttcattgcatagtaggtcgaattttccatcatgaccaggtaaatgtaggcaggtgagagtgcgtcggtttgaagttgaccatatctctctctgcatgctgccaggatactgaggcaaggcgtcatagaatgccctcttgggtcgttcaagactatggcttcaggcctgtcagtatcgatgttgaccggatgataagtctacttactatgagagaaaggttgaaagggaagtcggaagtccatcgtaggtggctgaaatggtagcaatgaaaggaagggcccgaactgtgcgagggacttgaagaaccgaagtttggggaacgtactggcataaataagatatcctttctaagcaacacccactctcgggcacttcaagaattcccatgtgcagggaccctgcaccctggtacacgaagtcattgtttggtagttcattatataggttttcattacctcaccgtacgccgcatttgaggggtagcctcaaaatggcgccaaacccatgcaatggataaaattatccctataagtgagatcagcatgcagccattgttagttctcagacactcagtcagttatccaatgaaaggtgcatgtaatcggactccacaatggcactgctaatccgctgcaggcgaacgcagataacacggtatgaaaggccagaggcgttcccgctgcgcaatggcgctaagtctacgccacttttcagtaagacagaaatcccgagtttttgaaaggcttttgtatttgtattaggggaagtgggccgaaatactggtttttataggccaggacggcctcgaagatactgcttttagaagatccatatcacgtccgggaaatactctctccttgttcgtccggattttggatcaaacgtcccgggagcatctcgagcataacataaatactcgaccggtccaccttcccggaaccatgcttcaatatttcaacagaatccattctggatacctgctaccatgtcgttggatgaggacttctgtgtaagacaatcaactctgggtttctctgcagtcatatgctaatttatgaagtttcctttcccaagagccagtctccaagccgccgaaacgactttaattgctcaacaagtgtggcttctgggcacaagagaggtcaaacgagcaataaagcggcagcacaaacccaatgctagaactgcatccctagtattcacctgccaggccctcagaaaatatcgctacttgctcttgggaaaacgcagagccttggccaagaacaatatactgaggaactatgcgcaccgtatggcaagcaagctcactgcacgtgatttggctatgctttcccttctcgcctggcattttgattcgaaaatggtgcctctcccccggaggcttcttatattcttcgccgacccctacaagcaatttgacacagtgtgccgatctatttaccgcagctacacgaaaatgtatgtaccggatacgttggcaaacttcgagggaagcttgaggaaattgttagggttattagaacgggacgtgatcagaggcgacgcggtcttgtttacctagatttgaccctctgttgagaccttgccatatcatactagtcaatgagaaataaaaaatacagcagatatacgctgagcttcaatgaaatcacctgcctcaacaccaacttcaatcactgaatgttataccacacttcccactactttcctttactattctgatctatacctatcaaagtttgttgtgggatttgcgagccaaaattgaggttggactttttctgccgttgcctattgtgctgttagtttgtcatccgtcgacgagtttcctctgcaacataattatctcactcaatgggatctatatcttaatcacggccaacagcattgcatcggttacttctctttctgggactgtttcatcatcagcctcaatacatggggcttgtgttgcgtgaaaagactcacgacaattgtcaagtacaaactcaacagagaaacatttgtggtaagagcggcgtcctgagcgtcctggatcatcttccaagggaagatctccttcatttatcgggaatccaatggcaacccggtagcattgaaggaattcgggaaaatctttcttcgtgatcagaccaagacctctgtggatatcgtccccatcattcccttcacctccttctccttcctttcgacaatgacggtagcacgcagttgaatctggaaagagttgaaagcatcgcggacaaataaatttcaagcctgtttttaccagagctcgaagcaagattgcgagccacctttccacgtcagacatcttgaagcaaagtgatagaagcaaccaggaaacagaaggctgacaatttgacaaaagtctactctttataggcgagggccggctcgccagcgcatcttcacagatccaagcacattagtaaatgcacttgccgaatagaactagcagttgggatgcgagatagcactcctgcaaaattttgattaagatattgatacgaaaacgtttggagtgacacagcctcgactgattgtggcctttggtttaattttgttacagcataggtactagtttacagctgctcttacagcctcgcatatcaaatgtccaagtattttactggccatataattcaagttagcttcatgatgacactatctaggacatgaagctgagcggatccagggcagtctaaaagtgtggtcttcaagcaagagcttggatttggaaggctcggttgcaggccgtgttccactaggagatcccatccaatggaagatctgatcatctccgtccgtgaaacccggtagtgttcgaaccacaatttgttaagaacataaggtgattcgccaatcttctcctcactcctcccttcgtgttgaacgatgtaatacgtctccagatcttcgccgtcttctggtatgacttcgtcgagtatgcgcaacggacgagacttcgagtccaaaatttcggcagaaatagattcattggaagggccaagattcatcctcggaggctgatagctcccttctgtatcaatcgttaatggattgcccgttcgatttattaaaggagtatacaaaccttgagagttttcccgtgactgtttccttatcaccccgcagcatcgaaagagcccgaagataccaaaccaaagggtatttagtatatccatatttcgcacaagactttaggtattaagacaataaaagatataaaacttcgtagggaggctttaaaaacagtgaggtactcaattgaaggatccgcgacgtcgagaccgtatagatatgcaagattatatacccctgaatggcaccaatgtcttgtatgttaccccgacccgtcatcattggcaagagtctccagcttcggggctcctgttgtttcctgcatgaggcctatcagagtcccgtaccttggcgccatcttcgtcactgtcagtattgtccagatttagggccggccgaccggcttgcttgtgatatgggactgggacggtaagaaaactgcttttgtgacaggggtcacgcaaagtttgggatagatttattggaagagtgccaggaaagcgtctggaaagcgtccggaaagtgtcagtacagcgtcaagggagtgtcagggggtcatcaggagggcatcaggaaagtgccaggaaaacgtctggaaagcgtccggaaagtgtcagtacagcgtcaagggagtgtcagggggtcatcaggagggcatcaggaaagtgccaggaaaacgtctggaaagcgtccggaaagtgtcagtacagcgtcaagggagtgtcagggggtcatcaggagggcatcaggaaagtgccaggaaaacgtctggaaagcgtccggaaagtgtcagtacagcgtcaagggagtgtcagggggtcatcaggagggcatcaggaaagtgccaggaaaacgtctggaaagcgtccggaaagtgtcagtacagcgtcaagggagtgtcagggggtcatcaggagggcatcaggaaagtgggagagtgtcagaaaaagcaaagttttgtgttcaactgttgtaatcgggcttggcgtattttctacgttggggccatttctggacgccacattcgggtttaccgccatatagtcaaatcacggccttgctctctggagacaccggtgctcttgtcgcattagagcatgctatttcgcatgtattagttcacaggctttctctagtaatcgcgaacaagtggtacttttgttttccccgcggggctgatcaaagccctagactaattatacttgtccgcagccttgggtgctctgataacagtacttccgactgaattatgttaggccaacttatagtcaaagcggactgtgcacgttgggcaaaacatataagacgaacatggtggaaggatcagggtatgagaaaatcgcaaacaatcatcctcccagttgtactcaataccataacgtgtctcctcagccgaacattttttgattatcgggaaggttgggcccctttctattgactttaatgtccaataataacggctctacatgctgcagatgtgcaagtggaatgaattgttgttccgatgcgggcatctcgatcgatatgctttggtcgaaagacataccccgaacgcgacctgtcaaccatctaccgaaaacccgcggcaggagatcaccccaaccataggggatagcctctgccctgcgtgtaattatccatctccagctagtaccatgtccccttaggtgagtgatactgcaggttcttccctattgcttccccgatcacgagcttacaatgtgagtgtctcagttgcgattattggtaccctcagatctgtaccgaagtccgccgttgccgctgaaaattcaattgaaggttgatggggaaccgacggtgcgcaacactggcactatcagaactttgggaagctccatcaaacaagctttcacgaggagacaaggcatgtcggttatgttcacttatctactcattttcagtgggagcattatatgcgaccggatgtgtactggctttgcaatcgcacaggggggttatcgccgctccacgctcattcaataaacgtctttttgtatatttagtctactactgtagatttagtgtagtgcaatttctcaattgccaaacaaggatgttgcaaaagttgcgaattgatacatcatacggtcgtacggcagtgtaagaatttttctaagctcaatgcataaattgttgccttaaagcaacagacaacatgactaagcttcaccgcttgctttggtccgtgcacaacgcccttggttataaatgcccttgagacctgaaaacacctggtttccgagactcttgtcaactatttattccatcacgtgagctatctgaaagtgaaaggccatctctacgcttcatggagaaagtaaatcaggctgtgtccgacgcccttgaaacgcatcgttcaatccgaatcctaggtgacctgcctaccgaaaagctgaatcgtgaagactatctggcctcgactcgtgaattaatcgaaagcctcgtcgattcttggaaagaaaaggcggatttgcggcttttggcggtggaggtttggccacgacacacctactttgcactcgatttcaacaacgacgagtacaactatgacaacgcccacactcaagtggtagtcatacctgtctacctgcttcggctgtccaggaaaagccatacctggacaatctttcggcacaagccccaagactcatcgctcgccaaaagaattgcggacctacatgaaggcaatgggcaggatcccattcccttccttgaagaccacatcaaaggcgtaacacattatgcccctcggaatagcaaaacccctgttgttgcatctgagaaccctacgtgaaaaaatggcccacctccacacaatgatttagtatttgagatcctcattatcgctcgtaatgagataatcaaaagaattgaatattatggagggttgggagaaaaggttcaactattgtcgcatatacgtggatttgcttgctttggcctcgtggatggttaattaagagacccacaaaggaacttggaggattcatatagacgatgtcagtcaaatgaatatcccggcgagaaattctgcggagatggactcaacaagtaacgagaccctatcgtcagctgctgcgcaatttgcaattgtttcattcaatctgtacagatcatgaactgagccttgtacttgtaacaggggatcatctgacaagccattaacacattgaaatgaaagaaaaacgtggaaatttcgatgcacagctgggaagatggggctcggaatgctatcactgcatgtgctcaatgactacagtacacttcccatactatatacatatcgattctaggaaattttagctatggagtgtttggacgagcttactcgtgataaccaatgattgccgcacacttttgcgctagtttgagcaagccgcgctccgagactgaacctactgtaagcagtttacgtctgctcaaaaagaaaatcgtttgttttggggagtgcgtttagttggttatctaggttatagaggtcgatctgtgtaggaaatggagctggccgcgttaaatggaggaaggcgtatgattcatgcaggaaatttaaaactcaatttaacattttgatgcacgggaaggttgtatttaattgagatttgatcacttctgaatgtggggtcctggactactcgaagcgccaatactaaatatcatcatcttgacgggggcctttgtcttctgcctactttcgcgtcgaacggagtattaaacctaagtgccttagctatatggcattatgactacagttaactaactagttaaccggtatggattcgtagatgattcaatttggatggtatcggttagcttgtttgttaggtatatggaaagaaagttaacagcaggcacctgtttgaggaccttctctgtaagccctttgagattttcagcggatatatatatcgttgagagtcatggtgcatactacatccacattacgtacaagatcgcgggtacttgtattggcgacagatataaagcgacagagatgagacaccttctcgaaatagcctcaaagctggatagcgctcatggaatattcgcgacgcacatatagcaaatcaatgctatatagtccatggatcatacaaaagtcccgtagctaacccaggtccacatcattggctaccattgtctgattttagggcctgctacaccactgctcgtggtgtaggcccaggctgatctcatagtttgcttttgcggagagtatttcgcagactgaaaactagatgtacgtaggaagtctattagaccttctgccaccaccacggcggtccttgtgaaactgtgaattagagaaagaggagaacatcagaagagcgtcagtaaagcaaatcttagtaaatgttctaatgctgttatctaatctacataatggcctgagatgacatcaacaaaggcggacggtcctgttagccatcagtcatgatatgtgcctaatgaggtaggtaaaaataagtgtcttagtaaaagagtgttaatatcatatcaggctgccatttacattttatgtcgatgaaccattttgagaccagttattataatgagtcaagtcttaatcggctgcttttggatgcccgaagtttctcatttcgccctcacgtgatatcaccccccacttacctccctccttgaatgttaaagaaaatagttacacaaagcgaacctcctgtttcaataaccaagaacgaacatttgtctcttcctcttaacacccatctggaatatacaacctcccaggtcctattttgatctgtttgttttctttatcgacttcttggaatgtacctttgcttacgaaatgtagttccgcccccccctccttccccccctccttacttcgtcaccctctctgtcacatcgcaaacgaacgttttacgaggctatattttgtcgctttgttatcaatgagtatgacgcagggaagtcaagtcataagatttgacactgcagtggttcccgagaaggaggatttggaagaggtagcgagtaaattggttcggttcgtttcaatcttttccccaagagccaggctgatcgcggacttaggcgtctgaaggactggcgatcaacataaagctagagattgatgaagaaccttctcatccaagatcgttcacaacagccgacgcttcggtccgctgcgtccttgtttgtaagacggggacgatgggggctgtcaggataactggtcctggggccttttataaccttgtcactgggccggaggagactgggtgggaaattgttgcagtgaaggcagagcagacctgcatgtttattggcgatcccaccgtgcgattctttcgcacttcgcataaataatgatactgtctagtgctgcctgtgcttcataacatattgcacgaatgcagcggctagagtttgggaaaactcgatttttgcatccgtctctctagaaaggtagatggatggcagtgtgtcccccaatacgggacagtccatttgcaggtgcttctccggcccttgatattcatgcaagaagttcatcaagtcttttacttggaaatctaaaggaacagatccggggctgggtgtcaagacaggatggtagaggttcccagggactcgaggtgcaaaagaacctgtatagtattcgcttagctcatcaatttcattcggccattctcatatgattactacctgaagctgaaggccaattctgttcggcttgagggggttttggggcgtccgactgggaaagacctaggacagatagtagttgttagaatggtaagatttaatggggagcattgcttgagacctttcgaatgtttctccccgatcttctctagtactgtggttgaaaatttctctttcatgtttgcgattgtccgaggtaaactcaatcgaattatttccctagtagagcgtattgcatacttgccgaaagcgacaacacagaggaccaccaaagcattgccttgtttaggcccagaaagatctctcactttaattaggaattcttggaaactgtctgattgctctgaatgagcagacaagagtgtgaatgcttccgacacctttctagcctcgtcagtcttaaggtatcctcggaggtcgattagagacgaaattttttggagcttttccaaagcgttgtcttcaagcaatcctgcataccgaggccgtcgcctctttgcggcgaggcggggggaagatggcatcaggagagtgccaggagagtgccaggagggtgtcaggagagtgccaggagagtgccaggagagtgtcaggagagtgtcaggagagtgtcattcgcagcgaggcggggggagatggcaccaggagagtgtcagcagaggtcacgaggggctagatatacacttacataagcagcgcccgtgtgtgtaactagttaactagttaattattggccaatctgcggatgataccaatcaatgctcctgggatacaccgtaacttacaaaattgacctgccacccacctggctccggccttagtattgattagagacgagattttacttggttcaagtgtccatttatcaagtcctggccaattaggccatttaacgacgtcagtggggtaccaatatgttcatagggcaagtactatttaagtatatagaatggcagacctctcccagcaatgtccaagaaaaaggcaagcatcatatcgacaaaatggagtttgcccctcacggtacgctctccaaccactacagcattataaagctaaccaaaggacccccagatcctgataaattcttgcttggattgagaaaaatagggaagagcatctatacatgagaatttcaacaaatttagatgatctaagagcaactgctacgtcaaaaggattgtattgactatgactagcgtaaataaccgtttcttattttgctgaatcatcgggttatgctggggatttacgcatttttgggcaacagaggccaagcttctaacgaacaattcttcttccagacgcaaagctgatatgtttgatctaccatgatttcgaggagttctgagatcctgaggatgaccaggatgtgcagtcgaccggtagcaaagcggggtgtacgtggtcgcattaacaaatattcaaacgacctcggggctttgctgaaggaccatcacattcccgctatcccaagagaatctgccagatctctgggcctcatcaaaggcatagccttcagtttaaacgttcccaggagcaaccaactctcttatccctaggatactccggatgagtcctcagataagtgaccggcctctgaaaagtcagaatagccctcagaagcaagattcagtccaagacagtttcatgagtcggtattcattcgatgaagcgtttaagtgaaatcacatggtttataatagataggataggccaaaaggaatataagtttctatggcaccatacggtcatggtaccatacaaaaccgtgcctgtttcacgtatctctgaaattacagatgtcactagtattgtggcttatctgtctcaaagcggtggctgtgcaggctggacgtaaaccctgtaattaccttacatcggtagataatgagcaattgtatcgaatacgagcccagaacatcccttgactaagctgattaccgaaatggccggactacatactgccaagctatcatcaatcgagtctcaagttgtgattgcactttccgcaaatttgattttctaaggtctaatgtatcttcagatataagccacgtatatggaagtaggctgtcgcgcctttcccatatatataccgatttgctgttccaagaatattcgtccttattgtagtatttcaaagaaggtcggttaatcattctggcgggatacaagatgaagtccacctggttttttaatgagctcgttccttctaaagatagtgaagaatttattttgttgatgtggctttggtcgtgcagacccttgaataacatcaattactaagcctgtcatgtgtagtccaacagcatcgacctggcaaacataggcaatataataagataattaaccggtatgttgacttccgtgtctgcaatacgaagctgggaagtcgaggcgcagcgggttgaatgagaccttttcaatagattaacaaaccagaatgccgcatcttcgctccaatagacgagctcttcctgttttgtcgaatatcttgactcttgattaaaggacttcaggtcctacgacaggaagaagcatggtccggtaatttggagccaggggtggcaaaaggatgcctataagtcagggtggaatgatacagactaaagactggcaggcgaagctcttgataatcgtgacatagacgataatatataataattctactgtaccagctcaatagtgatgggaggtgcgggagtttattttcaagtgtattcatagcgttttcaagcgctctctttcgggtgtaacacttcacctggagccttctaggtttccgaaactttggaccatataaatctcacctaaatagagtatcggtttagaccagctttgagggaaagtctcaggtatctcacagccattggtctatatcgggttttgggaattggttgagaaaaacgggcatcatcatcaggccggttgcttggaagggcccattgttggtttaactcaatcgcgggaagcacacgagaactgactttgtcttcgcgtctggggaaatggtaagaagagctcgcgcattaaaattggggcttagtacatgtaataagaccgggggattaagcaaggatctgttttctctcggttatcagtggaccttctgaattcagtcagctacaggagccctgcaaattctcaagctccccttcatacaagactaaaagccacgtacatcctcttcttttaatcgaccaagttcatggacctctggggccatacttttgagccagttggcgaacttaaagtgtaggagggtcaatgttggtatgtctcagtcaactgaagcacacgagacttgaaagcgtccctgcgtctaggaagaagaaaagacagagcttatgtaaacataagtggattttagtaggtaggtggaattcaactgaggggttcaagcacggatcggagggaacagatctcaaggaaggtcatgttacttaatccagtcagccacaggatccatgcgtagtctctcggtaaatacaccatcgtacaagaatggagcccactaaatctttcattcgggcctttgggataatttcccattgtaggcaaaccgtcattgtcctctgcggcatcggaggaatctgcataataatgtcacataaggctttgtttgaatggaacaattgggtagggacaaacttggaataccgacgggttggaaacctatgaacagtctgagttaatccttgaggtgagataaacggcatgtctagtagtggatcagtcagccgaatgtttcaaggttgagagctccgaactttacatacgatgcagagagttctatcgtcgtatatataatatttccaaccgtgtgcaaccgttctgtcatgagtcgcacttttatgcccccaaaggaatcaggacgatctcagtccagttcgtgcatagtaccgttggccgagcgttcagtccattctctgagagtgtcctggaatccaatacctacatctccgttgccccgggttgctgaccgaagatgatattggactttatgactgagcctgctaggttccgattaacctaatactgatgacagcctccctgaagtagtgtcaatgaaagacgatcgatggcatagtactgttgttaaagccttagttgtacttttggtagctttgagtaactttgagtttttctaaagggcatagatgctccgctgcgagcttttgtgtgggtagtaggcccagtaatgttgattggttggaaaatcgtgagcgaaagaaataccaatctggagcacggttagttgatacagaatgagtgaatgaaggctgaactcactgtggtatattcaaaagcagtctttttgtttggctaagtagtttggaggcagagaaatgatgaagacctttgtttttggagcaactgactaaatatatatcccttttgaaatagcatcactttaggcagatatactaagggggaggggccgatatttagagttcctaggattcgaatgacatagctatggggcccttagaacaccttagtaggctcctgggaacgccccgcgggctcctaggagcaccatcggcgtattactgtggattgcttgtccttggcttacagattacttagcaatagcacgaaagccttcggcctgtgcgctcattggcgagagaattagttcatcatcgtcacctgctaaacactgattcctctagctgccttgatacagggaagggttctagatctttaaggaaatctatccaatcgcccttgccctggtagtagtccaaagcccgattaggggatagccgggctggtaagcgaagtattccgaggggtattcctaggagcataggctaaaatggtaaaatggtggtcaattgaatagccccactgtgagattttttacttggataggatcgagaccgctaggacgaacggccaacgttgaccgcgcccgtccttttttgatggccgatttaaatgggaagtgttgcacgtgatgggattagcgtgtcgcattttattgatgtagtttactcaggccgctcatccctacactcagtgagcactcagtgagcaaatcagagtgctcagatgatgatcagtaagtggatcagggtgctcaggggatgatcaggtgatgctcagtgagcagatcacgctgattatgtaatgatccgtgatcaaattggggtactcagggacgtgctcagttttactcagtgatcaaaaagcggcaagaggtgagcactaatacggaaagggaaaggtctcgagttccaggcattatccggtacatatgtaacattgtggaaggtttcagttctgatgatgttgtacgctaacagtagtttcacattcgatctatcaaccgaagaaatccccggaaagccataatagaaggctatatacatggaaaagtttccgcataccaattcaagaaggcatagatgatatctatgaaatgacacccaaaaagacatctaagacaactactattaacctaactagatcatgttgttcttaacagagaccacaaacgcacccgactattcttgtttgtctaatacaacatagatacggcataggcattctacttaaaatctcttgtcttaagtgacaaacggggaccctgcataggtttgaagcttcaaccgcaccccgttccaaatgaggcgctctcactggcaattaaggggtctcaggccggttgttcacatagccgaactaaggtctaagcgacccgtcgaatgggtctatcagatcgtttaatatcgtatccgaaacaggtcgctttaaatatagaccttcaaacggccctatggcaaataatggcaaacttcttgtactcccttgcaaacttcttttttaaaaatcccctgtgacacttcaaccttggaaaaaaagtattctgtaactgtccaactatcatgacgtcgctcatagtagctagcctggctgtactaggtgctctttatatgtggcgtgtcaactctgctatgaaagtagtccccgaagaggcacggaaactatcacctcatcgttggacagtcgaagaaatcaaagcagcttacaaaaagagcctagaaaaccctatcgatgtgactaagagcctgccaccaaaacaatcccgacgatatgtgatcgtaggcggaactggtaagtatacatatagatcgcttttcgatttcatttactgactttccgaactacaggcctagttggtgcttggatagtctcacatcttctcgcacggggcgaagaccacaaggcaattcgcattctagacctaatatctccagagcaggacatcctcaacaaaggcgtgggctggatcaaaaccgatatcaccgacgagctcgcagtaacaacagcattcgaagagccatgggctgccaatgtcaccaaccttgccctaacagtctaccacaccgcagccataatccgaccacaggaccgactcaagagcttcctaccacttagcagcaaagtcaacatcgacggcacacagaatgtcctgaacgccgcaagagccgccggcgccacagccttcatctggacatcctcaggctccgtggccctgcaccgaccaaccttctggatcgcgccgtgggcgacccagcctaagcgcgtagtccaagtaatcggcgacagcaccaaactgcccggatctcactaccaattcttcagcaactacgccgtaaccaaaaccgaagcagagagcctcgtccgcgcagcagataacccagcaacaaacttccgcaccggctgcatccgccccacgaacggtgtctatggcacaggcggccaagccaacaatgtcatcacgggactttacctccgcaacggtggcagtccgacctgggctcgcccaatcctgcagagttttgtgcacgctgaaaacgtctcgatcgcacacctcttgtacgaacagcgtctgatccagcagagcgagcctggttcgcagctcccaaatacaggcggccaggcgttcaccgttagcgaccccaacccggcgattgcatttaatgatttgtacacgctactcacgacgttgtccaaaacgccgctttcattcccggaggtgcagcccttgccgttgttggtgatggcgtattttattgagatgtatactttcttgcagtttagatatctctcttggttgccgaggttgtcaggggatattgggcaacttcagccgtcgctgttttccattatcaatgttcatgtgtttgctgatgattcgcgcgcgaagctggcacctgagatgggtgggttagggtataacccgcctctaaacacactcgaaggtctgtgtcggcgccttgtggattggaatacgaaggccgaaagagagggggttgaggtcatggggaagaagatacggttgggccctgtgcaggtttcgggagatggtgtcaatgtggtcgccccggtgttgtgagggggatttgagtttgttcgatttactcgatctgagtggaggagcagacattgcaccgggttatttttttatgaacatgatatggcgtacaattaaatctgtacttgatcttaggagttcggttgtaaactggaatacgatttggcgtgaaatagaatcatatttggagataaccttagaggaactcattgaatcttctgcaacttccaaaatttggaaaagccggggccgaccagcagtacccgaccatatcacggtctcattcttcctcaatcatcattttgacacaaaagccattgttaaagccggcatggaaattgataaacctccatagatagtcgtagcttgagattgatagtgacctcgggacactctgccgaaacacaccgagaacccagtgtcgagccgtgtgggcgagcagaagtcctcggtgtaaaagcaagagcgatacacataggccactttcgaaggtattcatgggcgaagtaacaaggccatgtaaatctcaagtcgcacacatggcactccaccatgcaagcgttccatcaagcagactgtgcgaccaagaacttgaacccctcagcagcagaaggtcgctagaatgacaagcttctatttctcagaaagatagtcacgaacaagacgagagttctccttagcgagcctgttgctgagccacttgacgcatatggtcaagacgctgcatgcgcaaacgctcagatgccacctcaacatcaagaatcgccccgagacggttcttccacgtctcctccagactgactagctcgccctggatcgcctcctgtgcaatttttctctgcttgttcacctcctcagaagcctgtttcgtctctgccaactccttctcgagagaaccaagtatctcctcaagctgtgaattgccaatcagccaagcgttcttgccatgctcttctagcagagccaggttctcgtggcgcttggacaggtgcgagcttgacgaatatgccttctgcaaagtctggcgccatgcgtctaggtcgggtgcctcggtgtctgatgcgcgagtcggggcatctggtgcttcgtaacgggatagatcgattccgcctgtgagaggtgctccctgcgctttgcgcgagagttcttgttgcatcaattgagagaatttgggttccggcagttcggggatccaagaatgtattgtggaggtgtgctctggggatagctctgcgttgatgagctgctgcgctcgcgcttgcgcggacgcagtgggcgccgcgtcgatatcttagaacgttagtgattgggacttcaatgcacatctcttgtccagactggatacatacatggcagcgagtcatgagattcgttgattaacggcattttgaagtggttttcttgtatggatgtcaagatcaagacctgtagattaatctgagaaccacatgaaggcggcgagcccttgagtatcgctgactcagctagtattgaactaataccacgtgaccccatcttttatatgtaccgaggcagaaacgaacaaagtaaacagttctaatttgcgaggcaattagtatatctaacgtgaatgcaccaacagcttcattcgagtcatgagataggttggttgtgtatattgctgcagcaaaaagcagggatgggaccagcatttcccctctaggaatgctctcaacgatgatcctatccagtttggattattttttacgcgaagtacctgagtctcaaggcaagcttccagcccaccggataaaaacaggcaattcaatcttcaccagcacatcttgtgcggggggagtgcagcgaaagtctattcccttttaggtgttcggatgcaatggatgacgatcgcttagacaaatgccacctaccaacctcgggagtacttcatgtacactaatgatcagcttcttcaccaggcttgggagtacttgtgtaatgattttctgcactcgtaggtcgctcgttcgtcttcccactatatcccctaccagtgccctcgtataagaacccatatctccctgggatctcaactcttcaagggctacagttactcagcgcagatttatctattattaattgtgattgtattggaatcccttctccatgatggctcactttcgcatgggcgtgacttttgttggggtgactcttgcgctgctggtgtttttgcagctgagtgcggtattcaagctcgatagccagtcgcaattgccttcgcctagctttatttcaaacttcaaccagtggagaagcagagcaagctcggcggcaactgatatctttgtggtcggagcaggcaaggcagacgtaactgggtatgtttatgcgttaattctgacatatcaatgcactgagttggctaatatgattactaggcccgttgtggagcttgctcttgctggctatgccagtttggaccaactaggcactggtttaaagcagagactgtattctcacgccttcatcttcgcagacccagataagcccgatgacacttttgtttacctggttgtcgatacacttgcgggtgacacggccgtgcgacatggtgtcttggagggtctcactgcactcggtggggagtatgcacggtacggcgaacacaacgttgcaatgacgggaacacattcgcactccgggcctggagcgtggatgaactacctgttacctcagatcccggcactaggcttcgacaagcaaagctatcaagccattgtcgacggcactattctgtcaatcgtccgtgcccatgagaacttggcgccgggtcggctctcttttggatccatcgacttgcaagacactaatacaaaccgcagtcctttttcatatgagcataatcccgaggaagaacgggcgcggtattctgccaatgttgaaaaatcgctctcgctcattcggtttgatcgcgaatccgacaataaaaccgcggctgtcctaacatggttccctgttcatggcacatctatgtacaacaataacactctggtcagtggcgataacaaaggtgttgcggcttacctcttcgagcgcagcgtccacggcgatgcgaggttcaccgaggatgccgtaattggattctctcaggcgagtgttggggacacatcccctaatatcctcggtgcttggtgcgaagacggctctggagagatgtgtcgatatgaagatagcacctgcggtggcaaaaacgaggattgccatggtcgaggtcctttcttccgtgagaacgacaatggagcgaagagctgcttcgagattgggcgccgccagtacttagcagcaaagaagctttacgaagagatggacaccacccctatcaaaattattggaggttcagccgtgaagtctttccatgtgtaccaggacatgaatggctacacattcccatcgccgttcaactctagtacgctaactacttgctctgcggctctggggtactcgtttgccgctggaactacagatggacctggtgcctttgactttacccagaatgctactagtccagctgaacgcaaccccctgtggcaagttgcgcgtgcagttattcaccagcccagcgaagcgcagcagcagtgtcaaagtccaaaagacgtcctattggatatcggaactcttactgaaccttatgcttgggccgcggacattgtcgacatccaggtcttacgagtgggtcagctgttcctcattatatccaccagcgaagctaccacgatgtctgggcgacgctggaaggaggctattgcgaaagaagcaaaaaaccaacttttaatttccgatcctttagtggtactaggagccccatcaaacagctacgctcactacgtggcgacagaagaagagtacggcgctcagcgctacgagggcgcgtccacactctacggcccaaacacgctggcaggttatgtcaatctgacccttacttatctgccatatttgggaagttcctcaggagttgccaaactcccagccatccaacccggtcccaacccatcaatcaataccaaccgttccttgagcttcattgcaggggttgtgtatgatggagcgcccattggcaaacactttgggaatgtgacttcaaacccggggagtggaccctatggccccggagatattgtgaagacgacctttgtgggcgccaatccccgcaacaatctgcacctcgaatcgacatacgctgcggttgaaagaaaaagcgattctggcacatgggaggttgtgcgcaatgaccgtgattggaatttggtcttcatgtggaagcggaccaatgagattcttggccatagtgaggtgacaattcaatgggagattgaggatgagtattatactgtcgacactacgtcccccctgcaggctgggacctatcggatgcattattatggagactcaaagaatatttttggccaaatctcgccattcgagggcattagtgagactttcacagtgaatacttcataatctgactcattcagaatatgggtgtgtgtggcttggtggcaagttgaatgaatggtgtcaaataatctaattgccaaaatgtacaacccagtaaccaggcctcagtgattatatcttcacttacgcgcccgtacacgtagcaaatgaattagccagacactctcggtctacaaatctatctggtccatatgtcaacatggaatccttgataataataataaagtggtcctgcacctgcagccagccaatcaccacgcgccatcgatcaaggccgggcgcctactgcgacgtctctttgtcgcgcgatctatttctagcataaattcgtctcacaaagaaccccttgcaatagcggttccctctgggaatgatactactgggttgtttcagacttatccatggaaaagctcccaaggatgaacaatgggcggctgacaggaagccctaagccgacttggccagaaaccccagagtgcagatatatcagccagggtcctcgaaggcgagggctttgaaagagaaatctctttcctaataaaatctcaggttgcttcatcttgccccattcttttgtttctcttcatttttgtggtccctagtgatccagtcattctttcatctgcaagccatcaagacgcctcctaggccttgtatgcattcccattaatttcataatattttctttgggtatgcttttttatacatcggattgtctctgttttattcaggtgctctagtatatctctgattgagcacccaattctctttactgtcccactttgtcgaagtcgtgtcccggcgatcacttccaacactctcgtttctaaaccaggatgcttcgctttcagttctttttgttccttcttctgccgtggatggcttcggctggtccgatctctcgctggttgtctcggtcattggaggcatcttcgccgacttatttccccttattgccggatatcgaacggcgtcaagctggcggtatcaccgcaatcacgcctgtggcagcacctacccagcaatcgtttacgtacgacgagccaatagtacttacccttttctaaaccattaagtcaaccacctagctaaccatcacttcaaagccaactacataccatgcgtcatccacaactcataacacaaccaccagccagaggccaactacgcagcagccaactccacagcaaccaaccacgactcatagtacaactactagtcagaagccaactatgcagcaaccaactacaactcaggagccaactacaactcaggagccaactacaactcaggagccaactacaactcaggagccaactacaactcaggagccaactacaactcaggagccaactacaactcaggagccaactacaactcaggagccaactacaactcaggagccaactacaactcaggagccaactacaactcaggagccaactacaactcaggagccaactacaactcaggagccaactacaactcagaagccagtcatcacctctcatgtgtccactaccactcggcgattcatatcctcatccacaaacccgggaatgctgctttcatcaacaataactagcgtattacctgcgtatattccaggctcaacatcctctctcgattctttggtggtgccgagttcagcccaatcttcatcggctacgcttctaggtggaacaaccagcatcaaagctaccacagccacatcgccaatatcgacctctacgaccatacacccaacaatatcaccggtgcccacagtgcccacaagtcgtagcccaacggtcggagtcattctacctctaggaggagcaagcagcagcaattattccacgttcacaccggtggtatcaacctccgattccatccaaccagcaaaggctacgcaggcatccatacagcttcttacctcagaatccaagccagtggtgaccgtaaccgagcctgtgatcgtatatgtgactcaaggagcgccagctcccttctcgacaagtgtcatccatcacgcacctagtgtcaatagttcatcggtatcattggcaaattcaacgtctgttgaaccaacaactacatctttgacgtttgtgaccatccattccactgcaacatcggttgttcgtgtcactgtttacccaacatcatcaccatcatctgcttcttcgctttcggtctcaaccgggagcacttcgagtgtgaatgcaacgccagttgttcctatgaccggtgactcgacaacactttcgcttccttcatcgtcttcgttgttgtcgtcctcctcgagtgagattgcttctgtggtaacagctcacgtcacttccacgagtgttgttcctctgactgttcacccaactacgtcgttgcctgtatcttcgttgttgccgtcctcaagtgagaatgcttctatagtgacaatccgtgtcacttccacaagtgttgtatcagtgaccgtttactcgacaacatcgccatctgctccattgttgccgtctttaagtgagactgctctgcgtgagactgcccctgttgtgacagctcatgtcacttccacaaaaacaattcgcgtgaccttgtatggtactgctacccgagcagcgaaaactacacatacagcagatcccacatctactgtggatgccaatatcgctaccacaacctctaaggcaggccaaggcatacttactgtgaatccggttacgccgcctggctttatcacgatcactgagactgagacggagacaaagactaagacagtgacagatcgcattactgagactgttactgccaccgtcactcggaattaattgtatgattgggaggaaattgattcttttatccttttaattattatgcatggaggcttctttcgctgagtttttttctttcatatttcagactaatttctctaatctatgtcgaaatgttctttatagctacaagaatactaagctttattcaggctaagccataagatgacatgttctgtcctctgtacataccttagcttttgctattgtatatccaaaataaactttagagatcatgtccgatttagacccatatagatcacatcggctgtgttttatcatttctataatataggcgagtctcccaaggtcagacaaacccttgcaatcggatagtactatgagcacaaccacctctacctcgccttccacctaaccctcccaacccagatagcccagtcccgcacatcctccctctcacatatcctctcaacagtaaaccactccctagccagctcctcattactcgccatgcgatgcacgaaactatgacaagcgcgacaaagccacgccacactattcaacatccactcatcatgccaccccctcttaacgaccttcgcatgcaccccgcggggaatcaaatggtgatatgagagcgggatccagtcgcgctcgcagatctcgcacgcgtccgcgcgcgtgctcgcccatgccagcgggccagtcgtcacgctcgatgtgtactccgccagcacgggcgcgaggaagtccagcaggtctgccgcgttgggaatgatgccatagacgactaacgagtcggttacgctaacagggattagagagaatagggtttcgagcgtggcgcgtgggaggggcgtgtcggtgtcttgggggatgtagagggttgatagggttggatcgtgttggatggctgcgtagcttagggtttggagggcggttgggaaggtggtgaaggtttctgaggctaggaacttaggttgttagctttgagtcctgtcagttgttggctgtgatgtgtaggtttgttgggcctgattgctttgcgctaggttggacttggccgggtacaatgtacatcaacaaattcggcgagctcttccgggtctgcttgtccctgttgagaggttgtcgctgttattacgtctttgcgcccggtgcgcttgccctttggcttccgtcgcgctggcttctgtttttcctctgaacgagccacgatggcattagacagacattcgcggaacacagcataattctcattggaagtcattgagactagccttgacctatagctcggtccggaggggatgtcgggcaagtctgttttgccccgcggaaaattgacatcattcttcagtgaccttcttcaaggctccgaacttcactgcctttgacctcgagatttatgaaacatcatgacagctaatacagccaatacagttgtcgcttttgatttatatggcactttactctcaactcaatcgatcgccaaacacttagagaaacattatgacaatgccaaggcgcagtctatctccgcgctctggaggcggtatcaactggagtacacatggagattgaacagcatgggcaagcaacacttccaggcttggcgctcaaattattgacgatcaaaaggccgctatgaagacttctcagtcatcactcgtaactccctactgcacgcgctagccgataacaacgagcagctgagcaacgacaacatcgaacgcttgatgcaagcttacgatagtctctctacattttctgacgtgaatccagctttgatcaacatcgctgcagacccaaccatccaagctgttatattctccaatgggacgaaaaccatggtaaccaactcggtgttgcgatcaaaggacctttcgccgcacgcgagtgtctgtcaagaaatcgtcaccatagacgaagtccagcaatataagccatcaaaggcaacctacgagcacctagcgaagcagataggccaagatccgtcgcagatgagcaaactttggctggttagcggcaaccctttcgacattgtcggggcgcgcgctacaggcatgcaggctatatgggttgatcgtgttggtacaggatggaaggacgccatggctccagatctacaaccaacggccattgtacacagtctggagcaaattgtgaacgagattcatagccgtcgcctttaagctagggcatagagaacaaacttcgaacggaggtatctagacactagacaccaagagaagttgtgaaaggaatgtacagctgaatatatttccaaacgctccacacttgagtagaagagtttggggtaagccagcagatttgctctttcctcccatttcccctccagaacagtgattgtaacaaaggttcagagtgaatagggaggaattcagtttatgtgaagaagaaaaggaagagggcgctcggcgaaaaatttctcgatcaaatagtacgagcttagtcatccgactgatatcccatgggtcacgtgtgagcttcgcttatcgataaggtgcctgtccagatgcttttgaactcgtcgttggcaaggaatatttgaaccggtgaaactgcaagccatgtcgcgactcctggatcccagccgagctgcttggctttaccctcttcgggtatgtcaatttggggcctcctacgcttcaagactaacctgaacagggaatctactattttgcgtcgaatcgattcctatggcctttcttcaaggcccgccttgtcccaatcgtcctcctttcttccttcatatatttcatcctatttttcttcacctacctgccccaggttgccttccttgccatctttcagggcagctcggcatgggtgagcggcgcattcctggtgcttggtgaaggagctgcaattgttgccgccctcttcgaggcattcttcgtcgatgagaccctagtggatatattcgatgcagtgttagtaaatgagggtcaggaggagcttgttactacctcgcgggtcatttaccccgagcctggcaaccccgccaagcgtctaggcacgccgaccaccagtgccgtgtattctccattttcgttgcggcagatcgccgagtttataatcctgcttccgcttatatttattccggtggccggcacccctatgttcctaattttgactggctatcgtgccggtcccctccatcactggcgttacttccacctgctggacatgtccaagcagcagagaaaggaaaccatcagtcggcgtcagctgcagtacactacgtgggtcatgtccatttcctctgttgatatgagatctaacgcactctagctttgggacgatggctctgatccttcagctgattcctcctttctctatgctatttctgatgaccacggctgctgggtcggcactttgggcgacggatatcgaacgcaagcgacgagctatcaaccaacagtccagtcgactgggtgaacaatacagtgacgatattatgccttgacctgtgaacgatatgtctcgagattactgcaaatacatctaattttccttttctggttcctgattcagctttgatctatgccactagggaggagcaatgaatattgttaaatccaatctaattccctctccgtgattcaattcgaaacggcggacttgggaattgctttttcgagcgctgtcatggtaactccctaatgccttccgccataaaaaagacacgtccgcgccactgttcctcaccttctctcacttttccattctccctgcttctctgtcttatactcatcgctgtgcctttgcattttcgcccgctcaatcggactcaccgactacgctaccaagctggagacccacctcaaggctttgatagattgaatttacatacgcaggcgtcgaggcataagcagtagttgcaaatagttatcaatcccataactaattaaataaataataatataactaactaaccagatgtttaacatacaacataaatcggtgacgggttttcccgactaggtctagcggcgctctgcgtaggtggagccccggggagcatcggcctcaggatccatgtgtactcgactaggaaaacgggaaaacggccgtttgtcggcaatttcccaaaacctcaataagttgtgattagggagatctcttctaccctaatgttgcatcagagtggtctttcctcactccttatcttgatatccacggtaatatgattgacaggatggacctatccaaccaaccgctgccaggggggctgccctcggagatctggcttcacattttcaccatggtatgtcttgtaaaacgcaaagaaatcaataaaatgccaagctcacatcacaattcagctggattgcccctcccagtgaacaactcccgtggaaaagttatatccatcccactcatttgtgtgtgcatgtgaaaaacattgtcgtggtgcactcctatggtgtttctccttaccagtttgacttctgtgatgagtttgtggaattcctatcatacctatttagggtggcagacaatcttcagaactttcagtatgttgctttctctttcgttttgacacagcgctgatttcctttagctggtggcatgagagatatatgccaggggaaattttgtaccatctttacaaatactgtccccaagcaagtgtccacattgctagctcgaaagttgcactatgtgagaaaatcaacaaggatgattcatcggcacctcaactctcctgtatccgttcaatcgaatcagaatggtacaccggagagtatgatagaccaatcaggccaagttcagctgcaagctatccagctgaattgaaagatattatttatcgaagtaagaacctcaaaaacctcacactggttagcacgtcaaattggaggccgctttccaggacgccgcgtcatgatggcgacatctcacctcatgtcaagccgagggaacttgaagcccaaaggaatcagaggggtctcattacgttggaagaagggaatattcttcctcaagtcaaaaacattcagttccaaagtatgagatttggacctctccagagcacgttatgggccacacaatacaatggcataccatcaaacatttatccttgatcgccgtcgattggattcacttgttgcccaagatcactgctcctagctgctttcatgcgctagagactctagagataagcatttattataaaacagaccgccctgaatctatcgaacgggtggagcaattccacgactttctgaaagagcttctacctttgaaaatgtttatcgggtatggatttccacagaaaactctgggggtattggcgaaatatcacgccaaatcccttcatcacctacggtttcgatcttcattgagactcgatcttgacgggggaaaatctcctgccagcattcacaatctcgtcaatctagccgatcaactcccgaacttactatctctcggtattaatctggactggatgcccgacgatgaaatggtgagtatccccgccattattttaccattaatggaggcttcccagtcgctaatattactatagccatacgatcttctcgtcaacattgttcaacacactcatcttcaacatttagaactcaacataccaggtcttggttgttatcactctgagtggccttaccccaaccttaacgaaatgacttgtcgggcccttatcgagttctttgacgagacgtccctaaaccttctctcattacatttcgtcattggcgactgatttccttttgggcctccaccaattctacaatggtatcaggcagcgttcctggtcggcgagcgagactatgcgggtcatatgcgcttcagcaatgttcggcagtacaggcaacttcggaaaatgatacgcgaggggagttttgttccacgaatcccatcgcgccagctgaggggggactggcccactgatctacggcaggatatagaagaccgaattagcgacctcttttgtggaaagatgccgagaaaagaatcttggtagcggatatctgtcacatacatcctcactgttatcccgcgcttttcagagacaatatgcaatatcttgatgtcgaattgagatctttacctctttaccagggcacatattctaggaatgtcttatttcatagatgaattttcgatccctataaatacattatacggtcgctcacccatacttcaaggctacatttgcttcattgttttagttccttaataatcttcctacttctcctaatctatgaagtggtaggaagagcaggaacgggccttatagttcataataccacatcatcgactactcacatgtaggagatatccatggatatgcatctccattcaaagcatccgtttgatatattcatctacagtgcagatataactctcacattcttcactttgatgtaggtttaacatacgcggcatagcaaaatgtacctgattcgagagtaatgaccatcatggaacattgattatttggatttgggtctaaccaaacaatagagtagtgtacacgaaggcaaccaccacgacttcgacgaccgattcatgcactacactaacgggtgaaaatgcagctgtttctggtgtcaaaagcggtctttttcggtgtccttttcacaggtcctcatcttctcgttgcaaaaaaggtctggaatacgagtagcacgtgactgcaccacgatccgagacgtgttttcttcttttgggaatgtattcacattataatccttggactcatctcttgagagcaaaacatcataagtacttttttcatagttaccaaggcagagagttcatataccctagactttccaggccttggacaattcggagacaattcggaagtgtgaccccgtacttcgaacctttgcccgagattatcagagcctctagagcttcagctttaaagttcctggctcattccgactttcgggacggatttcggcttatagtcaaacctggagtctggatgtttggactgtctttgggccgattaaacatgacctgactggcgtggtcatcccggcaatttgctcatcgatggaccttaaaacaaggctgcgcaaggcctgcgatgcctgcagtattcggaaagtgaaggtatggttcttttgtcatgttatgcgggggaatactaatttctatgtaagtgtgatacggctgggccaccttgtcggtcgtgcgctagcttggatattccctgcacctatgaaagaccaagcaggcgccgcgggccccctaaccgccatgcagaagcgtttaagaaacaaaggcgggaacccgaagatgcagtgtcgctgagcccggcaaactatccgtcggcgacgactcccctggcggcgccattcaccaattctcaatctgcatcgctccccttatcggtagaatcgatttgttctttgcacacgatgcagatgttgctcgatgacttttttacttacattcatcctttggtcccaattccacacgagccttcttttcgagcagcctttgagcgccgagaagatgtaaccaaccacacatttttggcgcttttggcgtcaatgattggacttttagtagcttccttccctcgacgacctaaactccgactcaacaccgaagccgaacgcaccgctttccccaattctatagctctagtaaagcggtgccttgacgttgcgattcaagcccgcgggaccggatatcttgatcgcaacgccacagtctacgatgcagcaatcagctattttctcggtgtatgtgctgggtatatttacaacatgcgtcgatgccgtgtgtacctgtcggaatgccgagccatgctccaagtgtatgatctataccggtctccgaccaccaccaaccgcccgtcctcgacattaggacccctcagcccactatcgtcggccttactaatggtgcaggatccaccagcacataatttcacggaaagccaaggcgtcgacctcatcacccaagagctcggccggcgtctgttctatgtcaccttagtcggatatcagacattgcatcagatgggctcttcagatatcaaggttcatgttcctccagagacaccaacggaccgttacccaccactcccgctggagatcgatgatgaatttttattctcaacacatgttgagccgcagccgtccgaccgagtctcacggctagtcgggttcaatgcaaatgttcgcgtctacagctcatataccgccctgctagcttgggaaatagcgtttggcaacggtcaaatctttgattgggagcaccagcgcaactgtatttgggactgtctcaagaaagcaaaatctgcactaatcaatgttcctgctgagttgtctctccaccatccgaagcacacatccccggcatgtttgtcaggtctcggcggcgatgacacaatcttcagctactctaatgatcatatccaccaagaacgacgtgctatacagtatgagatccagaaagccaatatctacgctagtcagttatgcaccaggtcctatctggtcgagaagtactggaaccttttcgagacattttcaaagtatggaaagtcaccgaaattcatgacaccgggcagcaccacgccagatatcaaaaccgaaggaagacccaattcagtaccgagtgcgagtgcgactcccactggtacagccccatcagaaaccaacactcaagctcaacatgcacaaacagactttattagtcgcatgatggctgaagagcgcaaactggtcatcaaagaccttttcgtgctattacgaacagtgaacgaagtgaatatggagccgaacggcgcaagcattgtatgtcccgtttactctaaacatcactatctatcattgtatcacgctaacaaaaggagtctgattacagaccaataaaatccgccaagtagcatccaccctcctcggcctttcacaccgaccgaataaatccaacactgaaatccccaaacccacaaccgctgcggcaccatcaccatcaccaacgaccgtgcctccaggcctccacgtcctcaccgacgcagaggcggagacctatcttcacgcatttatcgagacgcttgtccgactggaatgccattcttccatgggcgatgcagctagtcctgccgacggcgtcaatccacagatgaacggtcgcgctatgagctatctgagtgattatgagcgcgaccaagaagaattgagccagtgggcgagtttgaaggagtatcagcagaagtttgcggaggctggtggtgttttgtatcagctgtagcgtttccagcatcttcttggtggtctttcttcctcaatattcgtgcattactttgggataggaaggtcagggttctggcgttggatcacgaatggatattatatcattcgcagatatggatatatcaatggacttaggtttggtatacttcaaatatagcgtctctcatctcgagacagctaagtattcataattctatttcggtcccgcgcgagtctagcaaagcggcgactatggtccaagcatgttaaattcctacgttgtcaatggggccgcatgagcagccgactaattttgttgagaaaagcaatgaatggcattccggtcattcggccatgatatttgagtacttacacatgcgctgcaacagcaacaccttccctaattacattgattgtatgctttttcttccggtccctatagatagggatgcaacaacgcccagaccatgcaagtcaaccaaccatgtcgagagaaaaggaaaatataatacaaaatttgaatcaagatcataggggaatggagagtgtgagatgatacaaacaaataatacaagcggtcatcacgaccgcacagatttttgagatcacggagcgagtatctcacagatagcgcttctcggagatctcttcgtagcactggacatggtcaccaggtgcgaaatctgtccagttttcgaaagcgataccacattctgtgtctttgcgcatttcgatgacgtctttcttgacgttcttgagggaaaccattgcgcctgttgtggaaagttagttttgatccggaatattcgtgttgagctgcttgtgatatgcttaccatcgtagactatctcctccccgcggagcaccctgaccttgcgagtcttgttgatcagaccgttacgcacacgacttccagcaatagctgtcttttcacgtcccttgacagtgatctcgaacacctgctggatctcggcttctccggtcacacgcatagtgaccgttggaggtagtttttcactgagaatggccttgacgtcatcaatcagtttataaataatgttgtgatccagaatctcgacgttctcagcctctgccatacgcatgatattaggatcaatggcctggttgaatgagatgatcttgcccttcgcactgccagcatgttcgatatcgaattcactgacagggccaacacccgaacggatgatattggcaaagacttcgttggtaccgactgctgcaacggagttcaaaaccgcttctaccgaaccgtccacatcgcccttcaggatgaaattgaccgacttagggccggtaggttcgacatcctgtgttgtttcttcctcttctcgctctcgcctgcgcttctcgacaagttcacgacgagcctcgtttatggcaatcatatcgacacccatcttctgggtatcagatctctccaagcggtaatctacaacgtccttggctttctgctcagttggtgcctgtaggagctcggtgccagcacctggctgctctctccaaccatcgatttcgacgggcattccaggcgtggcttcactgatagtcacaccggcttgattgcggagggtgcggacacgagcccacgcggtaccggcaacaatgatatcacctggccgcagggttccacgtcgaatcagagcagatgctacacggccataactctttgtagaggcctcgatgatccagccttccacgttacagacggtggatgcgcggtggtcgagcatttcagagagcgcgacgatggcttcttccagttcgagcattccctgtccggttttgccgctgacaccgatcgcctgaacgtcacctccataatcttccacatggacaccatgaatagaaaggtcagccttgactcgatcagggttgttgccctccttgtcaattttgctgatggcgacaatgacgggaaccttggcttgggtggcgtgtttgatggcttcgatagtttgtggtttgacactgtcgtccgcggcaacaacaagcaccacaatatcggtcacgtcggcaccccggcgacgcatttccaaaaatgcagaatggccgggggtatcaaggaaggtgatggcttttccggaaggcatcgttacggagaatgcgccaatatgttgcgtgataccaccatgttcagacgctgctacagatgacttgcgcagccaatccaaaatcgtagttttgccgtgatcaacgtgacccataatagtgaccacaggtggtcgagttggcagatttgatgtgtcctcaagttcaggcgcagcgtgtagatctgccttgccgctgtcgaagatagcctcgtagttgaactcggctgccaccaatccggcagtttctgcatcgagaacatctctgtacgtgatttcctcgaagcccatctcctccattcgctgcacaaattgcgctggccgcacgccaatgacatcggccaagttgctaacactgatgaattcaggtaagtagagaggagccggtgctgccagcgcggcggccttctttgcagccctttgggcgtccttttctttctgctggcgtcttcgctctctgcggaggcgctcgcgatcttccgagtcaaagtcggccccatcagactcactctcacgtcccttgcgtccatcacggcgcttcataggctttggcggtggcggctgttcttgcgcctctagcttctctagctgctccagtgcagacatatcccaagtccattggttcttcttgaaattgtctgcttcctcctttgtttgaggtcggtcaaattcctctgaatcgcgttctgtgtttcttgttgtattcagcttaacgtcttgttccaactcagacaagactgagtcccctaattgctggaactttctagtatactcagggggggatctggactcttgaaattgtgaacgtccgggagaatcgctatactctctagttattcgggaccttggctgggcgtcggcaggtcgagaggttttgcagaatggacacacttgctttgtggcaaaaacatgtttcatgcactgagggcagttccagtcgtcgtgggccattggatggtccctagttgctttgttctgaaattggccctgggatctgttttgtgtcttctcaggagcaaacgggttctcttcttcattcgccgctttcgttgctcggatagacgggttcctctcctgattgcgcgaggtccccttgggccacctcatgtagccacctccattctctttttcaaccggggctctctctggaatggatgggttcctctcctgatcccgtgaagttcctttgggccacttcatgtagctacctggattttcttctttaaacggattcttctcttgagtggacgggttcgtcccctgattccgtggggtttctcttgaccacttcatgtggctacctggagtttcttctccaaaaggattattctcctgggtggacgagttcatctcttgattccttggtgtctctcttgatcctatcatgtaggcatcttgattatcccgagggcccacgcgccgcacgttcggtttcctctgctggtttgattgcgctgagttccattgctgatttgactgttcccgcctccgttgtggtagtgtaggcgcgggtgcaggtcctggcggcggcggttgactattggcgacaagggttcggcgcagcgcttgttctgcgaaactcaagcccgccgatggcgtagtttgtttcgggccccatcggctgccaaacttgggcttttccggcgctggatttgagggactactatcataattcccattcgatgcatccgatgagttcaaacatgtcgccgataaccgtaaggtccgtcgaactgtgagagctgttaaagtaggcgttcggtaggctgaattcgaccattcagcccgacgcgatagctgtaggtttagttagatactgccgcaacacttaagagctgcgaacttaccctgcagactggccgacgatgcatcattcactagtctatccacatctggatccgtcaacttttttccctttccagaagttcggaatgagcttatgtcattgattaggtcagctggtgggtatcaacccgcttatgtaacatgtccgccggtaaagtcacatgcctcggcattattatccaatcagaggtcagatggcgccattgcgataagcgggctggatataaagtctggagtctccgcattgtgtgcctgtctatacttttagtcgttgcggttcagttgtttgagacatggagactgaggtaattgacagtatcgataagggcggcggtggtgcccttcgcaccatcaaggatttggccgcaggcgcggcgggtggaatagcccaggttctcctcggtatgtgtacaccgtactttctttgaattccgggggaaagccaggggcgtcatgagatgagaatcttgccatgactgtgtctcgcggggaatgatccagacatgcaaaaccaaagcaattgctaacaagaaactaggtcaaccctttggtatgtgatctgcctaaagcacatcttaggagacattgcttaacaatccggcagatatcgtcaaggtgcgcctgcaaactaccactcaatacaagagtgcgctagagtgcgcaactcagatcttcaagaaggaaggtcccacggccttctataagggcacactgaccccgcttatcggcatcggtgcttgcgtgagttgccccgcggccaaggtccactatagacaaatcctctaaccaactcaggtatctgttcaattcggcgcctatcacgaagctcgtcgtcgcttggaagagctgaacaagaagaaatacgccgactcaaccctttcatacactcagtactacctggccggttcattcgccggtctcaccaactccgtgttgtcaggcccaattgagcatgtgcgtattcgcctgcaggcacagcctcacggtgctggtcgtctgtactcaggccctatcgactgcgtgagcaagctggccgcacagggcggtgccctccgcggtatttaccgcggccaggtggttactctcctccgtgaggctcaggcttacggtgcctggttcatggcctttgagttcatgatgaaccaggacgccaagcgtaacaatgtcaagcgtgaggatctctctaagggaaagattgccatttacggtggcctggctggtgaactcctctggctctccagctacccgttcgatgttatcaagagtaagatgcagaccgatggattcggcgcgcagcaaaagttcagcaacatgcgcgactgcttcaagaagacttatgccattgagggtctcggtggtttctggaagggtattggccctactctgctgagagctatgcctgtttctgctggaacattcctgacgtatgtttgccctttctttgctcgctcatgatgcttgtgtttctaatattgccgctaacccttcgccccagtgtcgagttggccatgcaggcactcggttaaaggccccgtaagggtatgttctaatgatgaaagttgacgcatttggtttttggtcggtttcacttgaattctttgatatccagggcttgttcaatatcctacggttggatggaggtccactacaaaagtgaatggcatttcaaagcttatagagatctatatccatgtcttacattgagcgattgtgagattatatatacctatacagtgtttccaatatacagaatttggttttctatatttctagtgtgaagtccctaaaggcttctccccaagaaattcctgctaagcagtagggaaatgacccaagttcaagctaggaaagtcctctctaacatagaccacagaagatctgcctctgtatcgaacaattggacatttagcctaggcaaggcccattgcatatttcagcctggtcagatatatatccaagtcaaccctacgagtctccggctttggtcatctacaccccccatgtattccgtgggactcgtcaaatggctatgagggccacgacttcaggaacacccacgagaaagcccggtttgatatttgttgctgacctacatggacttccacaacatggtaatgttgatgtccctgtggtaggtgaggcagcaggtgctacgggaccctctgcctacgctgtctcatcggggctacggtgagatggtggttgaaggggatggggagaagagaagaagaagaagaagaggaggaagggtgggaggggtccttttatacccctaacaacgcgtaccttcccaaatggacactctccaacgcaccttcctggaatcacaaatgtcacatgtcttctaactttggaagccaatgacaatacgccatacctgcccacacctgggcaggattgtttgttcggtgatggttacatcactttatgaccttcatgtccatttgttgtatagtatagcacttcgaagttcggtggttcggtggtggatactctatgagtccttgaagtcacaaaacaatatgtcggcacgtgggctatcttgaataaattgaaagcagcaagcagtggagatacgtattaatacaggttcggtcttcgtctcatggctcttgattgcatatatatctgatggagagaagaagaaggttgatatttgttcaacgcctgaggcatccatgcctaggcaggcaaaccctgatgtcatttgtccaggtcatcgtcaacttttcttgctttaaccttcccaagtacaacaactatgctccgtggtgatatttccatgtgccggtgaattgttgtgtatttcaaaatatatcacttcatttccctctactcaaatctcgccctatgcttacgacgatgtccaccgcgcgacctgtcaccctcctctcagctgttctcctcatataccctgcgacattattactcgggtctttgttttcagcaatctctccaacagcgcgacactccagagatttgtccgactctttcccgcagcctgcaggccctctggctccatccctggcttcagacctatacctatccgacggccccgttaactacttcgcccgaaagaataatatcttcaatgtctacttcgtaaagattggatggctatggaccacagccgcctttgcctcgcttctcatattccaacccctttatgcttcgtctcaccgggaatccctctcacagcaagaagcacgtttccgacgcaccctccaagccattctacgatacacactcgcgacaacagtatggtatcttgcaacgcaatggttcttcgggccgccagtcattgatcgcagtttcgtggccacgggcggcaaatgcgaacaggctatcgaggaagtcgggaggatagccgctgggcagagtagcgcaacgggcctagacgcgctattcacagcaacgacgtgcaaagccgccggtggcgcatggaggggtggacatgatatcagtggacatgtgttgatgctggttctggccacaggagtcctggcatttgaggctgtcggggccagcgcatgcgcacccgcatgtttgtcgcgttctgatcctggggacgcgggacgtgaacgcaaggccagtgatgctgatagtactccaataatcgattcaattgagactgccgggttcgcaagaacgtggtcgctccgtcttgtttggggtattattgccatgggctggtggatgctcctcatgaccgcgatttggtttcacacttggctagaaagggtatgtgcattcttcggcaaaatcctacacgataaaattctaaatttgctaatgattcctctagtggtctggtctgttgattggtttgggagctgtgtatgccatctatattcttccaagacggatagcaccattggggaacgtaattggacatccgggagtatagacgtctgttttgcctgcgagattaaattctcagcagctgcgagtatatcgaatgataatgatagattgcattgattctgggcatcgagaaatgctcaagtcgtctaccgtcagacctgtattgtacatagagtaataagcctggcatatatatagacatagctagttacgaagtccttttcttcaaaatatcttcgatatccttctacatatccaccagaattctgacctaaggatggaaatgttgtagtactgctagggtgttggtgttggttcctttcccaggtatccagctcgaaatgctgggattgaggagcgtgtcaaaataccgaactcatcataggtgacaggtgacatttgagagatcatttgacttacctcctggaatcaatgctgccgcatacatcacccgcgtgataggcctcaagtcctctggtgtcagatcatcggttatggatagtttcatgtatggatcccaagcagcaatgatggcatcggagtagcatttcaaatcaccagagcattcttttttcgcattcacccgtggctggcattggatgcctatgcaggtcccaaactcacgaaaggccagccgaaatcggatattgcgctccaaatactgattgatttcgaacagattgtctgaaagaacccctagtcagcttgattcttattgtcatgtcctttcgtggatatcgacggaaagatgactgacatatttgatcgaagcatttccccgccaggtcagcagcccagctctctcgctcggaaaaccaatgtgccgtccataaagtcataccaagatccaggggatcacttgatacaaagtgctctccttttcgctccatcgtgcgtctgtagtcgtcgatctcctcggtcaacaccgcaccatcacctgcttctatggctgtatcttgcaggagtcggaaaataacaaagccatcaatcggatcaagattaccttctgacttgaccattggctctgacaagtccatgctcattttccatatcattcttggtcgagctgccgcgcgatcaacaaagaactttgggtgtatcgctttcgccagctctatggcttgtctgttgtacttcaaatctcccgatgctttggccatccggttcaatgcgaacatccaaaccgttaggtaatgatgatattgcccatcgccatctggaccgtgagcatctgtcttgccgatcctcaatccaccgcttagcgggttctcgtctgttgctcctcgcagtcttgagtggccatctcgatttctacctaggatgtcatggacagtctcaatcaaacgaccagccaacaccagataacggtcgtcaccaacaatgtcattgtcacttcgcttatactggctgtgcattgtgagaaagttgataaccccgaaggcatctgtccataggtatcgcccccgatgaccacctgatcttggtggtggagtccaggattttggatcttcgatgctgctaaaacttccgtaaagagattccatggcttgtccaaagcggtctatgcgcggtgacgggctgctgattggcagagccattctcgaggtatgggtatgtgccttcgaaatgggatgggcatatgcgtagctgcggggatgaataattgcttgtctagcagtgtgctgactggaaaagagcaacttgaaccactgcatttgttatcgattctcattctcagatgtcatttgttccactatcgccggaattagagcattttggttcgccatcgacgatgaagtcatgaagtcatgatgattgtttaacagccgggatgtgaataattcgctgggaaaaatcccgcaaaacaaagggcatatgttatattgatgaaagaagaatcgacatgcggtgggttatgtccggcatttcagtactcgacatattcatttattccgcgtaaagatatccccaaccacagcctaaccgttcatgcgcttggcatctatactccgaactacgaaaaggatgcctcaattacaagagcttttcaattcagcagtgcagcccctgcctgcaatcgaggataagagttttgcatcacacttcgatacctttgcgggtagccaagtgattctgctaggcgatggcagccatggaacatctgagttctattctgcacgtgcagagatcacaaagcgactcattgaacgacatggctacaccatggtcgcggtcgaagcagactggccagatgcagaggccatcgaccgatatgtgcgcttacgtccaggccccaaagcgcaaattggagggagcgcgaaaggatacgaagcattcactcgctttcctacctggatgtggaagaattatgagatgcaagggctagttgaatggatgcgtaatcgaaacaaggatctcccaccagaacaaagagccgggttctacgggttggacctgtacagcatgggtgcctcgatcgccgctgtgatcaactatttagaccaggtggacccacaggcaagcaagctagcacgccagcggtatgggtgcttggagccttgggtggatgatcccacttcatatggtctggcatcccttcagggattggaagactgcgaaggtccagtgatgaaaatactcacagaccttttggcccgaaggcttgagtacatcggcttgtgggatggcgatgaaaaccacagcgccgaacagaatgctcacctagttcgtgatgcggaacagtattacagggcgatgtactacagctcagcaagctcatggaacctgcgcgacatgcacatgttcgaaaccttagtccgcctgttaaagtacaacgagggagagaaagctattgtgtgggcccataattcgcatgtcggagatgcgcgctatacaagcatgggatttcgccgcaaggagctcaatatcgggcaactatgccgtgagcgactaggacgcgagaatgtgaccattcttggatgcggaacccacactggcacagttgccgcggcccatgagtgggacgatgatatggaggtcatgtccgtccgtccctcccgagaggatagttgggagattgtggcccatgatactggtgtgccacgattcgtgctcgacctgcgtcaggatcgcatagacccctctctgcgctcagctatcgctgctgagcaacgcctgcagcgcttcattggtgtcatctaccgccctgataccgagcgtgcctcccactactcgcaaaccttcctccacaagcagtttgatgcttatatctggtttgatagaaccaaggctgttcaacccttggaagtaatgcagccccagacgccgcttggaaagagcgaaacctatccatttggactctagtactagtatatttctacctcaaaagcaacgagttattatcagtatctctcatttttctctcattgtagacggattaagttcttcctgcatataagtttcgcacttccggtgccgtttcctgcatatgcagcacaagtgcatgaatcacatcgcttagcacattgcaaagaccaggttcggagatttcccaaaaaggatgagaactgcaaaccttggaagtacgtacatacaaactttgtatagccgaaaacggacaaccgggccggatcaaatcaatcagatcaatcagataaggcggatcaaccataacgagtgggtcggtggatgtaaatcttgtgcttggtccctttaaaaaatccctgactggctctctcattggcctcaaggatcgcctgacctaccgacctcgggaatacatgctccatacaagaaacgaaatttcgatcatcggtggccagtacattttctgactagcttgtgtttagctcgtctccctagccaatctactccgtgctctaggtattttcccggtatggtgaaattttcgtttacacctactgtgctgcagtataaaaccggtgtcgaggaaactagcccccgaagccgtacgttttctttagttttcagactttgctgtcataagttcaggctcttcccatgactcaggatcccatttttcaaatttcaacggaggatttcaagtttgaaccgagattttaggtctgactgtcgaaaccatgggtgtgagaaagcgcttcgtcaacccatttgcacgcacggcgtcctctgaggaggtacaaacgactgatgcccctgacctaaaggctcacgccgactccaaatttgccttggaaaacttggatcagaccgatcgggcctcgtcggacgtcgaagttgttgatcaaaaagcgcaggctggtactcagaaagcccaggcaagcacccaagcctggacaaagaacaccttgattgcagcctatgttctgtaagttccatctggtgccgaccccccaaggaacttctttagctaacaaattaaagcgtctgggtcgtcaactttttagaatacttcagttctggactgctcagttccttatccccatatatctatagcggtttcgagctacactccttaacgggtctcacttctgtcatcgcttcgttgatctccgctctggtcaagttcccctacgcgaaacttatggatgtttggggtcgacctcaggcctttgcagtcggtgttggatctctgactctcggactagtcatgatggcagcctgcaagaatgtacaaacatattgtgctgctcaggtgttctaccagactgggttcagcatgatcgatttctctatgaccatcttcattgccgatactacggctttgaagaaccgggctttctggattgcttatgccgcttctccatatctcatcacgccttgggtctacggttacgctgcgaaccagatcgttgccccggacggcatcgggtatcgatggggctttggtatctttgccatcgtcatgcccgttatcagtgctccgctctggggtctgtggtattatacccagaagaaggccgaaaagatgaacttgacggagaagaagaacagtggacgaactctctggcagtccatcgtctactactgcattgagtttgatgttattggtctgcttatcatcgccacaggcttttctctcttcctgttgtcattcaacctatactcctatcaacgtggggaatggcattccccgatgatcatctgtttcgtggttattggcttttgtttgattatcgcgttcacgttctgggagagatactttgcgccagtgaagttcatgccctgggagctaatccaaaaccggactgtcttcttcaccttctccatggtggtatctctgtatttggcttggtacatctgggatagctacttctattccctcttgcaggtgatgttcaaccaaaccgtcacgcaagcaacctatatctccaacatttacaccatgggctcgtgcttctggtgccttgtcttcggagccatccttcgctaccagggccgcctgaagtggtgggccatctgcttcggtgttcctcttaccatccttggggttggcctcatgatcaaattccgccaacccgattcgaacattggatacatcgtgatgtgccagatcttcgttgcattcggtggtggcaccctcgtcatctgcgagcagatgactgtcatggctgtttcttcccagagaaacattccggctattttggctatcgagggtgtcgttgctagtatcggtagcgccctcggaggtactgtcgctgtcgctatgtggactggtattttccctgtcaagttaaaggagctcctcccggcttctgcacaggcgaacttgactaccatttacggctccttggttgtccagcagtcctacgccaaaggcacagctactcgcgatgctattgaccatgcgtatggtgagacccagcgactcatgctcattaccgctacttgtctttatattataacgtggacttcatgcttcttctggaaggatctcaatgtcaagaagatgaaacagcaggtgcatggtgttcacctgtgaatggtgtgtgcgccatgttagccgtgtaactacggcgcggtatagcagcacattggacaacaggaattcattggctaagcatatttatgtcgttgactctcctctcttcgtatacttcattagagatataatatcaagaatcttgtattttcctcggtactagtgacctggcaaagatttatttataaggctcaattgttgcgaatagagtcaggagatgcaaacatttatgtgttctatagtggttctcgaaattggcttgacgcacactgtaactctttttctgccaaggccttaaatttgtagggctaatttacactggtgacagcattgatgctattgacattgtggtcaaacctgttgtcatctggatctttccagaaaagttctagatcattttcatccgcctcttcattcacaatcctgccatttggaatacgaggatcaacgccttgaaaaatctttagtcctggtaatttagcatctttctcacgtgccagctgctcaatttgggcattgacatctagatcagattgggagactttgagtcaagctgcttcttgccatctcctgcacctcgagctagatagcatagcgtatgggcttcaatactgagatgcttgagctgcgaaaagtctttcagggagacgcgtacgggtgcgatttctagggcgactagctcctgcagctcgtctgcccattgctcctcatataaccttttcggtcgtcttcggtcatcctatcttcttgacaggattgatattcctcatcatataattcttgccgagatgtctcgctctatatttccaaattcaattcgtctaaagtctggcggtttgtccaaagggacttgaatatcggagtcacgtataacgaggggttgccaccctcagggtataaacgatcaccgatagtggaagtaaaacttttcaaggtcttggcggattcgatgatacggcaaagatcccagatttccattatagaatgtgtaaagctgatcttgctatagttggcggaacggggaggtggtattccggcttcattgctccacgttaccagcttaaaagcgaccgattcaatagccggtagtttacggaccatatcaagccgatgataatatgggtcttcaacgtactcattgaattcgttaagcttatcgtctgggtggaagttaatatttcgtagattttggcagtaagataccgattctgtggacgtagaggcctgatatagtaatgtttggagaagattcaccctttcatgattcctagcagatgaaaatcaaatgtattccagtaatggatacattgaaatgaattcaagattcggggcagctgcaactaagagcgtaatcagggcatctttaaactgaagttcttccgtgcttgaatcagatctatattactagtaagcaacaagcgtagcactccctgggatattctttgatagagataaaagctactggaattcagcaaggtttcgtgaaagcatagataaaattgactcgcgctcctgtgcatcttggaagccggcgcctaggattgcttgcttgagcctgtcgatgtccttaggggaaagtatagaatctcgaatggaattcttggattcaggatcaaatcaatcattccagttccgtacaggtccacacgccgaagataatctccaaggagggcagttcgtaagatggcaagtaatgtgtctggtccagcttggagtacagcttcatgggtctgcgggtacttctctcggccgaacttcaatcgatgatatttctcgcgatttttcagatcacatagagcatgtattccacggctttgttgtggcaaggccatgacgttgtataccaaaagtttgttgatcacattgagcagcaattcatcgggaagattctgcagggacggcatttttgcccgtgtagcgacattgcgtcgaatcaaggcctcgggaaagcacagaattcggaacatgtgggcgtcagttgaaggaaagcagattcactacgatgtcggtcgatcaatgggcccaggcaccaaccaggcacaacccgagtcacaggtggcagtaaacgggtcgtgcgtaggctttgttgcacgtgacgccaagaccgaccacgatgagcgagcggcttaaaacagcgtcaaaagtggccgtttctggcatcccattcaccgtgtcatcctcaatgttaccttgttgttgtaggactatgtattcgatggtcataaaccatagttcccacaaaaggtgttattcaatatataacatgcgatatttggagtattacgatagacaaatctccgatagaactatagatgtaataattttctaggtaaaaacctaaccaaggcgactgcgtatcaatgattatggcgcagtggctggccttcttgagctagtcgctgatatttgactgcctttcgcagaaccataccatggctcagttgatcagtttcctggcggaagatctcctgccacggagtaccactagggacaatggggtatcccttggtacccaatgctttccttcgttgttcaatctcatcatcggtaatgagcatatcaacccgccgtttgcgcaagtcaattcgaagcctatccccatctttcaaaatagcaagattgcctccagctgcggcctcgggactagcattcaaaatagaaggtgacccagatgttcccgattgtctaccatccccgatgcagaaaagtccatcgataccctctttcaagagtcgggctggcggatgcatattgacgacctccgctgctccaggatatccgattgggccaacaccgcgcataacgaggatggtcttctcgtcgatgtatggcgtattctccaggcgatgttcgtaatcttcgggtccatcaaacaccacaacagacccttcaaatgcctccgggtcatcggggttggagaggtatcgcttccggaatgcgggtgaaatgacacatgtcttcatgattgcagagtcgaagaggttacccttcaagtgagcgaatccggcatctttcatcaatggatcgtcatatggtttaatgacacgccgatcccatgtatgcttcccacggacattctcggcaatggttttgccattgcaagtgagcacatcgccgttcagctttccctggtctaatagctcagccatgatagccggcaggcctccagcgcggtaatattcttcaccgagatattcacccgaaggctgcatattcaacaacagcgggatggtagatccgatggtatcccaatcatccatagacacctctacgcctgtgtgctgcgcgatggcgttgatgtgaataggagcattcgtgctgccgccgattgcggcgtttgctacaatggcattctcgaaggcttcgcgtgtcatgatatcacaaggcttccggtctgcctctaccatttccacgatccgtttgccagtttcgtaggcacactgagctctgtgacggtaggcagcggggatggcggctgacccggggagggccattcccaaggactctgcgagggcattcatcgtcgaggcagttcccattgtgttgcagtggccaactgagggagttctgagtttgagttagattccggtgtcatcaatcggggttttggagatggcataccctcgggcaatgtaatccataaactcattttcgtcaatgtcacccgtcgcgtaaagctctcgcccatgccacaatacagtgcctgctccggtcaaagcctccttggagtaaccattgagcataggtcccacgttcatgcagatagcagggatattctagaaacatcagcatagatctaggaatccctcgagtctgatacccaccattgtagccgcagccatcaaacaagccggggttgtcttgtcacaaccagtaagcaacacaacaccatcaaggaaataccccgtcaagatctccaccaagccaagatacgccaggttacgatcaagggtagcagtgggccgtctcgaggtctcctggataggatgtgtgggaaactcaaatggaatacctccagcagtccgaataccttcacgaacacgcttggatagctcaatatgatggcgattgcaaggtgcaatatccgagcccgtctgagcaattccaatcatcggcttaccagacatgagttcttctttggtgataccgtagttgaagtaccgctccatgtagacagctgtcatgccggggttggtgcggcagtcgaaccatgcggacgaacgaagtgttcgtccaggttgtttgacggggacttgagcattgtctgcctggcttttgactcccatgcgcatttctagttcctggttgcgtcgtcgcagggcctgcaactcactcagacagtcctcgatgttgattgcttgaggttgagcgtcattgctacatgaacagccttcacaggacttcttgtcagaacacgccatgatgttatagatgcactatcgattgaggtaatgttataaaacatttcgatgtgaggggagacaatggattatatatggcaggcttcccatttgtgcttccttgaaaaatgcggagtacagtcgggagacactttccgagacatttgacgtcgaatcattggaatcgtactcgggacaatttgttgaaatgccccgcgtgatcacggagatgagccgagattttgcctctcgggatgtgactacccggatattggtctcttagatatatgatgttaattttccattgatgtaatttccaataactctctgcatcaatttatcgacaatgcaaggtctaaaccatgtaaagacagtgctcgacaatggcggcctcgctctgggagtgtggcagctattgcccggcagcaacatgtcgcgcactctagcacgagctggatacgattgggttttggtggactgtgaacatggaaatatcgatggctagtgtttttgtcattattcgaaagctcatgctaacattcccacagacgccgcaatgcacgaagctgtccccgccatagtatcatatggagtgagcccgattgttcgcgttccggatttccaatcttggatgattaaacgtatgttaaacagagtatatcgctagcccacttgacaatctcttatcctttgtataggggctttggatgcaggcgcacacggagtcctcgctcctcttgtacgaacagtggaagacacaaaggccttcgtcgaggcctgccgattcccaccacaggggaaacgaggcttcgggtcgcctttcccgatggacaggtttggtaggaatgtatcagccacccagtacctgactgaggccaatgccaatcttctgctctcagtccagattgagacgagagaggcttttgacaatgtcgattccatcgccgccgttgaagggcttgatctattgtttgtcggaccttttgacctggcaaatggtatcggccaccccgtactaggtagtacatttgcgcctgagttggaacaagccattgagaaggttctgtcttcggcgcacaaggcaggcaagaaggctggaatctactgtggaaatggaaagcaggcaaagaaatatgccgacttggggtatgactttgtcaatgttgtaactgacgttggtgctctgactagctcgctcgcaagtgagatggagattgtcactcaaaaagcaggcaggactgcctctgggccttacggtagctagtgcatcctatatactattgaaacgaattttgttggtctcgctcttcttgatcgcgtaagtcatgaaggacatccatagatgcaccgtcgcgagaatacagtcattcataccagagcattccagaacgaattcgactctacatcaacctgaaagccttgggcaattgcctcaaggtccagatccgataattccaaactcatctgaaaagatccaaattcaagtggacgatctgcgacgccggattctctggcaacattaatagactcgggcatgaccatgtgctcgctgggaaagttgttccctgcgcttccagcgcgttgattgtcgtctgcaacattgattcctaagtgagaaatcaacttatccaaattctccctggccttttctgctgcagaatagaggcgtgtgtgttcaataagaatatttcggcaaaaaaccagtgattggaacatggttgagttactccctttctgggccacaattcgtgcgtggatcgttgcactgatatacgtagcatatgagagcatgtatggtgcactgctcaaagagaaatgctgcgagtagtcatggagaatctgaacaatttggttcgcagctgcggtacatgcattcaccgactcgtgggcagttgttgaattgatgaccccgtcgtggccggttattaaaggacgatggagcaaaataataagcacattgaatagagctcttggcaaaaattagtagctatcaattagtcctggttggtgaaaagaacatacaaaagacaggcagactgaggaaggagaaccgcctggtctgggaatgacagatagtcaagccgacgaggcaaattttcgcgccagtttctcagctgtgacttgatttcccttgagatatttgctcggtgaaccagatttgactctcgagattctgaataaatctctcggagaatacgttccacaatcgttgtcaactcgcataaattagtgagtaaagaaacattaagcgatggaaccactactcgaggctttgtggtcatgtatgtgataccctgaaagggttcaagctcgtcaaagtcatccagaaagtccagtgacgcgctcacattgacacggttgagaaggggaggtctcccttggaaaagacactggatcttatcaataactagttatcagaagttagagacgactcgtaagacaatacccagtgcagaaaagtgatagctcacagtatgctccccagagaactcgctttcgaatttcaagttcttcggcagggatactatccacagcaggaagcacatgcagaccaagatcaatgaacatattgaaggcatttccagcgtagagccatgacagactcctttcatcacatctggaaaaaagcgcattagacataatcaataatgcctgaagggtagtgatttcgcttttatcaaagcaatctcgcaaaagctgcgtgaagcgttgccggaacttccatcctgcagtcgtaatgtcatttggatcggaacgaagctctggtcggtcgcagtgcttcgacactacaaaaaatatcgcattcaacagcaatttagagaagtacggcccctcgcaggccatatctcgcatgaaagccggccggtaaattatctgtgctgtgtaaagctgacgactccaatatatggagagtagatgcatgccaatatcaggatcgataccatcaaaatcgagtcttccggcagcaagattgagtggctcaagctgtcctgttctttccaaattagtatcataaccatatctggtattgcagaaggtgcgacttgctctgcctcgctgtctgggaaaagagaaaatgccttgttccctcttcgttggatggacctagtctattctgctcattatagttcggactggtatcatcatacaccgtacttgttggcccatgatacaatgatgtgtttctgcggtcgttctccggtatttctgggtgtgatgcatctctagttggaacggagggagagtcattccgcgagagaccaatacctgttactctcgagaatggcaatggggtatgtggagtgctttccgatgtaacagaatgctccgggtccgatagaaccctttcggcagaagtgctagtttggaattgggcacatttctgtcgaaggatttcattctcctcctctaattccacaatgcgatggatggtcggcccaaaagcgaagtatcagcaacttgaaatttggtcgtaagagtctcatttgtacctcgggttattctgggccacgcatagccgacaatcgaggctcttggctagacagttcccacactggggccgctggccatcacacttcaactacttgtttgatccaataataagttcgaatcccatgtagaggccaagaatacgcacctttttatggcgacaacgcacacacgctacggctactctctttcgaatttgcattgtgcttcatgaggtcggaaaactatccgagatttgcttcacctgggcattccattggatgacgtcagccgtagcattacttacataaatagtagccttgtttatcaggcaccataaagcatatctctgcgttcttcttggcgggcggtattagctatagagtaaataatacaggtgagtaacgttttcaagcttaatgcttaaattattaaggatcaaaaagccgctataaaggctacacgcgctaaccggataaaaaaagctttgcaagcgccgcgctcaatgcaaaccataaaaaactccaatgaatgcaccagctccatgaacttcaaacaaacagctgaaggcaaggaccgaatatcaagaccggagtagacctcaggcaacagcgtcgaccccctgccaacaaaagggaactctaccaaccaggaataccagacttgcatctaatagcctcaccacaagagccttcaatttccactaccagacatagccgcatcttcagcgacacctccggatccatcaaccgtcccacccgtcgcagcgaccacgcgatcaacctcgctgcggcattcgggcatagcgctgcgcatctcgcgggccagcacgtcacggaagctcgcaaaggcctcgcgcttcccgcgcaggtcctgattaccacgttgcacaagctcgacgaactctcgcgtgtagatatccggattgcgcgccgagtcgacgtagtcgattatctctggtgggagctggatgctggcgagggaggggttagaaggatcggtgttggtgtctggttgggtttcttgtgttggcgaaagttgtgtgtgtgttgacagggtcgaaagggcgagtgttagatttttgctggagtgtattagttttggttggttagggttggggtttagtgatgttgcttgtcgggaagtgtttcgttctgacggggcacatttataggcacaatgaatggagagtgcataggatgctattgcagttgacgtacatctttcgcacaagctcttgctgtgtctctgggcccagatagccgtggacggcggattgtatctcgaataagtgctggatcacatctttgaggtcgtctgtgtgaggagttagcatgtgcactctcagagctacctagtgctcgtaactcaccatcgaccgttttcaaagtcactggcgccataatataatagattgaaagaggtctcggttcacaaactcaagatgaggtttctcttgctattgcggggagaaacaaaggcggtgtgggggatacttgatcccatctacgattacagaaaacaaaggaaactactaactaactagtgttttcggagacaaatttttaaaaagaacttatgtagtttccaatatgtcactatctatatatgcatagctcgtgggaaccgatctcattccccgagttgcgtccgcacggcgaacacacgctgaaaccgcatcaagtgaaacaaacaagaattgtaacctatgctctacacttcccgtgtcctcaagctagaaagattcggaattttgatctctgtctccatttcaagcccggacaagcttgggaaccgttggctgaatttggcctcccagtcctctcctgtagggcttgccggagtctcttgggaggaactatggccagtacccggtcgcgaggtggctgcgccagcgcgcaaattcttgggtttaggtggtgcagctggtcgatttgcgggacgttgcgcggatgggtgactggtaggggtgacagattgcgggagacttgcggagatattaggtccatctcggcgatctgggagggccgtcgaactctcacgaggagtgtaggtcgaacttgatgtgtgagaagcgagcagctggctagaggtgacggatctggcctcactctgctttgccggcaaagaagaggaagtctccgtgaaccgtccatatccagtagcagtctttggaatggtcggtttttcagactctccgagcaacgactgtaccttgctctgaattgcgcgggagcgtgcaccatcgcctatcactctgccacccccgtcacccgtttcggcaacccgacgccggtactcagctgcggcattggcaacgcgtttctcctcttgagagagtcggcggcgttccagctcccggcgcatctctggtgatatgtcgtccctgtccgcgtcttccaaggcaaactcgtcattcggcgaaagaccatcgtcggctgaatcccaagtcccaatcagaccctgccgaggcgcatcctctggcgatgatgatgcggatttgtcttggttgcccgcttcgaatcggcggaatgcgtcgccgaatcgaccggcaaataggtttttccctccagaaagcgacaacgtagacagactagcgcgtttgttgtgtttgtggctattactagagcgtttctcacgcttccgattgctctcttcttcttccatcgcgcgtaggtaatcgatgtcagaggaaataatccgatcagactcacgatccacatccgtacgcactgaccgcagtggcgcgccaccatcgtattgtaggcgggacatatccagcgaagcccgcgggctatcagagtcacgcggctggtcatacctggctcccggctggacggacattggccgagcctttccgatagccgatttagaacgtcccacaggatcatttacctctaatgctgaaggccgtctcaaggtttccatcgaggggcgggcggagttagactggctgggtatgcggtcagatggcagccgcgagcttccttccacattcaaactcggcatcgggggggacggtgctttgtgcgggcgtgtcactctttgttcctgctcggttgtaaatggctcgctggaagatcggggttcattatcagacgaagggaatcgataaattgggcgactcagcggatttggctccggcaaacgaggtgtttggatgggtgaggtcatggtacctgtcgacaccatcatgggccgctgaggggttggctggtacaagggaatagcctgcggcgcaggcatttcacgcaaatccggtgctctgacaggagatgtctgggatagtcgcttactgaccggcttcggagcacgttcgggcgagacacgtcgggcaaaagcatcatcggctagggcgttggtaagtcttcgagatagatcctcgtcctcgggtttggattctactgttggctcgaattcaaacttgtcccctttttcatgcaaaaggtcaaactggtccaaggaggggaatcgtttagacatttcctctgccgtcttctttcgggatgcgctcccatccagggctgcaaatggatcatttgatgaaccttcagcagcggctagatagggcgcaggactcggtctctcggagccgagttgagacgacggggatttgccaggtcggccacgccgcataggtgcaatttctgggattatctcggtctcctgcatcggaggcgaaaatactgcgccgaccgcgggtgtttccgtgggcgtgggcggtagctcttgatatttgcgtgcctccgaaacagagcgcttggaatagatcttcgtgacagtcagtatcaagttttcactaaaaaaagacatgggccgacatacgtctttgataggaacttccttcccttgcattttgcacacctcgcgcacgacctcgtatatgttgggacgattgcgaggatcttccttcaacatcgagcctgtgcgcagctgtcagccattgatgatcgattataaattaaatcaaagtcttaaacttaccaatgaacagctttagccgactcgaaaagggaggataggaagggtatttgaaggtcgcgttgagaatagccatctgaccgacctcttcgaagggggttgtgtagtagcataatttgtacaaaaacacaccaagtgcccatatatcactcttctcgtcaatcggttgctttcggtagacgtcaatcatttctgggcttcggtactgcagggttgtatgccgctgcacatcatcttcgatcaagcgaccctcagcggcggaagtagcagcaggacgagggggtgctgatgatccaaaatcacacagtttgtaagttggggaactccccttgcccgagatcagaacgttctcaactttcagatcacgatggaggaggggcggtttgagataatgcatgcacgcaacaccttcagcaacatcggagaatatcttcacgatctccggctctgtcaaccggtgttggagccgggtgttcatgaagtcgataagaccaccgcccgcgcagtactccatgatcagaaacacctcatatccacctccgcgcagctgcgaggcatgcgaatcaatatacttcacaatgtgccggtggcccttgagcttcttcatggtttccacttcagtgcgcatgttggcaagggccgccttgtcaggcacggccactcgcttcagcactgcggtttcggacccattgactggctgaggcaatcgcaccacgtagacatgagcaaaaccaccctcagagagatacttctccactaccacgcgatggttgccaacttgaatcttagtgcccggaagcaaggtccccgcaggtgctgccgctacggcgacgggattgtagacggggaattgacgtgacgtcgcgggatgaccgtgggtaggttgtgaggacatggtgccggggtgcccttcaagggcaggtcgtaaagcggttctcggtggctagcgacgcggcatagagagtgagacggagattgagggggattcgaggttggcggagataggtgcctgcgagaggactaaaaggacaggttggcgaagaggcggagaggcggagaggcgcagacacggggtagtacctgactaccagactattacagggggatgacaagaatatttgaagctgagatgggataaaaagaaaacgatcaacactcagatggagagagaggaggtattggaatctcaagtggaaggccacccaatcaccggctgcggatcacgttatgccgagtcttgtccctcaccatcggggttgttttccaccttcacttctcctaaatgatgactttcaatgtgtcttcccactggcagactaatagttatccagtgtttagcatgaccgaagtgggccaggatgaatcttaattgcctctcataggaccctatgtcctcttctccctggtcatggtcctacacctcatgtcccggtcatgggacgtctactccgtatattgatacggcgctctcgcaaccgtggatggtgaccgtgagatccacgacatagctgctttcctccttttttttctttttttttttatgaatcaggagccccaacatgggagtcacattttaccgcactctccaccctactatcagctctaatccagtgaacaagcctcggtggctacatcctccaagtcgaataccttggacccactacgctcaaattatctcccccaaccgcttgaccgcaagattaacaagtgttttcagcgctccgccccaagcgctatatgctcggcgaagacacttgaaatacatacttggaccgaatattcttcgcgctggtccgcggctcgaggtacacaggcattaactgcaaccgctcgtgaaaacaacctacatgacgctcgcatgcttggacttttaacaaacaatgtcaacatccggagcaccccgggcttctaataacgtgccgggaagaggctcaagcggccaatacgaatacctcttgatcacagagaagggcgctaactgcgaaattgacgtaggatgtatgatatagcagcatgcgagatactatacatctttggacctgggttataagcctctaactggttttttttgcttctattccccacctaataataacccttcctccatatctcaacagtgcaagaaagcggagagcaaggcggtcggaatcatggaggaacgatattccgagcggtaaatttcccaaaatagtaagataaaaacaaaacagtcgtacttttgcgatgttgacaggactctgagcattgatgcctgtgcaggtcgaaaggctttttcaaaagccccttaattgagaacaagcactatgtagtcatagctttgaacaatttcattgctataactagtcaaaaagctcactgtaattgttcctgtaattccatcccttagctcggtatagccacgtagaatcgcgtggcctccggggaattctacataattcgggtaatagatgggagcagataagaattgaggtctttttctagtgcgtttgctcatttgtattgtcaaatttgtttttgatgtgatggccacgtcgagtgatctggaagcgttggcgccgatccttagctcccacacttgtcttccaaacaaaaacccccccgtgtcagacttaggtactcccgcgcttccaggtttttgctttgagatttggattttgtttggatttttgagcttagttgtgtgctttttcttggatttggcatctgagtaccctccacagcactgagcgcctggggcctcagtgcaacacttgtcagactaatatgacctggcagttgactctcgaccgcgagcacttgtccatctaggattgatccggtggatcaacccaggttatagctagtcgttcgatcgacgctgcacttcgctgcactgcggcgcatctatatatatatatatatacactgtcgtcgctccaggctgatccaacatggacggtccaccaccgccgccgccgcctcatggagaaaatccccatacgactgaaggagaatatcgcaaatcctcagacctgccagatggcaactacgacatttttatcatcccacctcactccgctggctcgggcttcctctaccttccttccctgcagtgcaaccgaaacagtttcctagctggcgtcgcaagcaccctcctcgcatgttttgtatggtcgtacctctccccgattgtgaaggcttggtatctagccacggtcactaacggcaatggtacgggtatggcggtacttgggatcggggtgggtgtcgctggatggctttttggctccactcagtccagtagctcgggagataaaggcaatggcggcgcacgtggtgggcggttcggatttggtggctttggtcgtggttctgggggctcgggtggctctaggaacgccggtccaaacaccaaccaacagtcgtcgggtgccaattacggcggcaacggggcgggtcagcaaagacaacagggaggaaactttggtggaggacaaacccacggcaaccaatattccggtaatcaatatggctctggttctcctccaaagtctgataataacaaacgtgaaaaggaggaggctgaaaagcgcgctaatgaggaacgtgctaaggaggagcgagctaaacaagagcgagccagagaggagcgtgctcgggaagaacatgctagagcagagcgcgttagagaagaacgagctaagcaagagcgagccaaagcggaacgtgctaaggaggagcgtgctaaagaagaacgcgtcaaggaagagcgtgctagagaggaacgggctagggaacgagccaaagaagaagccgaacgggagcgagcaaaagaagaaacgagacgcaaagaggagctacgccgaaagatggaggatttcaagcgcaagcgtgaggcagatgccaaagaaaaagagaaaaagcgcgagcgcgaagcaatggagaaagaattacaggaacggcgcgagcagctcgaaaaggagatggctgctgctagggccgctgtagagaaggaggcacgcgagcaactggagaaggaagccgcagagtcccgcgagagacaggcaaaggccgaagctgaggcgaaggctcaactcgaaaagttggaagcagaagctaaagaggcggccgctaaagaagctgctgagcaaaaggctgccgcaaaggccgccgctcagaaagaagctatagccaaatttgcggcgctcaaggaagcagcaagcaagaaatacgctgagaagaaggcgcaagacgcaaagaaagaggccgctgccaaactcaagtcagctagtactagcaatgtgcctcgcacactttctcccaagaaaccagcaccccacccaaccaccaaacctgccaacgatgacgatgcgtactcctttcgtccctacgaccgaccacggcggccatatgcggctggctcagtatactccgagtcttcttatacaccttctcactcgactgcgcgcacaacacctcccccctcacatcgcagtacatattccaccaaggatccagacaagattgtgatccaaggtgtatacgccttcaataatgcctttatgaagaccccagtggcgcaacttgtctcaggccaaggtatgatcaccgatgggctggtgctgcgcatcacaaccgaaggtctcttcatcgacgatgacctacgcggcatcggccagcgtgagtgggacgtcaaagcatggaccatcaagctggcggaggtgtggtgtccacagttaaactctgctccatccgccaaaaacgcgtccggcaaccctttctctttccgtcgtgggaacaacgttcccaccagcgaagaatcagaggccttcctcggccacttgcttaaagtatgcaaaaatacttgccgcctagcttcgcgcagtgctactgccagccatgatggtggccctgtccacccgccccaggggtctcgttgtctgcacattctccgcgccagtgttcgtgaccaagaaggcaagaagtatgtctttgtgctgcaggatactgaggcctggaaggtcgctatcggtctccagcggctccgggctggagctctggtccgctcgctgggtgtgtgctctctgccggtccctgattgcaaaactatgctcggtgctctcggttatgtttgattgaaaccttgttatgccagcgttcttgttacctttcttgcattttatttatatcccaccatttatctctatatgcccttcttgtgttcgattcgacttgaacgtcatcactcattagcggcggagtttgcttgatgctcttctgtccagtatatccattcgttactcttgtcttcttcaacccattatcttttgagattcccctggtttatctgttttatgtttattattacggtttttcaacatgagggaaagtatatatcacaaacgttacgacagcttacatatattgtttattatgcatagttacatggcatgcccaacccttattctgtatgatggttcctcaaacttgatgtcatcgaccatgtatggtgatcaatgtagcattgtcataataggtaaagagaacctcacgagccctagagggctgcatgtaactagaaagtagaagagaatgaatcatatctgagaaatctttgttttatgagtgtcatgcaggtatatacgccgcatattcttctacttgactatgtaaagagtgacaacctcaccaagtgtatcgagagccgaaagatgcgaagcaaatctttatgtcaaagtccacattggagtaaaccccagagcaataaaaaaaatagacgaacgccgaaaatggttgatcggatgtagagcttgtagatattccgtacacattgatttcacgtccatagatgtactgctctcgtagatccattccagattgcagcactcatatacaaattatccgaagggggccacaatggggaaagaaaacattagaccgaagggaaaaaaaaaaacaatatcaaatctatcagatcgggaatcatatggcgtctccgcggaaacaaaaaaatcgtgatatggcgggcagtgggcaaaaaagtgaaaccccagtatccaacagagcaatgtgtgagatatcgaggtgcaactccaactccggtcgaagacatgcaattcctgttttgagtttggtcatcttgagacaaaagatgaaagaatcggtcgtggtatcgggtgaataggatgagttcgatggcatcatctagaatgaaaagccgccgtggccaccaaaggagccgccgccgttcatcatgtttcgaagaacatcgggatcgatgtggtgaacgccgccaccgaagccgccgaaacctccaccaccggggaaaccaccgccgccatacatgtcagctgggtccctcagatcgtctccgttatcgaaagcagcacgtttcctaatgaggttagcattgtgtcgaatggggttgaaagttgtggcggacttactgaggatcaatcaaattctcataggcttcaccaatttccttgaacttctcatcgccggctgcaccgtcacggttcttatctgggtggtatagaatagccaacttgcggtaggccttcttgatttcctgttcgctggcatcactctcgactcccaaaatcttatagtagtctttgcgttgagacttcttcagctcgaattcagcttcgcggatctcctccgcaatgccgctctcgccggggttgttctcagcaacgctcttatagtcacgaatagcctcctcccagttaccggccttgccctgggccttggcacggtacttcatagccttcgtatacccggggtcgagacggagcgcttcggtacagtcctgaatggcagaatcatactccttcaagttgatataagcctgggcacggttacccagaatcttggcattcatatccttgttggaggggtcaacctcgagagcctgtgcccaaagatcgatagcacggcgatagtccctggccttgtaagcggtgtttccttcctcttttgtgcgagacaacttctgcacaatgcgcagtagcttgatggcctgcttcatgtccgggtccagcccgaggcacatcttcagaaccttctgtgcctgctcggtttcaccgagggcatagaaggcgcgggcacggatcatcatcgcatccgggtcctggctgttctcgcgcagcaagttgattgcaatgtcctgtgctctgcctagcgagttgatgttgttcagcctcagatgggcctcggcggccataagcgtccacttgcggggctcccggacaccttgtccgagcccttggcgtgcctggtctagacagtagatcaccatcgacacaccgcggtcttccgctattgtccgctcggcttgcgtgacgaagcgtaacatcttctctgcggctgcccggtcggtggcagtggctggtggctggatacgtgacagcacctctagggcctctgcaggacgacccaaattcgtcagaatcttagcccatcggtgcatgatcttcgggttgccatgatcgagctcgctggcacgttgaacatcctgcaacgcattcgggaattgtttagcggacatgtaggccgccgctcggttagagagatagactggtgagttgggattgatctcgatggctgcagtacaagaaaatcatcagcgaccccgctcattcaaggctaagtcatgagacacggtgtccctgtgggatagagaaaatgcatacccttgttgtattcatcgatagctcgtcgataattgccatccttgaagaacttgtttccggccaacttgaaggagtcggcctcgtcggcagaagatatattcgactggtgcggtggcggagtcggactccgctcctcagtttccttcacggcatctttcttcacagcatcggtcttcgccgtctcagtcttcaccgcatcagtcttcaccgcatcaatcttcgcagcatcagtcttcagggcatcattcttgacatcatccttcacagcatcaatctggggttccttgggatcaatatccatgaaattctgctgctcttcgttggatgctgccatggcggacaatcgacgacgtagctcgtcaggtgggagattgagtggatgtatgtcctggtcacgcgaagaccgggcaaacttgaaattggcggtcggtccggaattggaggatgaccgactgagagaaaagtatgattgtttggcaggtttgggagatttggtgggggacgatgatttggagggagatttggtaggtggcttggttggggatttggagggcgacttcggagatggagatgtgcgcgaagcggagaaggaagatcgagacggacgtagatcaggtttgttcttctcggtcttatccttatccttgtcctttttgaagatgtgggcgagttggaccattgggggtggggagggagtttttttttttttctatcgaaggcggtagaatcggggagattcccacggtgtgaaccacggatggggggaagaggaatatcaacttgggacttttttgcaactttgcaacttcaatttgcactcgggaatcttttgattcaagtctgagccatgccttgtctctcactctctgattcctgtcatgttaatctcagaaaataataagaaggttggtggttggactgggtttggtaacctggatgcttgatgccggggtgaaaaccagaccgagaaatcagttgggcctgtcctcttataatatatatattttttttttcttattctatcatatgttccatctttgctactggctggcaaataatccagaggctggagagctcctggtctgtgttagcgcgcaaaagaactggagcaatggagtcactcatttctggccgggattgatgcccagccgcgagggggaagggaaaaaaacagctcgaagagattcgagaatcttccgtcttcttattatcgtcttaagtctatcaccccctcaacggaacctgcaggggtggttggcgaggctgtcaatgactcgcggtggagcggtggatccaatgtgcaggttgctagtttctacgctgacgggtgacaggtatacagcagtaccgttactggcgtttcagagagtgggacccctgtgtcgggctctttgctgcgagattattcgcactaataatcttgtcggaaccggctctccatgccgggatacacttaacgtatcgagtgtaagtcttggctccattaggactcgtctgatatacatatgatatacatatgatatacatggtactaatgtctcttaggggcgaaaccaaggtgaaacaccggtcttacagcgtcataataagtctgatttacaaaaagaagccaaaaaaataggagcaaagcgaagcaagttgaagagtgagtattataatgctagtctgctcaatggatttagaatagctgtaaatagcgtcaagggaatatgtacagagagaaatataagagagagtatagcagggagtatagcagcagaatgataagttcctttgctgactttagggctatttcaccgaggtatctagctaccacgctgttgttcttatgtacccagttcctcgcggggctcccgcagcaatcatttcgttttttatacggcaaaccttgcaaaagatcgtttacgttacgtatgagcggaccaatattgagggtagtctctcctagatcaaaatgagtttgatattgcttagtttgatagtggagatggcacattgaccccctgttccgttcccggtagcgcatttccgccagcgttgaactcaaagccaatattaagaggaaccaataacaggcgagcttgttaagggctgacggggtacccctcttcggggatataacagtgagcaaaaagacaaccccaataaatgctcgatcaatcttttttcaagcggccttttatactcttagaacaggcgagaggaaacaatactacagctatataatttgaaatcaccataaccactgagccactgaaagaaagcagccaaccaagagtcagacctgagatgaaaccagaggtgttaccgcccctttcctttgtctattagcggtactcgggttcttatacagagaactgtttcaagggaagtctaaatgtatcgctcaatacctatctatttggcattattgtcgtcgttcacagatgagcgagtgagcttccggaatcaatatcaaagacgtcataacgctaagcggtaatcacgctgctcatgcccaattccgcctctcctcatgcattctttgggcaattcggacccagctggaaacccgatcatctcctagagctgcgtcgtatgtttgaataaatccgtgttcgtcatatggcggaggctggaccagcagatcctcccgacgaaggcgattattgtaatcgatgtgctcatcaaaacgttgaaacacgtcgcgccatggtctaaccggcgaaattggtgagactggcgaagacgctgtatcatcttgaggctgagcatcatatgcaccatgcacatatatctctccaacaatccatttcttctcatgttcgagccaagtgatcgggacacagctccgtgatcgtgggggagaatgtggaatgtgctgtatacgtgggcgcacctcgtattcgtggttgaggaacagttcgtccggcggaccaattggacgtccacgggcttcggcccatcttagattcgcatcgattggggagcggttcggtgaccggttctgtcgtgtgttacgatgctgtgttggcgaggtagcgcccgttgaagaaggtctcggtggcagaggttttgagaacaaatattgaatagaagcacttgaatttgcttgaacacgaggggtcgttgtatctggctgaacaatgaattttggattaaccattgccgcaccccccagggatgagagatccatgataggacagtcgagatcggagcctttgagaggctcggaagctcgtcgcttaggtagacagaaaagcgcgattaaatagggggcgcgatgagtagatcatatatcatatggcttgatatactactatctttagatagtaatatatgtacgctttgggggcgttcaagagtggaccatcacggagggctcgtatctagataatacaagggaagttgggctaaaaggctccttcttagggttgatgcatttactattctctggagaagggaatataacacatactacggagtatgcagggtatacacggaagatagatccttaggcagtgcagtggcaagaatgctcttagggccaacaaaacaccgacgatcgttcatttctctgtacattgcgtatcctaaagtcatagccgaaaatcaattgcccgaatacgaaattgtgccgttccttttcaggataatgatccttacaatttggggtccaaattcacccagggggctgtgcattgttttctcatcctcactgcaatggcgttaactcaccagatatattcgggcttcagtgcgccttgtggaaagtaacgggaatggagtgccgaggtatgtccaagggttgtcggagtaagatatattgcaatgagaaggagccggactcagggctcagatacgatatgtatttaggcttgagaatgattacgtatcacacactgctttcgtcattttcttctgttcctttgcttgacgggaattgtccgagtggaactaaaagacactcgattcgagagtgtgaagccgctgattgtcggtgaacaagccgatttcccactcactgaactgtggggctctatttttggctgctaatcgtttactaggtgtgtacatactacatacggagtacagatcttatactcatgtgaacctatgttgtacatagtacaagaatagtcgaccgcttatacagccttctcatatcccgcagtttgtctggcaatactagtaacatagactctactgagagctttcaaaatggactggtcgatattgaaaggcctagaagaaatgatagatttatgaatgtgcaaaaatgatacattccaaataggctacaggcgctggagagatggagaatgtgaaaagctgtcatggtttacattaaggtcgtgctcaagccaccaagcgagcttcgcacaactccgaagctatccaggagagcccgagaagaaataaaaaggagtatgtatatcaaaaaagcaaaaaagggatagacatatccagtcagaaagcgaccattgttaatggtaaatcaccagaaaccctaaataacaaaatcctcttcttgcatcacctctaaacaaccactccagttcggcacagtgacaactccagagtgagacccaagggaccccactaggtctactagtgcatcggaaacccgaaagatgtcatttacaggaagaaggcagcaacggcggcggcaccggcgaagccgagggagccgctgagggtagcaccagcgttgaaagcaggggaggaggtggcgggagaaacagggacggtgccagtggcgacacccttgctgctggagggaacgtggggaacaccaccggtggggccgtgggggatgacgctagcagcgggggtagtggcagcagcggacacgggcacggtcgagtagataacggtgggcacgcaggtggtgatagcaatcacggtggaggagaccggggcggtgccagcaggagcgctggggacgctggcgggaacgctgggaacgctagcaggaacgctgggggcgctggagggagcccaggtggggacggaggaccaggcgggggtctcggaggaccagacaggggtctcagaagacgaggggggnnnnnnnnnnnnnnnnnnnnnnnnnnnnnnnnnnnnnnnnnnnnnnnnnnnnnnnnnnnnnnnnnnnnnnnnnnnnnnnnnnnnnnnnnnnnnnnnnnnnnnnnnnnnnnnnnnnnnnnnnnnnnnnnnnnnnnnnnnnnnnnnnnnnnnnnnnnnnnnnnnnnnnnnnnnnnnnnnnnnnnnnnnnnnnnnnnnnnnnnnnnnnnnnnnnnnnnnnnnnnnnnnnnnnnnnnnnnnnnnnnnnnnnnnnnnnnnnnnnnnnnnnnnnnnnnnnnnnnnnnnnnnnnnnnnnnnnnnnnnnnnnntggggggggtggtgctgccggtaggctcaacaccggcaccgctgttgccggggcagttggtgacagtgggagcgcaagaggtgatggtcacctcatcggtctcatagacggtcttgtcggcaccgggggcggcaatggccaagctggcgaagagggcgatagtggcagtagtgaaacgcattttgaatgttatgtacgaaaaccgtaaaaagtgatgttcaaaaaaggtatatataaaaagcgtagcttcttgtttgaaagagagtgagttggtgtttaaagagtgtaagaccgaagtcgagagagagtgaatgctttggaagaatgtacttggagagaagaaagaaacaaaaactacacgggggaggcagggggcctttgtatgaacggggagattagtgtcagatcagcagccactcgctttctctcttttgggacgagtttggccctaaaaaaaggggaaaataagaacgacggtgtactggatacttcatccactactaacccacaccgcaacctgacatgtacctgtaacctggctctcgcacttcaatttaggccattctatgattggatcgatggcgttgtttcgaattaccaggtaattttgacccgccggtgtttcttttacttgtgacgatcgcttcaacattagggacgacgacatatcaaatggttatatcctccgtcctaagatgcatatactccgtacgctctcccctcaagtaagaattcaactgcaataatactcctctgcaacacccacttcctctcagatgtgttctttttctctttctattgatgtttcagaccgcatcgccgatccactacccgtccctggcgtcccagttgttggcatttccccgtgggtctcttctcatctccacttacccctgaacagcccgccatttatttcgccaagagaacgtattgtgtaagggcgaatgatgatgtgcactttacttgcaaaatgggattggtttctactattcatattactttggaacatggaaccctcttcctttgtcggagcgaagcgccgagacatcctttgtattattacttactatatacgggtgctccgtactccgtactgcttgtatattagtagtaatttttgtattactgcactgtttcctccggtgcactgggtatatcgtcgtccgagacttgttacgttgaccatatatagcatagatgaacttaatatattgtactcatcgtgtaaccaatgaaatactatgaagaccaattttcgtaaaactaaataaacccaaagagcaatgccaatagtacaagtcactcaagagtcaagactgccaattgcccccgcaacgggaaggtcttgcttcacgccataacggctagaccgcattgttttacttccgggacagtgcttgatgttgcttgcatctcgtgcccctgttctaggcaatgtgggcgtcaatgcccaagtccgagcgcagtttgaggaaataatatcagggtctgaccgtttgattggtggcgtgcatgcagtaatttggagttacaccggtcactcgagctgtatgttgtagtctgtagactctagagtcgatttcctgtgcgaaatatgtaccctaaaatagctactcgtgtagatcaaagcgtgttgatcttcatcctgttcctgggtcgaaagttcggttcagactttcgaagtggttcgaccgtgcaagtcagggcaggatagcgatgtatgttgattagccaatgatcgctgagtcctggtctatgtccttgactttgactttggacccgactccatgataggggtttgttcacaccaagcggtttccgtaggccgcccccagactccacctacctgcgcttcgtggcccctttttcaatagatcgggcctctattctattccaacgtgctttgtatggcatggtcgtattcttatcaaccccatactcatctctggtactatctttagcttcatttagctttgtgggatatgattattggtggagtgtgtttgatatataaagtacggagtatctggcacaacgttcagccgtaccgttaatgatagggacgtgatttgagtggatctaggctttttccgaagttcatcctcgcctatcgcgtgagaggtccttgaccttcctcatttgctcctcatttgtctaagtctctgatatttagtaaggggctttcgcttcaacactcaccgctcatattgcagtctcggggttcttagaatcctgtaaatatcctactctccttcctcacatcttgcaatattcttgagcattgccctgcgccacgagcaagagacggatatcatatcggccaggtcaagggatttgtgattgacaattaagtcgacttgactgcacaatgacttgaatcttgaaatgacaaattcaatagcactttttcttcgttgtataacatagaatgatgtccttagcgcccactcaaaagcacttccgtgttgatgcgagactgttatcggctactctatcacatcgcctagtcaactctgtaggatctgattgcgtgtgatcgccatcgacaatcacagatcggacatcaaacccgaccgatcagcatcgacgcgtcatttttagcgctgatgacacaagctggcggtaccgagaagtgtggtttttgtctcttgaataataatactccgcatatattccagatacacgacatactgtacaccacaatgggctatgcttgaagcgccagtgagatcgagatctcttgtttcccaaacagcgactttccgtataaacaagcttttcgaagacaagcagacaatctcgtcagatattcatgatattacttttatggctaggtcgaacgtcattcaagatcaactattacgacagggtctacgtacaacatagtaaattatatacagcatacggattatgcattctccagcttcctagatcgagattcacctggcgcttgtctcatattgtaatatccacaatggggcttattgtactattttgcaatacgcttgacctcatgttaggacttggcaccggctttcccggcaagaatgtctaattaaatcacagccttagaattgaacgcttccacagtaactgatctttttttaacgcccaaatttcgggaaaagacagtgacactgaaatgctactggtgcggatcgactagggcccgcccatgtcatcatcgggtctcattgcgtggccacagatttgggctaagccacacctttccaagggatagaatcgtagttataattatcttggaattagactagaattggttttggacgagcccctcgatgacatattgcatgtataggtctcgcggtagaactggatatcgcatcgtatacggagtactctgtacataatacgttaatacgttggatgcatagtgaaaagtcggtacttctgtaaggctggcagggtaagacccctacggcctgtgataggtcatattcaggtgggggacagccctgaatgtgttggcaatgatgtcgacgccacagttttgggaaaagtattcagtaattgcggctccaaggaaacaacgtaagtttaatgattgacagtcgagatctagtcttttgggttggttttagtttgacacctccgtggctacatatgtgctatgtacctatatacatgtagatacatatacggagtatacctgcatcgatataaaaaaggggagagaaacatgaaccatggtactcaggagaattctatgttgctttggaagaattggaatagacatcaacttccacggttcacacaagaatctagacatcctcattgtacaattctacatcgtagacgtaagttgtagatgtttcagctcaggcgctttctgaaacatagaggccccaccacagcccgacctctggtgtcggctgtgtcgctctattaatattctctagagaagatagttacaaagatttgaactagaccctgacttgacatatatactctgtagcgaagtacgaaggactctatttcttatatggtggagtaacaggtcacctgccgcatctctcggtaacttcttactccactcgtttgttctctaccttatctctgttgcttctgcttctgcttctgcctctgcctcttctttggtctttgctgtgcctttgcatttgcttcttcttttacttctgctctgcttttcatagtatcatctgtttgcttcaatccgcctttttccccctcctcccaggactccccaaggcggactggtccaaggccgacactgtggctactctcgcagatccaaacgagttgttcttgcctggcgaaaggcaaaacaatctcgccatgtcgtctcctgttcctctccttcgtccgcccgttcctggcgctcgcaacaataccggcagcccgcgagccccgaagctcacgttaggcattcccccctcacctagcgccaaacccgtcaatggcaatcccgcccccgcccaagtacctcaaatccaaacccaaccccaacctcagcctcgcccgtcgggtcgaccagcacccccacgactgcatctcgcaacccctatgggtagccagcagaatgtatctccgccaacccttatgccgaacggtcgaccagccccgcccccactgagtacaaatggcctaggaggtggaagtggaggtgcgcccattctacaaattcagaccaatggaccagcctcttcaaacccttcatattcgacgattaatttcgccatgggacttcgacagccggatggctcgtcagatccgtcctcggctattagctcagtgtactcagatcgcgagaacggagaccgtgaacacagtgtgaacggccttctccccgatctggacaaattgagtctggagaagggccggccccttgatgtggatgatctcgatgatgaaggctggcacgcggccagtgaacagaatatgattgttgaactgggaagtctgggagagggtgctggcggagccgtcacccgatgccgactcaaggagggaaagaccgtattcgcgttgaaggtgcgttgcttcagctagtcaacttttgtatacctgcgctcggcgatagaggctaacatcccatcctagatcattactacggaccccaaccctgatgtcaagaaacaaatcgttcgtgagctcaacttcaacaaagactgcgcttcgcaccacatctgccgttactatggtgctttcatggacaaatccactggcaccatctctatcgctatggagttctgtgaaggtggaagtctggacagcatctacaaagaggtcaaaaagcttggaggtcgcactggagagaaggtccttggcaaggtcgcagaaggtgtcttgaatgggttgacctatctccacagccgaaagatcattcatcgaggtacgaaccattatccccgatatacattgaccatcagcggctaatgttttctagacatcaaaccatcgaacattctcttgtgccgcgatggcaaggtcaaactctgcgactttggcgtcagcggtgaattcggtaccaagggcgacgccaacacttttattggcacttcctactatatggccccagagcgcattactggtcaatcatatactattacatccgacgtttggtctctcggtgtgactttgctggaagtcgcgcagcaccgattccccttccctgctgacgggactgagatgcaaccccgtgcagggctaatagatctcctaacttatatcgttcgccagccaattcccacgttgaaggatgagccacaaaatggcattcgctggtcggacaacttcaaatacttcatcgaatgctggtatgtactctgtctgtgtaactctaattcttatatactaacgcgatcaccagcttggaaaaagaaccccctcgacgtgcgacgccctggcggatgctggaacatccatgggtgcaggatatgaaaaacaagaaggtcaacatgacgaactttataaggcaggtgtgggattggaaagagtaaacacgtccccaaggacccttttgagggtgccttactgctttgctgcatttcttttgagtatgagtggctggaccccaaggattgacctggctgtcaacaactcaaccccgtttctcacgactctacttcgtatctatctgcgttttgtgctttccgctggctccccccgggccggaactggcggggctcgacattactctcataccccgttaccatcagcaaatgctttttcctttttttcttcgacacgaatctcatcggctacgcttcaccttctacgatccttaatggcctgacattctccatgcattgcatacccttcaatccttttcgccctctccttcccttctcgctgtttccgtcgtctccttgcgatggactggtctctgcttttgcttcgtcttttcccgtcacatcgagcctggacatatcctccatcttcgtatatcgtgttttcgtttttagtgtacagcccgctttcttagtctgctccaggattatatttagggtctactttgctttgcactggatgcgggagtgttgcaatgcttggagacttcctttgggacatacttaggcacttaataccattgcatcttgtcttcaacttggatgattatgtatacggggacaataatatacgtcagctagtccttctgcttctaagaaaaaatatgtctcattgttatcataaaagctacatacagcacaggtctcgatatgcatcctcgtcaaccacaaaagcaactgtaagggatcccaaccttcagttactcacaaccctatattgttcgcgcctcccctacttcttgctcaccggatcagcgccaagaacccaaccaatcccactaaccaagcccccggtcatcatattgctaaccatatccctcttcctaacacgaccctcactatccggagatagcggccgagcatcatcccgaggagggagcgacgccgaactatcagctgcgctcctcagcgggaaagcattcttatgtagcgccaaagccgctccacgagcaacctcaaacagacccatcggcgcctcgtggcgacgagagttcggcactgcagcgcgcgcacggcgcgccgcgcgctgctgttccgtgtcgaaggcgtcgcgctctgagtctgacggcccgaatccgcccgggacggatgtcagtgtgtcgccctttctgtcccagagatcttcttcttgctgctcgcgcgcgcgcagcgaggtgagttcttcatcgcagcgacgccaggcgccaaggatttccgggagtgggtctggggatgggactaggacgagagcgagggagaggagttccattcgctgggagaggtgcgagatttgggattggagggttggtggtggttgggttggtgttgtggcgcggtagcgacctgcgttgtagacggcgcgccaggtgatgtcgtcagggacggaagtggtgtttaggagcggggaggaggtcgagaggagtgacgggggtgtgagtcgcgttagaatgtaagagtaggctgtgccgaagtcgttggaggatagagcagacgcaattgctagggaggttatgcggcgctctgcggcgagtaggacgtgctcctttggaggattatagtgggttggctcgtcttcggctttgtgtgatgccgcttgcgtgggaacgtctgctgccactaggtttcgtccgatggagagaagatcgtctagtttggtgtagctctttgggttttgctccagtactttctcaatcaagaggattggatcgtgatggacacgaatgctaacaggctggaatggaacaccgtgttgcagggtcagcgaatagtatgacagcgagtgggttgcggcgatgagggcgtggatctttttgaatgcaacagattctgggaagtgtgaggtgaatgattgtaagctaatttactgtcagtgctgagtccatacatcttcttttagtagcaccacatacatatcataagctctcttcattccgccccgtgttcgatttccgttgcttgcattatcataggctgtaaatatagcctcttgaaccgcagcttccacttggacaggattcagtggcgctggtttagactcggtgtatatatcgagcgccaattgatactctagaaatgccatcagtattgacaatgaatagtgaatttggatcgcattacctttagctgccagcagcgccttcaagatctccgtttcaaccgtgtcgcggggaatccgccagaaaattccatggtacggtgaaggttcatcccaggcgttgtcggactgttccacctgccaatctcggagccaaagcaatcgttgtcgaaccatagaccagtcttggtttaaacccggttgctgcaaagtagaattcaccacgcttttgagttcggccaattgcatttcctcggtgctgtgaaggcacatatttgccgcaacccggcagggaaccagatgaccaagttcggtcagtatacgaagggagagaagtaaagcgctaagaaacgatatcgctgggggcgatggcttggtaagaggattcgtccgtctcaaaagagagttctgcaatagagatgcgcgggatgtcgaggagattgactcggtatcatagtgcacagatggcagttctgaatcaggggtgaggtatgagctgtcttcgagagcgaggagcttcgcaaccctcgtcaagacctggaacgagccatccagcacagccgtcgatgagtttgcatgggcatacaccacagcaagacccgactggccgtatcgaacctgtaaatctctcgcctgctcttcggaatattgcgctccagcattgtcatatccccccaagtccacatctgatggtccatcccagtggttgaaggcgctcacaacgctgtcgcggtcgacaagactccgcgatagtagccattcattcacatgttcccatccagccaattcggttgcttgaggtctctcggagccttcaatgaaagataccgaactctgctgagcttcttcgttaagccttcgccgttttgaccgattaccaccatagagccaaggtccaatcagacccttcaagttgttgaccaaatccatattgttctcttcggagctcatcagagacaggagaatgttgactgcggtttgatcgtccatagactccaagatctcaagagatatagtttcgtcccgataggcgtagaattcgtagttcagtcgaagtaatggtaataggctcgatatcagccatgttcgaatgattggcgagtgctcgtagaaggggacgataagatcgagaatgagaggctgtagcgctgtttccgagtcgatcagatgtgcccggtggataaggaatttggtcaaaggatctgctgaagctatctcggcttcctcatcagggcgttgtagtggccgtaaatgaagcttccgcacgcgctttctggcgagcgattcggacaaatcctggacagcagatgtattaattggtcggtcggattgaaaattagagctatttgctagctcttgtagcactgaggtgtactgagagggctctgtgctctctgggagaaaggtcaagatgatgcgcaggaggcgttccaacggaaaacaatggggaaaccgggcctgtagaataggcaagtccgccacattaccacctgcgcagagttctgtagctagtagaatagcatgtgcatcggacagctcttcgagagccatggtcaagctaaagagacgaggcagtcgagtgaggtggcctcatagttggcgatgaccatgttgcatacggcggggcgcacagaccaagtcggaaatgaaagggaagaggtcgcatccgccggcacttcatcactacctttttcgcggtctctgtgcctacaacttactcaattctcttcttatacgtatcacaatggcttccggttacggtaacagcggtggtatgtgctcatttcccccatccccggggaacctggtcgggtccgcgccaatatgccctcggatcacaacttgcgcacgcagttccctcccccgcgaataaaactggctaacacatgatggtttctcctaggtcccggacgctgctatcccttctggcaagaggttcttggttgctacgttgtgaactcggacgatggtgccaccggcaagaagaagtgtatgcccgccctggaggactactatgagtgccttcaccaccggaaagaggtaagggcaatccccattcgatcacgatacctgcacacttgaatcatggacctagctctaataatggggaaattggaacaacaggctctccgcactatgaagatgcaagctgcctatcgcaaggccgaggccgcacacccgcgagagaacgcccctaaggctgagcaaatccggagcttgggtctacttggaaaggaagaagaggcagccaatgtgctgagttaacggtgaatgggaaggatgtgcttgttctttttcgatgcgtgtgtttccgtgtttccgccccgggacttttgcccggggcctgtgactgtatagaaccgctcaactggttgattatcacgtctgtcagtgcgaaatgatactccaattcaacgacaaacggtgctttatcctaaattttgatgcgctcgatctttggatttcggtaatgcgagatgctgccatgtaggacgagatatgcctgatctcggaagtttaattaacgagataagcatgtattttgattgggcgcaggaaattaactcgaattaccagctccagccgtctagccgcttatcccggggttctttgtgtcgctagctttctctctgtatcaaggaattatactttgattatatgatacgataagcccatgaccgtctttataagaaggatgtaagctcataggtatgttctgtatgcttggcttaggggaaagtaagagaataacagaagtggacgagaatctacggagtatatagcggatatatagttcggcaggacgatcgatatatctgcatagcagcaaaattcgattgacatcttatcctttatatataggtacagaaaagcatcacttcttataccatgatctgatcacttatttttcagctatcataaaactatcacatacatcagtgtatgtacacgcactgctacattcgtaatcttggacattgaagaggccatctggcatgtcttggcgttgctccttccttcaaagcatagacgaaatctcaaataaaccttgacttgaattatccaccgaagttcgctccatcacaacagcccccagacattgaaataggtatttctgaccaatctaaatgctctatgtcatccaacgcgttttatggactcacgtgaccctttcagcagcagaaaaaaaaatcggcgcgctgtgagtggaagcccaccgcccgcgctaaaccacaaacagcctaggcggagtgacccaaacatggaccagcgcgccgggcagaagcacccgcaatgatataaacccggctgcgtgacctcgaccctcgctcttgtgtactaaatctaaatccccccgctgactcatcatcgcggcttgaggtgttaggcgttcggtctttctttttccatatcgaggtccttccaccttaatttcgcgccccgctccgcgnnnnnnnnnnnnnnnnnnnnnnnnnnnnnnnnnnnnnnnnnnnnnnnnnnnnnnnnnnnnnnnnnnnnnnnnnnnnnnnnnnnnnnnnnnnnnnnnnnnnnnnnnnnnnnnnnnnnnnnnnnnnaccttatttgcgcgcttcgtcgcgcgcaattgttcttttcctcgtgttgttctcttttttttctcttattcaaattgtcccgcatagtcggaagaaaagcgaagacccacgatggcttcccggtaagccccttcagccagttaccacgcgcctgtcacgtgaagctaacctaattcagactcgaccgtctagtcacgtgagtataatggcccccaatatgtgagatcacgtgaagcaactgaccactgaccaatggcaatacaggctactcgagacgggcagtactcagttgattcgtaatactgctgctcagcagcttgcagatgtgcagaaacagcatccagatgaactgttcaatctactcgggcgcatcctgccttacctcagatccaagtcctgggacacaaggactgcttctgctaaagctattggattgattgtctccaacgcagatatttatgatccaaacgaggacgatggactccagatcaagtctgcagcagacgaagatgatgtggagatcaagtccgaggtcaaatccgaagagctagtcctggccgatgatttcctcaaactcaacaccttggacatcccttccgtattgaaatatggtaagcggctgctcggaagtgcgggcaaggagtatgagtactccctcgcgtccatggaaccagcttcacgtctacagcaccaaaagaagactttgactgcgcgcctaggactcgaaggcgaatacctagaagaagaccttatcgaggatatcgatctgcctcctaaagttgtaacccctgccctaaagaatgagccgactattccgtcgatctctcatcacaacagtcggcatgaagctcgctcccgcatgccttcctcgcctagtgaaagtgcgacaaaggaggacggggggctgagcaagcggcagctcaatcagcttaaacggaaaaacaagcagaatgccaagatgggggccaataaagtccgtgtcgtggatctgtcttctcgtcgacaatccgatattgccacgacccctatggccacaactccccaccctgtcaaagcagagaacggagataatcaagacggcgaccccaaacctgattacttttccttcgaacgcaccgaagaagatgacgactccaagcttgtttctgagttcaaaggagctgtcgtcccagagcgacctcttatccaaccagagattgtggagcagggtgcaggatggcctctggaacacatgtgtgaattcctgactatggacatctttgattccaactgggaagttcgacatggcgccgcaatggccctgcgtgaagtcatcagggtccagggtgtggcagctggccgcctggatggaaaaagtcgcccagaaaacgatgcactcaatcgccggtggctggatgacctctcatgtcgactactctgcgtcctgatgctggaccgatttggtgattacatttcagataatgtggttgccccaattcgtgaaaccgtgggtcagactctcggtgctcttctttcacacctacatccgaactcagtccgcgcagtctaccgatgcctataccggatcataatgcagaccgacctgggactggaccgccctgtctgggaggtctgccatggtggtatgatcgggatgcggtaccttgtcgcagttcgaaaggacttgcttgtcaaggactccaacatgatggatggcgttttggaagctgtcatgaaaggcctcgctgattatgatgacgatgtccgggctgttagcgccgccacactcgttcccattgcagaggagtttgtgtcctcccggactggcactcttggccctctgatgaacatcgtttgggactgtctttccaatctgcaggacgatctaagtgctagtacaggctctgtaatggaccttttggcaaaactttgcacattccctcaagttctggatgctatgaaggctaacgctgcagacgatccggaagcgtcatttggaaaacttgtcccccgcctctacccattcctccgccataccatcacgagtgttcgctcggctgtccttcgggctctcatgacattcttgaagctagagggtgagggcactacagactgggtcgatggcaaggcattgcgcttaatcttccaaaatcttcttgtggagcgaaacgagggtgttttgaaactgtctggtcaagtgtggtccgaactcctcaacgttgttgagctgcgcggttcgttcaaatctgaagaggagttatcggactccatccagcctcttgtcactctgactctgggcgcttttggcgttcctcggtaccctatccctatgaacacctcgctctttatcaaaccctctggtttgccattctccgccgctctcccggctcccatcccccccaaaggctctccccctgcttctatcccaggcggggctgagatcaaggtgggacggagacgcaaatcagagaagaaagagaaagaaccacccccgccctcagctcacaacgtggacggacacatgctttctggtgatattgacctcgttggtgcagatactatgttgagatccaagatttacgctgccaaggcgttgggcgagctgatatctttctgggacaagaatgagctaccaagcctttggccggcaattttggatggtcttaatgtttctgcttccacaacgcagcttgcctcggccatggtcatagaagagtatgctcgccaatctggactagagagcaaatatcgctcgtcactgtgtgaccgtcttcgaccgattctcgagggcgagcgtccagcttggtatgcagacattgcgtgttaccttcatgtcgcgcgctcccagtgtcattcattgttgaacactttccgggatcatgcgcatgtggcaccttcccgactgccaaccttggctgtggtcgttcagggcgacccagaagccggacctaatgcattttccttggcggacgctgagaaaattgttggtcctgactttgatcgactgaagaaaaacctcacaccggctcaacgaatcactgctacccaagttttgaacgacacccgtacaaccgcacaatccgccgttgaggaggcacgattgatgagggaacagcgggacatgcgtgttttagctgccactgctggtgccttggtcgcgttgcgggatatccccaagaagcctggtcatatcatcaagggcatgatggacagtgtcaagaaagaggagaatttagaacttcagcagcgctctgcgacagcagtggcaggcctcatcgaacactacacagccgccacgaagcgtgggccagtggacaaaatcattggaaacttggtcaaatactgctgcgtggacacttccgagacacccgaattcccgcacaatgtgcacttggagaaatcaatcttgtcgctacgcaaagaagaagaccgacgcgaccatccagatgcggccaaattcgaaagagaggcaagagaggcacggattatgcgtcgtggtgctaaggatgcgctggagcagctggcagtcaagtttggcgctgagcttttggagaaggttccgaatctcgcgaaattggttgaacggccattgaaagatgctttgacagaagatgatcttcctgagaacatcaccgacccagagaatccacttggtcaagaaattgtagatggtctttctacactgcgggctctactgcccaagtttgatccgggtctgcaccaatgggttatcgaccttatgccgatcatcgccaagggtttgcagtgccgactttctgtcattcgctacgcagcagccaaatgtttcgctacaatttgtagtgtcatcaccgtcaagggcatgacgatgctggtcgaaaaggtcctaccaattatcaacaatgggctagatgtcaatcaccgccaaggtgcgattgaatgcatctatcatctgatccatgttatggaagatggaattctgccctatgtcatcttcttggtcgttcctgtccttggccgaatgagcgactccgacaacgatgtgcgtcttctagcaacaacctcattcgccacccttgtcaaactggttcccctggaggccggtattcccgacccccctggcttctcagaagagctgctagctggccgagaccgagagaggaagtttatgtcccagatgctggacgtgcgtaaggtcgagccattcgaaatcccagtcgctatcaaggctgagctccgaccttaccagcaggatggtgtcaattggcttgctttcctcaatcgctacaatctccatggtattctttgcgacgacatgggtctcggcaagacgcttcagaccatttgcatcgtggcaagcgaccaccatatgcgggcagaggagttcgccaagagccaatcgacggactcccgaaaactgccttctttgattgtctgtccgccttctctctctggacattggcagcaggaagtcaagcagtatgctccattcctcagttgcattgcatatgtcggccctcctgcggaacggaccagacttcaaccccttctggccactacagatgtcattgtaacttcttacgatgtttgccgcaatgacaatgatattctctcccctatgaacttcaactactgtgtgcttgacgagggccatcttattaagaaccccaaggccaagatcacgtcttcagtcaaaaagttagccagcaatcaccgtttgatcttgtctggtaccccgatccaaaacaacgtcctcgaattgtggtcgctgtttgatttcttgatgcccggtttcttgggaaccgagaaggtcttcttggatcggtttgccaagcccattgcagcgagccgtttcagcaaatcctcttccaaggaacaagaggcaggtgctttagcaatcgaggcactgcataaacaggtcctgccattcctactccgtcgtctgaaagaggaagtcttgaatgacctccctcccaagattatccagaactactactgtgatccgagtgaactgcagaagaaactcttcgaggacttctctaagaaggagcagaaggagctggcagataaggtgggcagcgcggaccgtggcgacaaagagcatatcttccaggcgcttcaatatatgcgacgtctatgtaattctcctgccttggttgtcaaggaaggccacaagcagtacaacgaggtgcaaagcttcctgacggccaagcgttcgaacatcagagatatttcccacgcgcccaagctaactgccctgaaagacttgctggtggattgcggcattggccttgaccacacagcagagggtgaactggatacaggcgcaagctatgtcagcccccaccgagctcttgtgttctgtcagatgaaggagatgttggacattgtgcagaatgatgttcttaagaaactcctcccatccgttcaataccttcgcttggatgggagtgtggaagcaaccaagcgccaggatatcgttaaccggttcaacaccgaccccagttatgatgtcttactcctgaccactagtgttggtggtttgggtctcaaccttacgggtgcagataccgtcatcttcgtggagcacgactggaacccacagaaagatatccaagctatggaccgtgctcatcgtatcggccaaaagaaggttgtcaacgtgtaccgcctgatcacacgtggtaccctagaggagaagatcctgaagtaagtcactactatcccacaagaaccccgcagatgcacaaagactaacgtgatccccgccacagtctacaacgattcaagatcgacgtcgcctctaccgtggtcaatcaacagaacgctgggctcggaacaatggacacagaccaactacttgacctgttcaatctcggcgaaacggcagacacagccgagaagccaagcgacccagccggcaacgaagtcgatatggttgatattgacggcgaagtcaaggagaagggcaagaagggctggctagacgatctgggcgaactctgggatgaccgccagtaccaggaagaatataacctggattcgttcctggaaaccatgaaaaactgataaatactgcgccgcccatccccgattcgaagcttatcccagcctagactcgatgtctgcttcgctttttttgcatctcagatgcatatctacccatcttccgctcccctgcgtctgattcacgttttcacatctcttcgactcaaccctcccccaaaactcccccatatcctcacaaccccaaatgattgtcatgcttaatgtcactgtaccattctccgtcctataccatggaaacttttgtctgcacggcagaccggagcataatcgcttattcattagttctaccgctgggaaggccctctgatttctgctcgttctttctattcttcttcgaacccttcatgtattgctagcttctttgatctctccccacaatggatggagagtctaattcctgtatgtgtacatagcaagtcctttattcttccccaacattgatatcttttttttttttgaaaagtcaaaaacggcgtaaactagcggattgttcactcgtcattggacatggataggatgcacacaactgacgatacttgactgcacggttttgatttggaatcttcattgaaaaatacatacacaaaaacaaaacaccatagcacctttccaatggcaatgataatagcccgaaagcatagctgcgaacgccgtatttcccaaaaaatgttgaccggagacagaggtggaagacaggaagaaaaactaacaccagccacgaaaagaaaatattccgcgaggtggggaggctccgaagaccctcaaaaatgatagtgtagatacaaatcaagaatggaaatgttgatacgttgacaccgcagaagaacattactgcagcgtgggctggactgcaagggtccagaaggcggaaaacaagatatcaacaaaaacaaaaaaataaaaaaataaaaaaaccaggtattaggttgatcataaggctgaaaaacaattcatcagacgcggcctaaaccgccaggtatgtgctcgtcagctcattccatgtttaagcctgtcccttcggcttcgaaagcatgttgaggcggctcatgctgagaacaccgcgactcttcttgctagcgggagtaccgatttggccagaaggacgcacaggagtcttcgtaaggcgtttcttcaccggacttggagtaggcgggttagacttgaacctcttggtgctgcgctcatcggactgcatatcggcaggcggcacattttcacgatctgcagtgttgggagcatcctcatcgttgacttcactgcggtgtctcttcttattaagaatgccgtgagcaatgccatgagtcagcaccggaagctcttgatatggagcgggttgttcaccggcattcgatttgcgaacacgacgaatggacttgaattcggaagtaggagtagtggaagttgagacagccgagttcttctcgggagtgagagccgggagagtggggtagaccacaaccccgggcatggaccgaagctgagcggaagagaccttggaaggagagggtgaggcgatagcaagttcgtgacgagacttaacacttggagtgaattcaacgtgcttctttggcgaaggggttggcgcggagtcactcacatcaccagctcctccaaagagcgacttggggttgaagtcgggcgctgcaatgtgggtgccagaagcaattttggcagggtcgcgggagaagaggggttggcgccgacgaagaatagatctaaggctaccaagagtgggcaatttgcttttgaggcgtgggttgaaatcagtgcgaggggttcgaggtgaggccatcgttttggcggccggagacaaattcaaagatggaatcattgaggttctcggcgccttgatgctggtagaggtcgtacgagcaagcgaagcatgtgtgggagtcatgatggaactgcgaacgtttgtgcgagggcgagggcgaggacctgcaggtcgacggggggtttcgaccttttgtgtttgatcttttgattcatgactagtggatttatcttcgatttggttgtgcttgacacgcttggatgctgtagcagccgtgggagtggacaattttgagatcttagtggcagggcgagaaggggacgagttctggctctctggttcgtcaagctgcgctttggacttggaccgcttcagggacttggtaacaggctggaagcgaccaggggtagcacggaaagatgaagcatgtccggcaatggagtccatctttctgaattccgccatgtggatgtcgctgaaacggttggccctgccctttggcatggcaatcttccggtccccatgaattttctcggccttgtgatcttcacagtcttgctctgagttgctctgaaccatttgcgccttgattcgagccgcgtcagcacgaaggctttccatcagcagtttggcctcttcactgagttccgtctcctgggattgaaacttgtactcgaaccctggggttccgaactggtcggtcgcgggagacgccttggatttggtcggggtgttgtcgctgatgccgtgcttgactatattgccattggcatctttcttgatgggattgaatccgaggagcaggcctgagtctgcatgtttagttgtgctctgttgggctttgctgggatgcatttcttcgcgggacggacgagccgcagtcacactagtaggggtcctcatactagcgcgctttcgttgagcggacgcccgaggagttttcgcaatgggagtttggatgcgtgggagttcggggtcgtcaatctcttcgccttcggcaacagagtgaagtctggaagctgcgactggctgagtggtcatgtcttcaacctgaaagaaaaaaaaacaattgaagttagtttaccgcgatttcgacgatcatcaggaccttaatctgtcccacagcaggcgtcactatgctactcacctccggggtgttctggcgacgaatgcgagcggaacggcggatcgccatgactgaagacgtgaatgcaaggaatcaacaaatatcaatagaatgcaatagccccaagaagcagtgcagggggtaaatgggtcgagacagggtgtgggggaagcatcaaagtcgaagcgaggccaaaatgtaaacaacgcgcttgacgtcagatgactcagctcagcatcgtcctgacctcgggagcaacctttgtactacggaatacaaactatcgctaactacacattctcgctcgcatattattctccttaagaagtcttttatattgatttagttaactaccatttatcttaatcctcctagatgaatactaatacagtttcatcttgttccaatagtaaaaatacatagcaaatccttccaaaaatcgtagaagatgccacagtgactatcaaaagctggctaaacttcttgtcacaatatagaaaaaacaaagttaagcatggtttccatgcaagtgctcacgcaagtgctggcgccagtgctcatgaatgtgcctctcggtatcttgagtagcggtggtctcctgcgtagcagcctcttgagtagtagtggtgtattgcgtagtggtggtgtattgtgtagcggcggtctcttgagtagcggtagtctctgacgtagcgacagcctcctgaggagcagtggtctcttgagtagcgggggcctcctgagtagtagtggtctctggcgtagcggcggcctcttgagtagcggtggtctcctgcgtagcgacagcctcctgaggagcagtggtctcttgagtagcggaggcctcctgagtagcagtggtctcttgagtagcggcggcgttctgggtagcggcctcagcttcctggccccatccagtgggcgggttattgccgggcaatttctcaagaacaccgtcaatctgctcggggactaggttgggaatgttgcatgtagttgaggcgtcattgatgaaaccagcatcagcgcacttgtccattccagaatccccagcatcacagttatcaatgatcttctgcaagaccgattcatcccagccagcgatctatattcgtattagccagtagtcccagacatatcatcctgtaatgcaaatagatatactcacaaagtcaccatgaagcgaataccccgtccgatcgccgttactgagaatgaaaggctgcgagccggtaccctgggtccacatatcggcaaacagcggtgtgttccaatacacctcgtagaagatatggggaacgtggatccaaccctgtggacagttcgccttgccaccagtggtacccttgctactagggaataccatgtttgtcttgtagtcatcaagcccagcctcaggattgtagcacgaggggaaatggatatcggcacgcaggggcgacgcatagccatcgcagttcatatccgggaagccagcgccagcaccggcattgtttggatcttgaataccgacaccgtggagtccatccgaatccggtgggtaggaaggcacatcgtaagaagagcgggggcatgtgaactggacaggttggatagttccctggttcgtgtcgaggacattggcggcaccgcctgggggtggtgtacgtagggagctgttaccgatgaacatgcgcagaccgacagggaaagctttgatctcgtcgtcggttggctcgaagaagtagtagacattcatgtagaacatcgggaccgagaggaagctaccattatcggcttggaagtatagcgacggagtccagtagttgctcttgtcggcatcgacgagggatgaggtgcagttggagtccagcagggcatcgtctgtcatggtgaggttgaaattgcttcctccctggatggcgtgcgagtgtgaagccgcctctccggggttcataatcggatccatacgacccattgtcaggggaccattgccatagaaatggttcacggcaaaggtacgcgagtcttttgcgagtgccaactcgaagaagaccgcggaggtcacgagagtgcacaaggccttgacgtgcattttggaagtatatcggaagaatcggttgaaatagcaatatgcagcaacgagaaggatgcctcagaattaagtagaaatgaacggcggctgctcaagtaccggactcgaggtaaaagaatggaatgatgtttggaactcaacaaaaagaggaagggccattgttatataccagggagaatcgttctcatagaatatcctcgtcaattcgttctcgtcaatcgttctcgtataatcgttttcgttctcggtggggagtttcttcgatagttaatggagaatcagggtccaggccaaggactccacatggtgtcaataggtgattagacgccttgttaattgtgtagaaggtaatgggtgtaataagatgaggagggtgtttcagggtagagtgttttgaaacgtggggctacgccttagggcacatacagttacctaaaggggattggcggagaggatgataaatcaaatcccagactcctgggaatcgtcaatttccacatgtacttttcacatgcataacttttgtgacacatcatatgattagagtggttgctaaatacggtggatttgaggctattcccggaaagtgtacctgtcatccctttccatatacttcgtttagtaaatcacacagacagtaggcgtagtacggagtggtagtatgtagaattcattgatactaatcccccgtgaacattatatacactcatgttacagtttcaccactttgcccttatcaattctttcccccttattgaaaacagactagtctttatccgcgttaactctccggagattaaaaggatgtttaggaagaagactaggcattaaggtagtccactagttaatttaatatggatatccggtgcaatgctatccggtgaaatccggtgtccttggtgggcttgctagtttgccacgatattagtatctttgctagctctcctttctcaaggaatccacatattgttttcttaaagatgcccacaatgtactccgtagcattcctagggatacacccaagacacatgttcaggagtaaaacctccagtaaatattattcaagagacaaattatagttctgattcttgttgcaggaaataaatacaacgaagaaataaagtctggtagcgagcaactctgtaggccaatgccaagaccttcagcctcgagtcactcccgacgtctcttcaattcaactcctgactactcgctgcttagggtggcatcatgaaataataatgagccccgatggaagaaagagaaacaatgtggcacttgactctcaccctagagtaaaaagggggagaaaaacaacttcctgttcccaatgtcacgccaggaagcaaaaatgtaacagagaactgccttgctctcgttgtattcaacgcggggttcctcaactatgtcaatggccagagaaggaaaagtgccatgcgatgccaccagaaagagtgagcactgcaggtaccggatatccccgcctcaaaaacgtagatcatggctaaccatatagcagatacccagggcacagaactggggcagttgtatattgcccggggagcacctagcttcttcggtaattcatactttggccaccaggtggcagcccgcatgattcaggagtcagcccccgatctgcccccgatgagtttgctgtctagcaaggattctttgcaatcgtttcggaatgactctgggcccttttcacaagtgtgggatttacttggtctattaccgcggaataaagtaaccgtggatcgactaatcgagaaattcctgattgagatcaactgggttatcgacacagttcaccccgaaaccttcagatctcaatttgcagagttctggggccaaaaatttggattcgacgaaattgctggagtagatcttcgctggctcgctcttttgtttattattctcgcttttagcgtgctcttggacaaccctactacttcttcgcccgaaaagcggaaagaatgcgaagaagcctctcttcgtttctactgggctgccaggagagcgatcgttatctcaccctcctttcacggcgagagcttagatcttgtcagggcagggttgatggttacgcgatatctgttatacaccagacaagtcgcagagagctggctcaccatcagctttgccatgcgcatggcccaagcacaaggcatgcatatagatggagaaaaatgggggctatcgagaaaagccactgaaactagaagacgtctttggagcaatctgtacttgcttgacaagactattgccctcgctctcggcagaccatacgcgatctcggatcatatgtgtctcatcaaagcccctgataatatatggctggatgggatgtctgatgaagagtcctctcttgctacccctcgtccattgagctatcctacgatgagcacagtgacactcctcggcagtggcttaggtaaaatcgccggtgaaatccaagaccgatgctttggtttatattctgcatcttacgatacggtgattgagatggacaacaagcttgttgcatggaaagagcaactcccgtcctactttgccgtggaagaccccgagctttcactggatgagtcacatacatttctaccttggcatcgcctctacctgcactctgctttccactttgccagaatcactctgcacagaccttatcttctgcgcgagtccatgaccaatcgcttcagccttagtcacgaggcatgcatctcctcggcatcttccgatctgaagatccgattgcagtctttgaactatggaacatcagaaaatatgagatggacactaggcacccacaatatgttcaacagtgccttcatcctgggcattatcgctgtgcggcgacccattgctcctcaaactgcggcaatcttgaacgatcttgaggaatattgcgaaaggttacggaaggatgtttggctaaacgagtttggtcttgcggaggtcaaagtggtagagttgtgtataatccgtaccactggacttgcccaagctaccgaccagccaggtgatcaagcctcaatgagtccacctgaagtaatgccagactttatggctcaggagcgcgaaaggaatccaatgatgtcgacgcccatgaacattgagtccattgcagcgggtacctcggccgatcaaccacctggttcttcgcctgatatgatgtggcctgcagtatgggaagatcagaactttgcatttccacaggctgctgatcttgaaacttgggagcaaatgatctccgaaattgcatatcacacctagcatatggaatttcttggggtcatttttgttgtacaagcatttgtcgatatatattctcggtttttatgacggatgtagcatctcagaaattatatgacttgatctcaatattcggtagtataaaacacattcacaggatatagcggaaatcgggatggaaatccccgcctttcttttcgtatgaccccgagctgacaatgcgctccctctcctccggtgacagttggtctcgcttcttattgtgatatcggagcaaagcccacatactagcattgccacagaaagcaagacagatagcagcaagggaaacagaatgaccaaccacatatcgtccatttatcgatgacttgtaaatttgaccagccttgagttatgttagcttcaggtcaatgccacaaaacgagcacgccaatatgatattccactcacaatcaaaccggcgcaatttccgatagtctgctgtaggcctactcccatggcacgcttgtagtagccggaatggctgttggcattccaactgaccccaagtccaaccacagcatagattctagaagaaaggttagtaattactcgacagatactccaacggaaaatacatacccagtaacacacacatatgtcgcaaaatagagcacacctcgtttatggacatccactcccagcagcatggcatagccaatagccgtcactagacacagggggaccatgaagatagctcgcatgcgcactcggtcggagagatttgcaatgaccaggtaaaacgcggaggcccagatatacacaggaacagtgagcagttgggtcttgaccgaatcaaacccaaaccctcggatgatagtaggcaaaaaggtactgaacccgaaggagcagatattgacacaaatttggttgaacgaggtgagccagctcttggggtctttgagtgtcttccacacttccttgaaatcaaactcttcagtatcagcataccgtgctgactgttgcatgcgcatgcgcatcagctctttctcttcttcgttcaaaaagtaggcagtttcgtagttatttggaaggaggaagaacgtggcaatgctaatgaccgcgctcatgatgccctccacaatgaaaagccacctccaaccttcaaggccgcacgcaccatctaggcgaatcagtccaaaggcgagtctaatgttcatgttagccattgttgttcggatttgtttggcagaatagggagagttgcgcatacaatccaccaaagcctccactcagagcagcagacacaaacagatatgaaattctctgtgcttgttcctcgcgcttgtaaaaggtagtcaacaggacggtcaagcaactgcacagtaattagcttccatccaaaacagatttttatcaaggcaatcgatagtctcacgggaatagaccactctcaaagacaccgaggaaaagtctggtgatataaagcccggcgacattcttgataaatccagcagacaatatggatgcactgaagccaaggatcaatgcagaaatgagtctgtttgggcgtaatttcttgaggagcatagagaacgggatctcaaagaagacgtaggtcgcgtagaacaaagacacggcatctgggtattgttagctatagcttggaatattggacgagggtaatctcacttcctagttcatttccaactaaaccaagatcttcctgtaagagctaagtcagtaacccactgcttcacaaaacgtggactcgaccttaccggcatgccagcaacagctgcatttctagccaggagttagcgataggaaccctcgctgcatagaggaagaacttaccccaagttgcttcgatcaagatatgcaaccaagaaaatgagcatcaccaaaggacaaatgcagagatcaagcttccatagcagctttctctctcggatagggtcaactacgaagttgcccatctgcacatcgtgatccgaggatagatcagcttgtttgatatccatctccttgttcatcttgaatgagtatgtagattgaccgtatacagaatccatccctatcggttcttatatatggaagttgtcacaagcgttatcaatgatcgggaaatccttcggtttattcaagcactcgacgaaagtaagacgaagaatttcccgaacattttaggtggccatgaccaattaagtttggtgtcatggcgagagataagctccagggctggaccaaggcttttcgtgcattagttcgtcccatcggggcactttaaccttaaaactttaccataatcgcgcatatacctaggtatatctcacctttcctgaattatcactttttaactgcctccgacgtttcaatgatttcccacatggcttacaatcttgcccaggggtatattagctaatcgctatcttttaccgacagggatttccccgcgttttatcgtcttggcgtcggcaattgtgaactctaatttatcttatcttccaatttcccgatcaatttcccgacgcgaggtatggggagactgcccattgataaggagacaaagcacactcgcactttttgccattcagaaatattttatattgcctatctctcgaaatgggaatttcgaacatgaacggaaccgagttcacagaaaccccagcaaaacatccagtaagtgctttgccaagaccattactatgttggagtgatctaatgtgctataggtttggaagcgatgggttcgcttcagagctgaagatggtaaaatatatggtggggagccggtgaatccggatattgatggtatggcatactctcaagttcatgaaagctcaacccctactgacagactcatagtgggtcaggctatagaaaagaatgccgaagtaccagtcaaagtcgtggctggtaactcagcattcgattatgatgctttgttcacgggtgaaatcaaaaccattgatgaactgctatccccggtctcgcaaattgaagctggggctgttcggtgcatcggcttaaactacaaggagcacgcagccgagatgaagctgactcttccaaacacgccaacgttagtatatctgcccttgcctctaacacttgctgataccgtccagggtgtttctgaaggccagcacttgcattgcatctgcatgcgaaccgattgtacttccttccaacgtggattacgatgaagcggactatgaagttgagttggcgatagtcatcggcagaaaatgcaaaaatgtttcggtctccgaagcagtcgactatattctgggttatgcagtcgccaatgatgtgacagcccgcaagcatcaagagaagacatcacagtggtcttatgcaaaggggatggtatgtcgatatagtcaatgtccaagatgaacttcacaactaacctctagcaggatgggttttgcccactcggtccatgtatcgtatctacagaacaaatcccgaatcctgcagtcttgaacttgaagacccgtctcaatggaaagatcatgcagaatgaatccgccgatgacatgatcttcaacgtgccagaaattgtgtcctatgtttctcaggtacataatgacatcatctcttttacgcagatataactaactcaagtattagggccacacattactacccgggaccgtcatcatcaccggaacgccgtgtggcattggtatctcacagagcccaccacaattcctccagcctggagatgagctgcgaataagcataagtcatgggttaggcactcaaatatgcccgattgtgagagattgagcattgcatcaatcatatgtttttgatccgaaggtgattgcaggaatgaagtcgtcgtgttacgtactttgaattgggtatggtttcttatattttgtaaagaaaggcagcattatattaggctcatctacgaaattgtagcaattcatgaaggcatatttcaccaagtgattcaagctgaaggtgtcgataaatagataaagacatttcctggggagcaggatcctagaccaacgctgtgcctatcccataattgtttccaaattcaaatccatcataatatccaaccagaactcttctacaccagagtccgcacggtcccaagtctcgtgcacaacgttaacaatccgttgcattggcagctttggtaagattaaaataagttcagacaaccgcattttaacctttcgtctggcctgggcaatttcaacgtccagcgtattcagactggtaattgaatttcctgtggcgcccagaacagacccagacgagaaaacaagatcgctagagatgcaagctaaaactacgggctgcagaaccttcgttccagatgttgaaggaagctgccccaaaagggatacaatgtgcaatgccagggtgtgtcgtgtgtcttccaccgaacacgacgaccattcggtagctattggaaacaacaacaaaaagagggccgggataggactttccccatctgtggtttgattacttcgtagtcgttcttcaaggatgtccgggaaaacatggtaaatttgtaatagtgccgtacagcgatatgcctcggctaacgtaagaaaatgagacgggggcgtgttcgtatcaccgatatcgacaggcccacaatagaacgagaagcccgtgaagagaattttgtcctcaagatgttcggctttctgtctgagatcgagttcctcggccatggagctcaagtcaatcaaggtgggatccaaggcctctggtcttcggcggtgggaggttcttgcggctcgaattactctcgcagtccgataaaagaggctcaatgcgtatctgaaagaccctgtccacgggtgtggtaggatctgcccatcgacaagatagactgaaagatctgtgtcgctgttttctatagagctttccacgtctacaataggcgactcctctgccacaaaggcagctagtaagttccaccaaaggagacactgtttgaaaagtggatgttgttttgcgagggcagaatttgcattcttgcactggcgttcttgtcgcataagatggtcttgggccgctctcagatatggcagccccaaatcagaagcatcgtgccacccagtggtggatccaatcatgagcagtgcgaggaagtactcatcatcctttgcctgaactgaacttttttgagcactagtattcagacacgcaattgcttgctgttgtgtctgtattccaattggtcgcatgttgggaaaatcgttggccaacgaggcagctgacatgctctggatggcgaagtaaatcgccgcatttcgactccaaagccgactcacaatagttcgaaaaggattgaggggacagtcgaaagatgaccattgattacagactgtatgaaagtaatattgcaccaacattactggtagttggatgagaaaagaggggacggatgtgttgaccagtcgttgacgcaaaaccgacaacccatctagttcggcatcaggattcgttaagcccgtatcattagatcgcagctcagtgtagaaccaggcatctgttggctcatcaaaatccggcagctgatcaaagaggtttgagcaggtcgtatcccatatactcggggttccattttgaagattgtctctttcatcctgtgttggattgttcacttcgaaaagttcggtcgcaaccgtttcgggagattcaatctgtgcagctggctgttttggctcttcgctgcctttgaaaacatatcgccactgcaagctctgcttttggtaaccggggcatgtgtgtcctcgcttggtacattcctgacaacttggctttgcctcgtcacatctgcgctggataagtattactatatgaaatttcaagaggccttcgtaggtgaaggataaattgtgttggtaagaaaatctttcacctcgacttactcgccgttgcttgcacctttggcagcccccttttgactttggtcggcaccggttgggattctgccttttcttctgcggagttgatttctctgtattttccattctacgcaaagcaaagttattgggaatgttcttcgctgagagagggggaaacatcaggctgagatatcggggcatcggatgagaagccgatcaaaggatttgaagaccggtgcatgaaccgagatccgatcacctgccgataagcaacgcctcatctctgctgatattcctcccgatttgattgaagctgaattgttgaggttgtctaagtgataactatttccccgcaccttccttttgctctactctaaaaaaggatcagcaacacgcggtttccttcccttaatgcgaactagcgcctcctctatatagcatacgtgttgatcagcgtgtcaagcatttgcagcaaggaatttctcattcggggaatatcttgaccttcgggtcatcagcccctgagttggcccggagagatgtatgccacaggtcatatatgtagctttcacttcaatgacatcaagtacaagtgctttaagacacaacttgcatataaggggtatgtgtatgtgcatatgcatatgctggagttgatatgatagagatttcaaaaaacacggcatattctgacacaatgcttgggaagaagcctttcactactcttgatggaaaaaaacagaatccatattccaactctccgtcaatggcaacttgtttttcagttggtttctctccgcaccgtatcatgacatcatctatgcggagtagtccatgttctctcatcttagctttctccgtattgtgaggggaagtttaccggatatctctagccgttaagatcattgatgttatgatcatggcctcccggttcggatatctggcaatatattttatcaataccaactgccgagctgcccattgattaaagtcacctatctacgcttccagccaatcaatacccatcgctacccatatatctctcacaattccagtcctatacggctcgagaggggattccggatcatcaggacctcgtgatccacatggagtccatattcggattagcgtagccgccgtgcataagcgtcaatactctaacctatctcgtactagtgttggtgggtaaacaggagaggatcatcgatgtttcagctgagacctattgtcggtccaatctcactgctcgtcttatcttcacgtcatatgtaattgcataggtgcccagatagaatccccagttaaacgttatctcggcataaatccatttctccactcggtggataccgtgtttgggaacttgctccggggagatatggaataacagattgagtgaatttcctcctcactcgtaaatatggtcagttttatgaatatctgcacctcccctcaccagaataggagataaacagcccgaactcctaatgcttattgcgtccgaaaattcctctgtaggttttatccaactatacccaagatttgactatttgaaacttacccttgttatatcttttcatcctagaggattattcactctttcattcctcatcccgcttttgttaaacctcgatcatggcagacgatgctactgccaaccagcgtcgttcttcaaagagcaaaggctccgaggcctatgcacctgcggaataccctaacatcgaagaaggcaaacaatcgtcagcaaatggggtactagaagccctgggctatgagcctgaactcattcgaaaccgctccacgcttcaggtggccttcatgtcctttgtgctcgcagcaattccatacggactggctacgactttcacctaccctcttgttgggggaggccctgtcaacataatctggggatggcttgccgtttctttgattacgctatgtgtggctgcttcacttggcgaaatcacctcagtctatccaactgccggaggggtctactaccagacttttatgatatctccaccgtcatatcgaagaatcgcctcgtggatttgcggatggtcatatgttgttggaaatatcaccatcacgcttgcagtcaaccttgggagtactctattcctcatttcatgtatcaacgttttcgaatcctctccaggagtaggaatcttcgaagcggaaacgtaccaagtttttcttatatttatcgcagtcacatttctcgctaacgcaatatcgacatatggaaatgcatggctgccttaccttgacgtatgtctaaaccataacccttccaacatcgcttgctaatacagaagctagacattcgcaatattcgtgacatttataggagtgttggctattgtgatatgtgttcttgtggttgcgaaagagggtagacatgacgccaaatatgtttttactagttttgagccgatatctggctggccagcaggctggtctttctgcgtcggacttttacaggcagcttatagcacttcttccactggtatggtgatttggtatgtaacatgttttgtttcccaccccagatgactatctcccatctcatttctactatgaaacccctatatctgacgcgtcaaaagtatgtgtgaagaagttcagcaaccatcaacacaagtcccaaaagcaatggttggaacggtcattctaaataccctcgccgggttcctcttccttattccattggttttcgtgctccccgacacaaaggttttagcagctctcgaatccggtcaaccagttccgagtattatcaagtccgctgttggaagttcagttggatcattcctgcttctcctaccattgatattgctctcgatgttctgtgtcattggctgtactacgaccgtctcccgaagcacctgggcgtttgctcgcgatggaggtataccaggctccagatggtggaagcaggtaaacagagacggcgtacctttcaatgctatgatgcttggcatggttattcagatattgcttggctttatctacttcgggtcaactactgcatttaatgcattcacaggcgtcggagttattaccttgactgtcagctatgcttgcccaatcgttgtgtctcttgctggaggtcgaagacacataaagaatggccaattcgatcttggcacactcgggctggtttgcaatattgtgacattgggtaagcatgcacgatgtgggcacgatttatcgctatcgctaatgcatattctagcatggagtcttcttgccattccgctattttgcatgccttcttcaatccccgtcgctgccgatacggtcaactatgcaccggtggtgtttgttgcatttatactaattgcttctggatggtactgggtttggggctacgagaagtatgttgggccgccaacaatggacgatgagtttcgctcatcagacttgtaaagtaagagatttggagtaagaagctccaacataaatctgaattcgaaatctatgtgtatcttttaaagatggcccagacccctgaagaccagggcccgggctaggccctgcgccctaaggtgggcacccggccccggccccgtagctttcggctgactaatattggtccaaccaaggtttattcccgctctcttggtttctgccaaaactactctcccaacttcaagtcaacgttgaagtaatactctgaccctctatttcctgacatatttgactatggaacccccaaagaaactcaaacttgcaagtctaggtagctcctttgctgctggtcctgacattcccccacaaatcgaaccacgtgcagcgttgcgatcaggacagaattacccccatcttctggcgcagcacttgaacgctgatctcactgatctaagcgtttctggtgcaacgttgctcaacataacagtcgatccacagtctactccgttcaacatgaccttcccaccgcaaatctccgacctccccgaagacgccaatatcgtcaccgtgaccgctggaggaaacgacataaattacattggcggcatgatcgccgatgcttgcgatgctgagctccaatcttccgcgtcactatcgcccagcgaattggcagaacgactagcgggggtcgttgatgagatacacaaacgggccccgagggctcgaattttccttgttgaatatcttgctgtcttggggcctggcactcaagctggtcgggatatcccgctgacccaggagagaattcagcattaccgcggtgttgcgtctgttctacaacatgcatattctgtcgctgtggaaggtcgaaccgattggtgtgagacagtcccaattcaccaactcagtcaggaacatgcacttggtagcaaagaaccctgggttggagggtttgcatcggggccgcttctccatccgaatcttgatgggatgaaggccgtagcggatatactagctgagactattcgcaagagcacattatccaaagcattgttgtgaatgtactcgttaatcaagcagatgagagcaggtttgagctagcaccatcatcgtgatcacccgattatatcatgctcggatcgtcctttaccacataataatactatttcttcgttaagaccacgtcaaatcttgcttgtttcgtcacacaaatgacaaatagcatcagctttcacatctccataatcatgacccggtaagtgtattggggctcctaaccaggtgaaagctaccaatcagaatcctgcaagggtcttacgtgtgatctggcgtaaccccgcatttggggtgagacgggaacgccgagagcttcttcccagccctctggtaactcaagccttcttatagacaatcaacattggcccttgctactcactttaacccttataaagatccctagagaagaacaaggacgcttgcacggctgatacgcttgtagcatcgaattttcggttgtaatcaggcagtgcaaacatacgatgcgcatatttgtcgactgtcggtcaaggccatgcatacgcggcacttgtcgcccgtatagcagacaaacacataaccaataggacgagatttgccttgaatgacgggcgacctagtcgagtaagcaaccagtagtgctaacaaatccaagcggtcaatgcgagcgttgcccttgctgtcttgagtcatgtataacgtgaatttgatggtttcttttgtcaatatggcctacattatgctgcgcgttttagccagaagaattagccagaagaaaaaaagacataatacacagtatttttatatacaacgtctttattgtcggtcactcaagtcctacttgaattacatccggaagtatctctgtcggtccgaaaacctcgggaagtcatcttccgggtccacggcagaagcgaaacagtctcttcaaatgcatccgcgagttttgttacaaattagagtgtattgactgccacttatcaattggtattttggtagaccacccctccaacaaggccgtgatatccggaacctcgacaccgttcctctccccgccgagctggaggagcgtgtacaccttgcgtgtagacctgacaaacactggacaggtatacaatagactgggatttccttcttatttaacagagctattccgcgggccacttcacatggccggatattctcgcaacataatcattccagacgaagaagccttttgcagcagcagcacctcggcaaggtacaacataattgaacgcgcttggcgccttggcataaaaagatcatcatcgctagctctattactgtctacagcgtgagttatgcagtgtgagacgaaaattattctctttcccagtcgaagaaaccgccgacgcaaaaaccaatagacacatacgccatctcgaaggtgtgcggtgagaacattgcgagtggcttcgcgcgccgatgtggaatcgagtcgcgacatctatatcctgcgcattggcctcattgtggccccggaagagtaaagacaggctatgttccgatcatacgttgaaaatcctgagcgctgcatggctgagcatatatcgatgatcccgatctcgggttgccgttggggttcagatctttaacgctgtcaatgatgccattacgaattacgagaacttcctggcgcgggtagagagactgcccatcggtaatcagaaaaccaagttgcttgtgctagcgaagagcatcattggacgaagtattatgaatgaagagaaatcaattctgattcgtcatgttcgtaacaggggcccttgtctttcatacaaatgatcggggctagggctatgttagtaagcagatcacgcgccagttcccgatgacatcagcctcgcttccaggacaacgcttggccaaatcagggaggtgatattctctccacgttgcagcggtatgttctggcctgtctttttcaagttcaaatacgaggtccgcgctgtcatatgcgacctggaacaaaggatgcaaggacgcaaggccctctaattcaccggatggaaaaaggcacctatgccgctagtaaacaagtttttctccgtggcgcaatgaagcgggctatgatcctggctatgaggctagaaatgttcggcaagcgggttgcttaccatttagccgtggctttttaccgagatactttcaatatcttgcccctgaacctcatctgggaggtttaaggtgagacgttgagacgttgaaataagttcgtcagatggtggaacctggaggccacgacttgacaggtcacacaatatggctactcatgagatctggagagatttggcgagagaaaaagagagctccaatcatgaagtcgcgggctgggaagcgaatccttttgtttttttgatctctcactactattaccacatacagcatacattacacccacatactttctattatgaattcatatcatacgttacttctatccttacggggagtctgcacaagtccggggtaccccgatcgtccccgcatgcaatatacggccccagcttcatttcctttgcttctttgtccttttttagtattttttctttatttctttcatttctttttcagggctgggtctcccccaagttccccccccttagattctcctatattccacctcacccgcatccacttacacctacgacacacgtcatgctattctcctaatactgactcaacgccatgggcgatttcaccgccgccggggatggcatcagcggtcactaccagggcacctccctaggcatgcagatcgccatcgcaactcttgctggtatcacttggtacaatgccttcgagctaatgatcctcctctttgtcaccttcgcagaatatcgaggactctacttttggagtttatttatttcctcctccgctggtctacttccttactcgctgggcttcatgctcaaatttttcaaaatcaccgagcatcttccatggctccctgtcactttgctcacaattggatggtggtccatggtcaccggccagtctgttgtcctgtactcgcgcctacacttagtcctatcaaaccagcgagtcctgcgtcgcgtgttgaccatgatcgtgatcaacgcaatcatcctccatcttcccactacggtcctcacctacggtaccaacatggctagcgacgccaccctgggctcgtggacgaaaggctacaatataatggaaaagatccaaatgacaggcttttgcctgcaggaattcatcatttcagggctatatatctgggaaacggtacgcatgctacgcctagacccggaccgtaccaagcgcaagattcagtaccaactactggtcatcaacttcatcatcatcattttggacttgggcctgctcgtcgccgagtacttggacttctacatcatggaaaccatgctcaaaggagccatatacagcatcaagctaaagcttgaatttgccgtccttggtaaactcattcacttggtacacaatcacgtctggaaacccgaatcgttctctgcgccaagcgaactccccgattttgtcgacgcaagccgtgtaacctccgatgtgacccgtgccgtccctggtgtcgttcaacgcaggccttcccggatggaagctgatgacatttctatcgccttgttcgaacatttaccggccgaacgcatacgaaccaattccggctcatggagcaatgaagcccgcgcttatcatgtggatcaccttccgatcgactttaccaattctctctgccattatccgcgtcaccaaagtcgtcgcggacttctcgagaaaccgggatgagaataaatcctgtcacggcaatatcctccgccttctttttttatgaatcgcggttcatgagatacgatcttcattctccgtgaacatcacacatggatcagtcttcaaactggtctcaccctcgacatctccgaggaaactcaaacttccctgatccaaatatcaggcctcgcgcccagctccaggattcacccagcgttgctgtgccacagagccagtaacttccttaatggagaatccataaatacgcaactcagagagtgtagatgtgtattcatctttatttgtatataaacgattccctgtagttatgtcgattgcacactcattctctctttcgaatatacagaccaccttcggttctgtgtgaatttatatcgctcttcggtcgtggcttccgtattactctgagtattcgtgcaaacaatattttgaattggggcgcgctataggccaatatggcaggctttccgagtatgtatatgttaacagtttcatatagctgcatacagattcctaatgatatcttcaatttggagcctactaaatattatggtctaaaactctccgggttggatttccatggatagaaagaactttagccccgataagcttactttggatagttccagggttcggatggttatagcttgagttttaaattgccgatgttccaaggttggatattcttaagtgaacgcttcttgactccagagatcctatgcccttccctaatatcatcataaatcaaatggattagactatcaaagtcagagaccgcctaagcaagcacatgcacttggagaatctagtcaaaggtatgttatatgtctcaaccgcaatataaatcaacaaatgcccgtcgatacaatgatacacgcacaacacaattcaaaagatggatggaaacgaaacagctcataaatcgtacatagaaaaaggagctagaggccaggtttctcctaccaccagactcaagacctcaaagtcccgaggctcgaacgcttaatctcgaatgctcgagacccctcaatcaacccatcagagaacttggtcacagccacccacgccggactgaactgtcttacctcgtcgagagcggggatgaggccgattcggttattgtcgctccatagacatgtaatgcggcccgtgatggaggaattgccatcggcctcggacgactcatgctttgagaaatcgacatcaacagtccacttgttgtcccatgtacgactccacagttggatccggctcagaccatctggggacggatttatgaagcgttggtctggagcggaggagccaaccacactaaagtctgtgatataattgccgtccatgttgatacggcagttacgcgtgttttggcctgatacttcaaagcgaacagatgaactgtccgattgagggtgggaaatgttgaaggaaatccagtccggcgacagctcggaagcctcgagtagagagtcggcaccctcgtttggaagcgatagagattcaggactggggacaacatgtggtattggtgcattccaggagcatcgctgaactcggttgctgcctcggaaaatccaatcacaggcctcattttggcctgctgcgctggggagcccgtaggtaacttccttgacaaatggaggcatgccagtcagcgaagcagtagacatcccattgtcgaggtcgacctcctgcaggaagaacagtttcaggcgattggagtctgcgaacgggaaggcgacaaggttgtagatcaaggttccgatgaaaacaaagagtaagaagataggcaggtggtatgtgtaacggtggataaatggcagaataggtgcaaataaaagtacggtaagactggaaataaagagataaacaatcagctgggggttaccatcctgaccagtttggctgagggcgctggtaatcagaagagccagcggcacgatcagcatgagaatcacgggagctgtgataagcagctgtaacagccacgtccatcgcggcaacacgccactccacccctgctcgtcctcatacacgtttggatctttctcttcatcctcttcgtcctgttcatgagatccgcggtctaccccaacgcggacgtagttggcaaaggtggggcggtgccggccatgcaagagcgatgttgattcagtcaagtcctcttcagtatcatcgtcctggtcctcatcgcctgacgtagcaagccggcttccctgagtactaggccgtcgtgattcaaataatctagcagcgtattctgacttggttggcagagagaacaactccaaataggagatccatgtagccaagaaggtaccggcaaagtaaaagaacatgaaatagccaccagcgagcccttcctcgtgttcataaacggtgccaactaccatgagagaccaggtaagaacaaacatccaagtccaggtatagactcgatgaaaagctgatgggcgtgcaaagtctgcgatgcgagatacaaaccaagctaagaatatccaagctgagatcatcatactccatacggcgtatgagctgctatgggcaataaaagggttgacttttgtaaccatataagccaagccgacagtcaccgctgtaggaattaagagcaaaaacgggaaccggaagaaaccacgcagaccacgcaacgggatattgtcgtcgttgatctcggaatacaccgatgagcggaagagatacatcttatcagccctcgaaagaatgatactggtgataagtaatgtcaacggcgccacaatcagcagtgtgacagacaacgcaaagagtgtgtgcagacggaagatggcaaaagcactcccaaacagatcgaaccaaacagcccgggtacctgagccgctaggcacatttccatcgtcgcggagatgtccgtcgaatcgatcagtagcgtcagacaaaagctcctccgtcgtagcaacagcagtagagagcatgtgccaaagcgagtcgatattagtgtgtcgagcatcatcctgatcggtatgataacgagctcttggttcaaagaaagcgacatccaaaccgcgcaggcccaagataccttccaggacgatgtaatccgtctggctgccaatcaaacccttttcgaacccgttggcactcaacactgagccgaatgggtgctgtgatttcgcatacgcctgggtgacctccgtatccgagctgcggaataatgtagcacgccctccagcacccgcaccttccaggttcaggaatgtgtgtgcaaatagcgccatcggatgctgactgtacgcgcgtgcgccgttcagatagtcctcctcgccattgttgaaaagaaccaccaacccgcggcgcggcgcatggcccggcgtcaggaagtatttcaccagctgcaggcacgttacgacaccaactccatcgtctgtcgctccgtacccggtcgaaacgctatcgtagtgcgcgttgacaagtactcctcccttgccaacgggcactcgtccgggagtctcccaccaattctgcttactatcttccgagccgcgaatgtagaccaagatattggtgccttcaaagtaaacaccgacgcttttatcgatgaaagtcaggttagataccagatcgtcgaaaacaaaaacatcgggcttctcttccttcgcgtcgcggtattcctcggtggatgcggcggactgcttgatcgcgtcgatgcgttcgagcaaccacgagcggaccacgtcattctggtgcgaattgtaggggtgaaagcctgttgtcaggctttggagatcttgccatgcctctgtgaggttaaggccgttggggcttgtttggggcgcgggcgggacaatgtggtggatcaccagcaatgggataatcaaggcgaggtatacgaccgtggtgatgattgttactggccacggcgtaaatgccagaggatttctggccttctgggtagccataccctgtgctgttcaagctaagaatgaatgggtggtggaggttgaagttggagtcgaatttaaggcaaatgcgggggtggtaccgtcattactttacataactagctcatacatccgtttatgtacatgtgcagatcggctgcacaagtcgtgctactaacaacaactgcagtcattgatctgggaaatgagtgaaagaaagagatttggctaaattctatgcgattacacattgacgaaaaaataacccaagtccgtaaccgctagcgtactaatgcatttcccgcaataacacagaatgaaggataaggtgatctttactcatatgggtagagatatgtctgcctgtttgatctagctaaagatcatggatgaaagaagacagggaattgaataaaaggaagaaatgaaatgcgagagcctagggcctgggcttattttcgactgcaaagaaaggggtatcgtatcaagtattcaaagtcccaacgtcgatataatcatcatctccgtcgttgataacggttgcgttcatcagcccagtcatttggccttcatcttcatccagttcttcgtcgtcatcgtacatcgtggcttcggcttcttcttgatattgtggttcactttggttcaggtaatcccggagtcgattgacaccatcaccgctgaacacacagaagacgtcccgttgttgttgcgtgaactctgggggggcttctcggcagaatgcagtgaggttttctcgcaagaactcttggacgccggtcaaactcaaatgggtcaggcgtgggcagctattcagcaaagcgtgaataccctaagccgtaatgtcagtattgcatatcgtgtacatcaggaccttcgatcaagacttaccttcattctcaactgaacgcaataacttagatgaacacgctctaaactactgacagaaggatgatggcccatcttgggccgtgccaacgctaaaatactctgatcagtgatagcctgacatttgacgagcccgattcttcggagcttcggcaaggttgccaattgctgcacactaaggtctgtgaggaggttacagcaggccaggtcgatgtatcgaatgcggttgcaagacttgaccaggtttatcacggccgagtcggagatgtttgaacagtggcccaggtgcacatagtgaaggttctttcctagcctgcagatagccatcacagatcgatctgtgataaatcggcatttggccagtacgagattccgcaaacgaggagctgcacgcacgatccgctcaaccgagtcatccctgacattctcgcaagcggtgagatcgaggatgcgaagactgtcaaaggtcatttgcggaggtagcgacatgaacgcactgtcgtcgatttcggtgcattgtgcaagccgcagttctcggagataccggagtgttgtgagcaacggggtcactgataagctagtgacaagtttgcaatcatgcaagtcaatttccagtatagacgggcagttctcggcaaaggactgaattgcccgatctgatacattagaaaccccgttgagtttcaactattacaattagcgtttgcagtccaacaagatcccacatataatcatacccttttgatttgacgacacttttgcgatacaacaagcaaagcgtcgtcggtgacttttgaacatcccgtgatgttcaggccttgcagacggggacagtctctggaaaccgtggcgagcgtgtggtctgtaaggtgtcgcaattctgaaacatccagcgcctgcaaatgtcggttcccttccaccaagtccgacacacccttatccgtcaagttcttgcagcttgtcaacgtcagccgctcaatgcgcttgcactgattgaaagagacgatagttccatcgctaacatcatcggacagagcagacagattcagtctcttgataaggtctgcgtagttgaaaagactgtccggttttcccaacgacgtagttacgcttctcacattgctccaggtgttacaagtcggtcggtgccacagtatccctacagagtttgcagcccatccgcgacacaccagcatggaattgagcatatctaagggcgcaaccaatttcgagaaaatcgcgatcagaatctcgggtgggaggcgaccgatcggcggcagtggctgggatgtttcacttgacaaacgagaatcgcggaaattggcgacaccgatggaggattgcgagtcgttggcctgggccatgaagaaatcggtgtcatcatcggcgacacgttcgggtgacgtcgatccagacgtttcggaaggggctgcactcgagcaccgaccgtcttctcgtagtcgatgcatcttagtcggcgtagattcgctttttgaggttcgcttcaatatgttttttgggtgtcggtaaggttgaaatctcataactcagggaactttgcatggacagtgcatgtgagactggaactggcaagtccggtccacagatgcagccagtctttgttcagtcaacggtcctaagactttgttttgtctgaagactggtagatgaatgtaattttcgggaaatatctgcagtaaggtgggtgcacgagggatgtaagcgtggtttcgcggcgcgtatttggatggcaaggggaggtggacaagtgcagatcgttcagaataaagttgaggcaagctagatcatggccccatgcaccccttgggtaagatgcaaatgcgtaaccaggaaaatcaatgcaagtaaatgtgaagggataaaagcggcgatggaggggggatgaggcaatggggccgggtttcacagtgctgtggagtcagtgccaagcactgcttatcgctcgataagatgggagatggggtctgaagttagtatagccagcccttttggttatggaacttgcatgtagactctttataaggattcgaatggcttattgaaccagttaatattagaagtattcaaggtcgcttgatgtgaccccgtgcttgatctacgatcggtttactcaatgcgggaataccggacatctgacctcattaggatgtagaggaagccctactttctttcagaacttttccgacatgtattcaaagtgatctaataatctacttataaatatatccatctcagtagtaatcttcgtctaagcttctctcgcacccttcacccagtcacgcaagacgttcttccggattttgccagtactggtcttaggtagttcagggaccacttccacttctcgaggaatcatgaacttgctgattccgctactatttcgagcccattcaatcaactctgagcctttcatgtgcttgccttcctttactgtaacaaaggctttaggtcgttcgccccagtgggagtcaggaacagaaacaaccccagcctccaaaatgtcaggatgcatgactagcatagactcaagtgcaacggaggagatgttttcgccgcctacgcattgttagcaatctagtttcatggcagttgtccgctcgccacacataccactaatgatgatatccttcgcacgatcgaggatctgaattgcaccatcgggatgccagacagccaagtctccggagtgcaaaacacctcctgcgaataatttccgagttgcctcggagtccttgtagtaccctcgggcacagatatttccaacaaaaacaatctcgccaatttccttgccatccttgcgaacatcaatgatggtcccttcgggcacttcggtcttaatgacccggcctggaaggcttgtaatgaagccgtggccttggcgggccatcttctggtatttctccttaagagcaagctcgttccattctggcaaatggtagcccttggtgattgggccgtatgtctccgtcattccataaacatgtaccggatgtaagttaaggtcggtcatttgttcgaagagaagaggtgtaggtgggcttgctgccaccgtgacgtggacaggctcgggcagtttctctgcttctttcgcgttgcaaagcaaagtgttcacagtcggtgcagcattgaaatgggtgatacgctcctctttcagcaacctccagatttcagggtagtctatcttgcgtaggcaataatgggttcctcgaacggccgtcaccgcccatgggaacgtccagcctatatgtataaataaaatgttagttatttagatccatttcgttactcaaatgaagatgatccacgaacccatagcatgaaacatgggtagcgtccatagataacgggcacgtccatcgtggtagttcagaccagtttcaatgatgtttgccattgtacccagataacagcctcgatgagtgaactcaacacccttgggacgggctgtagtcccactagtatacgccaacgcaattgtcgaatcttcatcggcagcttgactctcgagtccttcccagccatgagaacctgtatcgatatcgtgcctgaggccttccaaaacagcttcatcgaagggacctgtcagctcaccctctgttacatcggtgtcggtatcgatgataatatggatgtgagggtattgggatcgataatgctctagaagtggaacaaattcctcgtccacgatgatcacttccgcatcaccatgatcaaatatataagcaatgtcttcttgtttcagacgatagttgacagctataaatgtgttagtttgattgatctctctccccaaaagctaacaactagcttaccgatgttaacagcgccggctgcggcaattccgaaaatcgactcaaggaatgcgggagtattcgggcacagtatccccactctcttgaatccatgtttcttgaggtagtatgccataccccttgctcggtctgcagcctcgccatagctcctgcgaaggatcttattgttggcggttacatggtagatcgcctcagcctgtgcaactctttgttagattgaagtactacctatgtaccatctgaaaagtgcttacattaggttcaatggcagcagcccgaggaagaaagaaagtcggagatagcgtgtgggtattcacacggtgttcaatcgggggcgttgaacctgtgaaatggccaagcaggccagacaggcgagactttgagccagacatactacaccgtgagtgtagatttatggaaaaggggttgttaaacagaagagctatgtgtgatatcgacgaatgaagaggtaatgattggaattatacggggaacatcgtagagtcgggaaatgaaataccccaggaattccccaagttggggaaaatgcggggataccgctctaacctaggctatgcgcggggttattcgggtatcagcggcttggaaatggtttgatctacgttgtaccctcggcttcaatgaattacatattatggattggtctgtcggttgtggttgtgtggggacaagaccggcggtacggatccggagggaatcatccttaattttgggtggattacgttaattcatcttactcaggtatcactggtcagttagataatggatatatttaggacatgcggggatacacgtagggaagaggtgtgcatgctatactatgaatggtataaaaagtggtacgttacaggctatgaagtatatatataaaaaaaggataggtcaaagtattttttgatcataagaatcatgttgaactcttgaaaattgtttctttggattaaaccgccacggcgcgagtcaacggccagctattttgaacctttaatcccaatcgactccgtttttttcgacttttgaaaacttcgaagaccccagtccccgagccgtcatgtccgtcacagacagtggtattcatgagttagggaactgggctgcagaacaaggtcggccggcttgccgttcgaattcgctgaaagaaaaccgtccgcgattccatcccagaaccatcgctcgacacaacaaccagccgcgctaaaggtatctagtagccatactgagcaagctgggtcttggtcttgctgtccacattcgcaccctgctcggccttggcaaggacacgacgagcggccttcttgcgctcgtagtaagccttgctcttgacctttcggcgctcctcgagtctgtagaaatgttagaatttgtcgcttgacataaatcaccttcaattgataaatctgagattgtacatacctggaaacaacatcctggtacttccagccaacctcgtggctgagacggccaacggtgcagtacttgcggccgggacggagacgcaggacacggagggcctggggaacaacgacacgcttcttcttgtcgtaaggagggggaacaccctcgaagaccttaaggcgctccagagcggcggcaccacgggcggtcttgtggggcatcataccgcggatggccttgtagaggatacgggaaggagcgcggaagtggaagggaccaccacgggtggggttgaaacgagtcatcttgcgaaggtaggcgtggtacttgactgtagggcggaatttcgagtcagctctctgatatccaacttgcagtacatttcctctgaaagtaggcccaaaactgccatccaaaaactgccagtagtttcgatatgcgggtgttttccgtcgtgtcttccctccacactgattcacacagtccccaaatcacatagaacgcaaaggaaatattcgagaaggggttgaacgtacgcttcgcgcggaagaactcgccggagatgttgagggcctcacatctcacgacgacgatcttctgaccgttgagcagctgcttggcgacagtgctggccagacgaccgaggaggtgtcctttgccgtcgatgacgacctatttccaaacaattcaagtcagcgatagattcgatatgcacactttgcaggcgagagtggcggcactcaagtcgttgggtataaacgtaccactgattcaaaggaggacatcctggtgatcttatgtcccgtgggatggatgttgtcggcggttgttgtcgtgggtgtcaagtcgacgcacacaacgaagtcggatggctcgatgagaatgggctaagcgagggtccgctcactttgtgttaatggcgagggtcgcagccctaagcctgaccaatcatagaccgtaaaggtcacgtggtttgtctctcctgggtccgctcggcatcgtattacgtaatacttttatttctcactgtgcgccatcatggtgctcttttctttgtgccgttagggcattggcttagggctgatataccctgttcttgaaggttgctgtagatcaaatgataatcttcaagttgtaaggggggttggaggctttggtataattccaatattcggtgagattgttcacgttatactaatagacaacccgtggactatcaatcatctttgccttccacgtaaacctgtctgtgaagtagtatgtcttatcgtcttctcaattgtccgatctaatgatctagccaacttcaggtgggaacgttgggtccgatgactaagatatccatgaactcgtccacggacagatctcggccattgtttttcttttccccgaaagatctttcttctcacagaaataaccaaggccaacgagacttccactgggcctcatgttacactaatcttattcgcttacgattccatcccacactccaacttgattttacgatctgaggcaagggttctttctatactcgggtcatgcgacaaaagacgcgttttgtctgtgtctctgacacacacggatatacgccgtccgaagcgggcttcaagctaccagcaggggatgtcctgattcatgccggcgacttgacaaacaatggaagcctgaaagaactccgcaagacaatagattggatcagcaaggccgactttgaaatcaaaatcatagttggtggtcagtcatttaacttgttgtactggatataacccggcccttaatggcagtcatatcctcgctgctcgccaaattgcgtcattcattagcagggaaaggtcgattcagagcccctaacattttgaccaggcaaccacgatgtcaccttggacccggaattctacagagaacatggaaaaagattccatggccagcacctcgaagattcacaacactgcctcaaactcatcacggagtcgccttcggtcactctacttcgccatgagcccgctctgattcgtttaacgcgagcaggcggaccaaacacggtcttcaaaatctttgggtccccatactcccaatcccaaggaaattgggcattcggatacgaatcaaggaatgctgctgcgctgtggggtcagatgccaatcgatgcggatatcgtcgtcacgcatacgccaccacgatctcactgcgaccaaaagccgaatggaatgttcgtagggtgtgttgcgcttcgtagtgcattaagcctcatcaggccgcacttagctgtttgtggccatgtacatgaaggacgaggatacgaacgagttcgctggcgaggcaagcttactaacacagggacagagagagagacagagacagaaacacagctagaatctgattcagttgaccaagtcactcggggaattctgccacccatgggcagcaacaaacaaagcctagttgatttgactggcaaacgggatcaacgaatagacaacgaggggttttcgtatcccgggcaaagacagcatgatctagcagagactcaacccgtgtcatcagcatcaccagggtcagagtcatctgctagtattcttgaaatggcaggtccacggaactcgccgagcgctcatccgtccctgggtacgggtagccatggccccagtaaacgtggtttcgattacggcttgcaaacactaagaaaggagacctgcattgtcaacgccgctgtcgtgtccactagctggccgcaccagggaggcaaacggttcaattcgccgattgtagtcgatcttgaacttcccgtgtggcagggagaccacgcggtcgcgaataggtgaattgtttttccatagaatgaagcaaatttcggaaattacaattcagtcggccccatcgatcgtaacggcaatcttccctttgctttggccgtgcatggtggcttgacgccattctccctgatacatacagcaaccttgtgggctttggccctattgacaccggtagtcggacgccttgatgcatcatggttttaacattggtcggctagtgacttgatgcacgatgctaactgactagtgctgtcagattgtctccgcttacatcatttattaatttacgcgcattagcctcggtcaaagcaactcgaggataatctatactacgtactctataccgtagggatacctgtaacatattctaatattcgctaatttgatagaaataagaaaagaagaaatcaccgcaattcgctctcctctctaactacacaaacaccagacttgcctatgttgtaggtacccctcttgtctcgtgtataccccgcatgcaatggacaaacacatctgaccgatcgcaataacatcgagccatatgcacctgtgatatcacaactcgagttcttgattaacaccgtaagttcccaggtagtacgatatacacaagtcacctgcaacagagatctcctcaaactcaaaacttccagaaaccacagcgcttcgaaacgacttcttagtggccaactcccgggccgcaaagagcacagaaacatgagccgaccaatcaatagctcgacccgccctctccttgatacccgatgtgaccatgcgcggccgatcatgtattatcaatcaccggaggttgcctaagtgggagtctgtgtttgtgaccggttcttcagcagggatttgggactgggacagcgctcacactccaccctcgtgggaaacacatgcttctcgcaagggctgctgtttaggctggcgcattcttttccagaaggcgttgaatggctggacggagaggcctggccatatttttattctgtaccccctacgcaccatgtaatagccgagagtattattgcatgagaaggtagtactagacatcattattgcaggcgacttgcattgcatctgcattttcctgtttcccgggtacaagcctccaaccgtttcgagccaatggtgtataaagtgcattttagtacgtagtttgcatatctcgtacgttgtatgttgtatggctccgactgttcggtgcgattatcctgacgaaactacaaacacaccattaatccactgccaacgcccaatcgtggactcaccgacttcggtcctagtggggttgcgtgactgtcagggaggggtatctgtagatcacggtttaagcgtataaggttactaccctgtgtttcagagggaggcattgtgtgacctcgcgagcacaactgatgggatcggaggattatgggttcggctggtgcagtccggttggaaagagtgagagtccgtggtctagtcctggggatcgaccaaccccagaccgaggcaaggtatgctacaatcactatcacacaggaaactgtcaaatgacagagtcaggcagataagaataggagatacggagtatacaggtacaatattgaggcggaaatttgaggcggaaatttgaatggtgggtccttaggacaccttaatactaaatagaaaggtacaacatacatggcattcttagcaaaatgaagactatttaggcaatatagtcatagtaatatggcgtaactaccgagtacggaatatagagtagtaagataatgacatggtggtaatgctgacacggtgttcggtatttgcatttccaactttgtcacgatccgggctggcacatcagctccgttcaggctgtcagcaccggtctggaaaatgaatgcgctgcaaaaaccgcagtcccgggtctagatgatttggaaccaatggatgggccggaccgtccgagacaggggagtacgacgtagtttcatcgagtgtactgtaattgtctcatagtctagaaagtcagagtaatggttggaagatagggcccgaggtctcgggtgggggttcaacgacacgttgtctagttagtcaatgggcccgttgcgggacaagtgccagctgtgccagctgtaccagctgttttagcttaggggagattattgagattattgggtgcgaatgcctgaagagtccgttactgatgtaagatctagagatccccggtaataccgagggctgcattctgatataaggtgagaatcaaatatataccacatacagcatacatagttatatgaaacaatatctcactatatatagaaacaggcacattcttcagcgatggaacgcttcgggaaggtgggcattacaagtcaggcactgatttcgttacttatatctatggagtacagatacaacagtcaccacccaatcacacgtttcaggttaaacaagagagttagatatgactggctgaggtcgacaggctcaagacaaggcggaaaaagtttaaacagaaccaactcaagccggataaagcgaaagcagtgaggcgaccgaagctaaactggctaaaaacccgcaggcactagttggacgaaagtcggggatatgcaggagagactgaatcgagaagaagaagggattagcggcatgacgagttccaagagaaggcagacccgattcctatggaatcgagggatcatgtccctcgtgttatgtacttcatcgccccacgcagcaagccaaggtgctggtgaggcgttgattggtaggaatgcgagcaaatcggacgaagtgctcagaccaagtgaatgtcagtggggaagagaatgatttttttgtgattagatgattattctgacgagtagagggaattaggatattaggttgggcatccttgtctctgaacctcttttcgatgtctatgtgattctttataccgcgatattacatctcgaaataccgaccttctctttgtggcgcagtcactttcgcccctggcatatatcggttggctgggagcgagaacggacggcaacactgcggattttcattgtccaatttgtatggcaaatcgcccatccttttcacaattctcttcaattcctcctgcattgcaaatcatatccagtccattctggatcggtgtggaatttttgctacgtcaacgtcaggttgttgacattccatatcgcccaccgcctcttttctccccctctcccctcacctttttatctcctctcatcccattcaatctaaggcattgaaagcataccttgcccacaatgtcctcacccccagatatagacccatatgccgtgcttggtgtcgccaaggaagccaccatccctgaaatcagggccgctcaccgaaagcgggttctcaagtgccatccggacaagatccaagatgagtcgcagcgcattgctgcccaagatgaattccagaaagtccagcaagcctacgaactactctcggacgatgtccgacgcactaaacatgaccagaaggtcaagatagccgagctgaagcgggaactgttggaacgcagacgagcagacctgatgcacaactcctcgcggggaggtggatccgccaatcgcgaattccgcaatggtcacgtcgtggaggagagggccccaatggaatgcttcttcgaggaggcaatgcgattcacggacgatccacgacccatgtctcgcaaatttgaagagttcggcgtgcgcccaaagacgaagccgacagaagagaagaagaggactcgaacaccgatcaacatgtttcaccaagcgaaagaaatgcgggagacggtcaaagcgacacattccgaccgtgcgaagatgcgcgatcaggagcgacgacgacagaccgaggcaaagaagcatggcatctttgaagcctttgcaggatcggacgaggagacgtctgattctagcgctccccattacgttcacacgagacgtacttcaacaacgcgccgtgaacgcgaatcgcgacctcgaccatcggactcctctcgtcgtcgtggacgccactacgacgaggatggcaatgtctccgatcacttgcaatccaagatcgatagtcagtactatactgcggaggactacatcgcaagcaaagcccggggttcaaagtccccacgacagtaccatggtcacgacccggcggaaccagagtctgcttcgcgacccgcgggacggtccacccgcacccgccgtcattcttcgtcgcgcgagaattcctacgagcatttggattcgccacgaaactacgatggcaagccacccaagatgcaacactccgcgacttccccggggatcaagacgtctctccgtcctgcgttcctcaacactcggtccgcaaccacctctggcttcacccgcgcaaagcgggacagtcgcgactccacactatacgaaatggcccacgagccactgccatcgcggggttccaaagtgcgcgatcgcaacgactcgggctattccagtcccactactcccgaaatgctcccgagaggcgtttcccccaagacctccacccgctacaagatcgtcaaggaaccagaccacgtcgtcgtagaaccgaaatcatcaaagtaccgctcagcagcgagatcccccgaccgggatcgtgtaccccctacccgacaggtgcccaagcgaagcagtacctaccagaactacacttcggaaacctcgcctcggcttgagactcggtcttcgcggcctgcttctcgtccccatgcggacgtcgaatacatttctcgcccgaaagagaaggacatcaagtactcccggacatacagtcaagatgatgtcagttactcgccgagacgcgccccttactacgacgaggaatatcgtcctcctgccgtggggagacatcagtctgcctattaattcaaccatacgacccatgaaacatggacacatacgacaaatcacagctacaatatgctttacattttatttttaaacttttatctattatttcaatcttatcagcaagtcgcggcgtttccaattctccgcttttcgcatgtgtcggctgttccaccgaacatttgggagtacttagatttccattcgggctggtctggctgtccccgcgcagtcggagcaagagggcaggaccggggtatatctttgtcactgcccttggcgcattagggcgggcataggtggatggtgtgttgcatctgtcttgcctcaaaccctgcacttatggcgttatgaaattgtcttattgggttttacctacttctgactgcattctgcctgcattctgcttgctcccgttctcgtgttctttttccgcgatcttctcttctctatttttttatatatatacgttgtcgctcccgggcttcagatcccccgtggactaccaattggagaaatccaattcacgaattacgcttgttcacatgatatgatatgccataaccttgatcctttgttggtctctttgttttctctattcttgtcccgagtaagacggatatgttgggctgggctgggctgggctgggactggggccacagaaagtggcggggtaagcctcacaccggtttgtgcatggtgattggatcttctaagaatagactgttgatgtatttaggcatacctgttcgatcagtgcaaccttggaaatgttgataagactgcaactgccgacctgtgttatactattgggggctgttcagccttgttgggccgtcaaggctcaatacgaatttgattgtcacttccgcccccttaggaaccaactcaatacaacaagattttattctacccatccctggtcgtctaaagtcaagaagctgatacgtttttataggacatatattacatatattattatccagcacgacttggttgacctagatggccagatgcgacctggaatccaagagatgctgtctaaatctatcgatgaagatggccaatatcaatggtgagatgtaatgaagacaaagtctttctttctagatatctcgtcagtcaggcacatgactcacacgatttctactctcgtttgtttgaactatatgcttgttttatctctcaattctctggaaaccgatagactggatttgaggcatattgatgtatttacttctgttagactctttttccatggcataaataagattgttataacacactttttggaatagaagactagcttgctccttaaggccaccaggccaccgcaagtaattgagcttgttgtgtttcagacttgttctacgtttcatatattcacttatttagatttggtaatgatgatagaagcctcctaggagacaatcggatattacatcgagcctagctctatacgttaatctagggtgtaaggtgatgagtatctgacttggcgagtcttttgagtgtgatgtgcacgaattggccgactacttcctgccagcttgaccatggtcctccatggattaataacaggccatgctatcaagacttagtgatgtatccccatagtcttgtgagttcgcgactcatctcactacttttatgattcgtttcaatgagaaccatgatggactccgacgctcaagaggtttagggaggcagattggctatggcccggttactccagttttggtactactgagcggtttcctctcatacatgctccattatcaaatgctgtcgagtagtccatatgcgagcacatacgtattggtgcgacgagtttctatagcatactggttgcgcacggaccaactgcaccactgtgggttcacgggtatctgcagatcccccgcgatttgggaaaggaggcctggggttctatcgcctacaactagttgtacttgatgcactcagtaccatctaacttctctatttcagactctctttgctccgtcgtacaatgcgccagaatttccattctctccaaatggttattcacggtccctcggttgatctgagtgttggaatttcctcaggagtggcgccgactcgcataacattcgtagggatgcccatccttggaagtactacttcgtacaggaggccacataaactgccgacttgtcttcttgaggcggtactaacaaatggtatacttcattacatggtaatatcaatataaaatcacaatgcggaaatgaagataatcgaacctatatacaagaatgggagacacctagtagtggtatccatattaagagcaagtcgccagggttctaagccttccttggccgaatttacttgccgtgtctaggcgcatgcgcaccaaatgtccgtcttaaacaaggacgtagaatgcacacatctaaaaatcacacagggttagaactaaatatactggggtgttgcatattcagagtgaagaagtagggcttaccatagacagacccaatatcattgagaaccagaataccgcattctaggaaggaagtcagtgaaaatcgcagaatattaaagcaatcatataacagcttacattgaggattgtccggccacggaaaaagcgagacttttgaatcgcaacaataggcagctgaagcatcatagccaggaaaccgtatccccgaagcttcttggtaatgcagctcataactagctcgtggaatacagagctgaccaaaaatgtgataaacatagccacgggttgagagaagttagatcgggcaggccagtagacatggcggaagaggaagtgatggacagggacgttccactcgcgggaaaattccatcctatgtagaagccggttagtcatatcactcagactcttaggagcgtaatttcaacttaccagtcacaggaattccaccagtctgcatagaagtggcgatcggcgaaccgagtcagctctgcaaatgcacccagcacatattcgaagatgacgaggaatactagcaagaagataatcatgaaggggaagaggagcatgctgatggtttcagcaaggatgagagccttgtctgtgacgctagagacggcacggagttgggcgctggccactgacaacacggggacgatgaattcctcgcttgtcagggtgagcaggaagatgcagccaaatacagcagcggccttccagccaatttctgaccagcgtcgctcctttcggcggggatactctagctcatagcaaagagtcggacaaaagaggaagtccacataatttccaacgtgcagattctgcgggtatgagatgttgcctagcggggaggtcaactccgtggccaggtcttcacgcagtctctccaatggctctgcggactggtcttcgttgggcttcttcattgacggccgacgtcggtgtacctctggataatggatggcagcagggggctcaggtgactttaggcctggcttatcgagcgaggcaaggcggcgctctgtctcgctgagatgtccattatagaaagcgtatgagtgcagtttcatcagaatggtcagagtgtgcagcgtgaagaacacctgtgcagtccaggtccatttcatcatgaagggccagctgtttttctcatgtcagcgctctgagctccagcgcaaaaaccagctactaactcactttatccataaaaccaaccaaagtgcttcgcacaagctctgtaagagcatacctccgcgcgaccatcgcagccactgaggaccacttcgccacagttggtgcataggcaggacgagccctgagcttatcaccatggccgcatcgctgagccccatcccccacacattggccgtcaagagactccaaacgcgcacctgcagggggaatccggtatccttgatattgcgcaagatgctggtcccgaccatgatggccaagccaatccaaaagagagtgaagaaccctcggaagttgtgatagtcgctatcgggatcaaaatgtgacacacgaggcacatagtctattgtataaaacaggccattgcgggcgcggacttgcttcctcgcggatgagatcgaatgcgctgacgggggagcatcttcggaaataggggttgagtggccactaatgtgacaaacagattagctatttagatccagtctggtgcaagttgagagcaaattaccttatatcctgaatcagcttgtccactggaagagggtgcgccacgtcggacttcccattcggctgtatcggcacggcgcgcggccgcagagctgcagactcatcctgtgagacggcgctagacatcctatatggacacaaatgcaggagcagggcgtttgcacatcgaaggcactgagatggaaacttaggaacagctatgattgtgggtcaggactcaggactgtttgagtttgtttggattcgaaaccaaaaacacgggccgctacgtcagactgcctttatatgagactatgtacgttattacatacatgtgagctaggcagaagtatttagatataaattgttgaattgttgacatgtttacatagaatctgtagtatctttactttgatacaagccagctatagtcttttctcttgggataagtatgcatttagatagctatactgtcctttagttatactccctactatgtacataactatgcatgtattgtaatttcaaaaatctgccacttatgtcatggttctgcctcaggtgtatattcaaaggcggtgtaactgattagtaccaaagagtcaggtgatccagggtaaccaagctagtccgtttacatactagtgctctatgccaagatgccaggtcgactgccatgaggaataataatacaacagtccagacctccagaccacggccttgatacttcttcatttcattggttttataagcgcggtgcttgcttcaccttcttgcgcctgactctgtcccttgtcgtccattgaatatctctcttcctcgccccgtcgggggtccctctcgccgccatgtcttcccgtaagtgctgcccgccgcccctcctctcccctgagatgcaggctgaccacccaattcaatatttctacagtcaagcaattcatccgtaatgtccgatcagcaaaaaccatcgccgatgaacgtgccgtcatccaaaaagaaagcgccgctattcgcgcctcgtttcgagaagagagtcatgactccagcatccggtaagcttcagcatctacctcaatcgagtactcgatcggcctctaacaattgataggaggaataatgtcgccaagctcttgtatctgtttactcttggagagcggactcacttcggccaaatcgagtgtctgaaactactcgcctcacaccgattcgctgacaagcggttggggtatctggggaccatgctgttgctagatgagaaccaagaagtgttgacacttgtgaccaattctttgaaaaagtaagtctccctgtagtacttgactgaccctgcgctaactaaatgcagtgaccttaaccactccaaccaatatatcgttggtctcgctctctgtaccctcggaaacattgcctcggttgaaatgtctcgtgatctgttccccgaagtcgaaagccttatgtcgaccgccaacccctatattcgacggaaagcagcgatctgtgccatgcggatatgtcgcaaggttccagacttgcacgagcacttcctcgagaaagctaagaacctgttgtcggaccggaaccatggcgttcttctctgtggactgacactagcgattgatctatgtgaagcggaagaagaggaagacgaggaaggaggaccagtcggcgtgatcgaaatgttccggccgctggctggaggactggttcgcgctttgaaggggctgactacttccgggtatgctcctgagcatgatgtgtccggtatcacagatcctttcctccaagtcaagatccttcgcttcttgcgtgtattgggtcggggagatgtggccaccagcgaattgatcaacgatattctggcccaggtggcctccaatacggattcctcgaagaacgttggcaactctattctatatgaggccgtgcttacgattctggatattgaagccgattctggtctgagagtgctaggcgtcaacatccttggcaaattcttggctaacaaggacaataacatccgttacgttgcgttgaacaccctgaataaggttgttgcaattgaaccaaatgcagtgcagagacatcgcaacacgatcttggaatgcctgcgtgatcctgatattagcattcgccggcgagcgctcgatctcagcttcatgttgatcaacgaagacaatgtgcgtgtgctagtgcgggaattgctggccttcctggaggtggccgacaacgaattcaagtccgtgatgaccacacagataggcatcgcggctgatcggttcgcacccaacaagcgctggcacatggacaccattttgcgggttcttaagctggctgggaattacgtcaaagaacagatcctgtcttcattcgtccgtctcattgcgactacccctgatctgcaaacctacgcggtacaaaagctctactcctcattgaaggaggacatctcacaagaaggtctcacgctggctgcgacatggaccattggtgaatatgccgatagcctactccagggtggtcagtacgaggaagaagaactggtcaaggaggttcgggagagtgatcttgtcgacctcttcaccaacattctcaacagcacctacgcctctcagattgctgtcgaatacatcattactgcagccatgaagcttactgtgcgcatgtcggatcccgctcaaattgaacgcattcgccgtttactttccagccggaccgcagacctaagtgtagaaattcaacagcgtgccgttgaatacaccaaccttttcggttacgatcaaatccgccgtggcgtgctcgagcgcatgcccgcgcctgagatccgcgaggaacaacgggtactaggtgctgcttccactactaagaaacgtcagagtaagcttctccgtgggaaatcgaccacaaaggtcgccaaacctgcagagcatgacctgctccttgacctggttggcggagacgctcctgtcacgagccctacctccaatggatcgaacaccgccgatctgctggcagacattcttggcggagactcgggcatgtcatctccctcgccggggcctgctggccaaaagaattccaacagcgccatcatggacctgtttggctccaacggtccttcgcctcaacccacacaacccgcatccgcctcgatggatctgctaggtgcaggaggcttgggtgcctctgcgccctcaccctccggctctcccgcgcctgtcactgcttcgacccctgcacacaccgcgctcaacaaggacggtctcgtccttaccttgcaggttcagcgaagcggtgccaacgcccagatcctggcccgcttccgcaacgatgccagcttcggccgattcactagcgtcggcttgcaggccgccgtgccaaagagccagcggttgcagctgagcgcaatcagcaaggctgatttagatgccggcgacgaaggcacacaacaaatgcgtgtgaccgctttgaacggggtatgtctagatctccttcctattctacattcttaagtctcgcactaaccgattatctccagggccttcctgccaaacttcgtctccgtcttcgtgtcacttctgctcgcgacggcggaaaccctgtcaccgaccaagtggactggtccgagccgtagatcaaatcggtggcagcgatgctaaaagtccatccgaacgaatgtttaattttcccatgaacagttaaatccacttctatacaccccggttatcgtgcaccttcttcgcttttgctatttatctagaattttgttttgccattgatttccttttctcctgtacttcgtttcactacttggagggagggaatgttcttattgtacatgcttcagatgaaagttttagcgtatgagaaagtgcagggtgtattcgcttcgagccgatatcctagcttactagtagtgtgttcctacatgtatgtacacatcagatactaatagatgttaaagtgcattgtgacacctataacgcagactaaatccaaaacatagaacgcaatggaatgaataggcgataaaagcaaggctctatgaccttcaaaagagaacccagatcaactgcagcctccgcatgagaagaaacaaaaatcaatatataatacccaggaaacaaacaatgaactccaccgcaggaaaccaaggaatgcaaagtcatatgatttatccaaaatccaaagcgtgagtccaatctataaggtagaaccggaatataccaagcaccagaatggtatataatatggagagcaggtctaagacaagtagccaagctaatcagatatgctcaatggggccttcgggaagtagcacctctccctctctccggtcaccgggcaaacaagccttgagcggaggacggacgatgtcattgaacatgaaagttccatagacaagaagcgcgaatccggcaacttggagccatttgaaggtctcccagccgagtccaagcgagacaatccagatgaagagtgtgcggcaggtgtcgattgtgctacgagaggtagcagacacagtgcgggtgacagacagaccgaagaagttgaagccactagaacgaacgttagaggggagggcggaaaaatggagttgagaagcaagatcaacacatacccgatactgatcatgataaacaagctggatatggcaacagcacggttattaagaacctcgtgcaatccctgcttgacatcaaagtagccatatcggccggcatcggtccgtccgacagcaagatacatgatcaccatgccaacgacagtaaccaaaaatccgaacacaccttcccaacccacaacatggatcggttccatggcgtaattctccaaaatccactcctccaacacaaattgtgtggctgtgaagatctgcgctgcggcaataagcagcacaccaatgatagcctggacagcctcgggggtccgagcaacgacacgcgcctgcataagaccatgcgagactgcattgctagcactcccatcctgagtgatatcgtggtctgaatctccactgaatagagctccggaaagacccacaatagccacacctagaacgacaatgaagagtgcactccactggtataagtggagcttgcggcgaaggaagaggacactgaacaggcctacaaatagaaccagggcaccccgggtcatctggtagatactggctgccacaaagagaagacccacgttcatgagggttgtgccggcgatatcgcagctagatggcgctgcaagaagtaggatcttccatccgcggagtgggatgcggctgtcatcttcgggtaggggcttggggtgtctgctatcgctgtcgagttcatcgactatgttgtcatcctcatgatcgatgccttcatcatcgccgtttatcgggtgatatccgccagttaggaggggtgaggggtcactggataggcgcggtgcgatgtattggcggtagaggaaggttaagccgacaactagccaacagcccatttcacccataaacattacggctctgcattaccgcctggtgtcagcattaatcgctagcgttgtaaggctgtatcatcggcacggggtggagcctacgtctgaatgactggctgctcgaacagctttcgctggctgggatctggggaatcgcagtttcgcacacattgcatatcctttttgagacgggccaatcaattagttcgtgtttctttgtagcttgaatcgaatcaaggacgcacctgatacttgttgagaatggtgttgcacaccccagtcacgagcatcatcgtgaccaggaggggaatgagggcatggttcgccatcttgtcccactaaaatagaactggttgatagaagttactccaagagttaggaagatggatgaagtgatcggagggtcagtgaggagacaaagcggaggtgagcttatctgagcttggtggctgatagcatttgtcacggtacccacaaggtactgtacccgccgacatgacttcatgtttggcttcatttggcacatacaatgtacgtatacatatgtagtacaacatgtccttgatattactctctagtgctacatagtatgtatagaatcctggttttccaaaaagaattatgaaattcaaaataaatgatccagttgagaacctctccaggttctttctccaaacgccatcgctgaggccaatggacaacacaaaaaagtccagaaatgattagaaccccaaaaggtcaatccctaaggatcacaagaaattaaccaagattcctgcgtggtagtgtacaaagcatcgctcctgagccatatatacgctagaaacgaattcgccgaaataaaatgtttcataaactcaagtccatcttcatgtaggacttagcactgtgtacatgctctcaattagacaagaaacatttcactttcttcaagtcatttggatgggaatgccttccctctcgtagcgcgcaacagcatcccagtcaacctcaagttggcccataggtccgatacccttgacctggatctcaggcgggatgcggatccactctgcggcccttgcaatggactcatcgtcccaaggttcataaaacttctccaggaaagcagcctcttcggcctcgtctgggggagtcagactagcaaaggcaacccagtcatcatccaccggagtagcttcattgatatcgaagtcctcgagcgagtcatagccaaggtgaggcagatccttgctcgcgaggttcgaaaaggtatcatggattgtatcaagtgaggtggggcactccgcccagggatcctttgtgtcgctatcatctagtttgataacatccttcttttcatctttgccagcaggctttgttcccttgacagtggacaactgcggagtgagcagctgagttgatgctgcagcaggagacgcagtcttggctccgaattggctagtgatcctagccatgggcgtgttgttggcaatgagaggggtagccatactttgttttaccggagaagctgctgcactaagcttggtggagggcggcactgatccgagcgtggctatctgctgggcttccgggctgtcgtcggggttcaacccaagacccatcgaaatactttcatggtaatatttgagataatcctcgatcatctcttcttcctcgggttgatggctttcttcgatgtgcttatccaagacggcttgcgtagggaatccttgatagtgatgttggcattcaaccacactgcatttgaaagcacctgccatggctgcagcattagatgtggcgtccgccaccgctttgttgtattttgccgctgcgccaggggctgcagttgcttgaatcggggacgatgccacgccatgagactgcttccgctttttggggggaggcagtttaaggttctcgggtgcaagtccacctggggcatactgagggacgcccctaggagatggggctgcaaaaggtgcagctggggcatttgcaacagactgggtagaggcgcgccgggctcgctgcagggcttcttcctgtgcctgcaactgctgcaggttggtcgcgttcagtgctggcatgttgccttgcattgcctgggcgttggaggtaggaggttgggaggcgttaggacgctgaccctgttgttgcatgcgagaaatcatcactgcgaacaactttcgcataaaaaggacagcaccagtgaggtaatcgggagtcactgtaaaatggtcatttacaacccaatcctgcgagggcttgaactgcctcatcaattggatacgctaagtaaaatcagattagtaaacaaacgatcatgatatcaagggggagcttaccatagcgaggaggttcttaacattcttctcctggccatgcatctttgcaaaccattgtacaagggcatctaagcggccgagaacatccaaggcttcacgcagttgtttagtcatggcggccttctgttcgggcgagacgggtataggtttcgcgggtggagcgttcttggcgatgtcattataaacctccataacttgggccggtaggttcctgttccatgcctcgtcggcggcagctctgctgagtacctggccccggctttgagactgttgcctccgcatgtgtgcctcaacctgagctcgctgttgaggagtcatttgtgcaagatgttcctgtgtgaaagggagacctggccgttggggggtcgtgcctggagcgcctggaactgccacaggctggctcatctggggcgtagctgtagctcgagcttctgccggatcatctgcgttgggtctcttctttgaggcttgcttcccggtagcacccttggcacctttagccgcggctgcagtttgagtctttgcgttcgccgcttgaggggtcgtttgcggcggttgaggatgctgtggcttgatttgggggacaggctgtactgcagggaccggaggttgagtgaccgccggttgatttagctgacctgggtgcgcgtttccatcaagttgcattgctctgttctgtgcagcctgcatcatctgcttttggcggtttcggtacagaatctcccgaatctgctcatcagtaaaggttgacgcctggggtccaagcttttgacgagccattgaaatgtcttgcgcggagattggccgcatggctgccatattcatagcagcggcttgttgaccaggagggaagcctggcgcattagtaaacggagccggagtgccttggaatggagttggcgctggaccctggccattcctcacttgattcgcagaagctgagatcatttggccaagatgaagtttctggagcatcatgagacgcgggaggtcgttggggcttgcaatttgagggttcgaatttgcccattgcttgagttggccccatgatttaacattgttagggacttgcatcgaagtgccattcatgttcagaatagacggtgggaaagatatgcggtccatttgcttggcctgctcaggggtcatctccacgccattgttttgctgccgcagcagttggagcttataaacttcgttttggcgttgttgacgttgcagctgagtcatttgctggccttgaggtattcccgagttcatatcctgcggggcacccatcgagcctctcatcatggcgttgcccatctggttattcatcattgcttgggcttggcccggttgatgttgcggttgctggccggggttggctcgagccatattattgagagcggcacgacgttgctgcatgataatagcccgagcctgttcaggaggcatacgagcgagttgttcctggatgtggggcggaatattgggaggcatttggacctgaccttgcatcgcagcctgtccagcaacgccagccgggtgctggcccatgtttgcaggtcgggacggtggtcgggcttgcgggggcacctgtaccggagacatctgacccggggccatgggttgattcagcataggcatgacggggctttgtccattcagttgtggctgtgattggggggtcacttggccaccatgacccgacatcgccatctgcgccttctgcgccgcttgtgcgcgcgcttgagcctgagactgtgcctggaactgcattcgatcctggggagcattgggcccaccctgcatatgctgttgctgggcaaggaactgagcctgggcgtttggattattggcgttcattgtcggctggccattctggcccatctgctgtgggaacatgttgttgttattattcgggaatggggcctggttcatttgagaagagcttgcaggaacgactagctgaccagcctcctgtgagcgcaggccatctgcttgctgtccttggatgttttccacattgccaatgaagttcgggggttccatcgtctgaccgggatttcccggaaatgcggaattgcgttgaaggtttaacatgttttgaagcatctgtcgctggtgttgagaattcatcatgggatctcccatcatgttaccattcgcatccaccccgccatttggcccacgtccccccatttctaaacgagcgcgacgatggcgtctgatctggttgagagcctgagagcggaagaaataggtcattggctcaagattcttccgtgccagatattgccgctgctcgggtgtcatgtttgataggttcattttgatcttctccatatcttccgggctggttttattcaacatctcgtttgctagtcgagagacatggtcaaggtcttgggctgaaagggtgctgaggtcgtcgaccatgggaattccattgccagggcgctgttggggtcgctgctgctgttgttgttgctgctgctgctgttgttgctgctgctggtggagcatcgcctgcgactgctgttgctgtcgctgttgctgcattgctgcctgctggttctgcccattcatgcccattgccatctgctgttggccagaaaccggggatgcctgcatctgattcatgtgctgcggaaaagcgcctggaatttgattctgaccagcgcccgtctgggacatcattccactttggtaagcgaccgcagcctgtctctctcgtgtgttccttatgtgaagaagcttttccgtgcattccttctcatattcgatcttctcgttggctttggtgaatgcttttaattcgaaactcatggccgcctgggccgcttggtggagatcgatgcgaggttggatcaaacggagggaggtgatcctaattcatgcaacggttaggccagataagagtgaacgcgcgaagccagttttcacaggcagaaggtgcaacttacatttgataaacattggtcgcccgggtcttgattagaacctctgccttccatcctccgtacggtccctgattttgcaacatttgcgcaacataggtcatcatagcttgcacactgtcgttctttgggacctgcatgtttggattcattctcatcgcagtattcggggctggccggccaggccccgcgcccgggttggggaactctccgggattcatagcggacaccccatcaatggtggacgggcaatccgcgaagaggttccgtgaaggttagcattcgctggagtaccatgcgcaactgtgacgatatcgcaaggttagtgagaagacgcaagtacggtgttcaacacgggtcgctgatcagcgggagaaaaaaaaggtaggtgctggtgtggaaccgtgattcgagtcgatcagggagggtggggatgggtggaaaatgaacgaaacggaggacaggagggactggagggaaccaacaccaacgtaatgaggagagcaaggcttccgggcaccagcgtcagatggattcaattcgctggccagcacctgattgtggcttggagcgaatgatagcagtttgtaggggagatgggatccgtgacagggatcatacagctttcaagtcgcaccgggcctcagttgctgtcctcactacacaatggcaagaagattcggggggagagaaagaacacaagtacttaccgagaatcagaatgccactaggacaaagagatgagtgcacagatcttaaagctagagggggggcaaagagtgaagtggcggtcgagtgaaggatattattctggtatggttattcagcgtattattcgcaaatgaatgagaagtgacgagaaggaaataaaggaaggactatgttttattcggccatcatcccattgagggtttgggcttacaacataagatgaagaataatagaactgactggggcgtgtatcaataggccggtatcttattcgtattgggcggagagtcacaaggctggctcggaggtacttgcagtttgcctgggtgtgcactgttgacccaggtatcccgaaaatacagtgtggttttttacctgtactgcaaatacatcactgccaatcctgatgatccaggccgttaagtacctgaaggctcaaaacaagtcgtcatcatggtgtggatcttaaataatgcccgatattgtacccatcatagataattacggggtatatgagggtgcataaaataaccccgtggatgtatatgctgtagacgaaaatgagaattcctctttattcaattaattattcacaaagctctttgcccaaggaaaataactagggaacagtttccatcaggatcgacaagggcgttctggccctgacctgatccggacgaaccaattggtcaaaatccagaaacaacaggaggctgtggctgggtaccaggtactccactatacacttgagcacacgaccaaagcaaagtcttcagtactacccggggacggtgacactgttagtcagagcttaagtcagccactctcctggccccgaaacgtcgaccccccatggcctgttctatatatacacttctgcctttcaccaacttacattcagtcgcctctttcatctgcgccctagatatctcgccatgaaaaacgactgaaacttgcttgtttttctcttatcggctttcgctgtttcttcagcatgtttcccttatctgtgtcgcccatctcggtgggttcgaacgtctttttcgcatttgccctcttcctcatctccgcacttgtgttacttctcctgcgacggtttctcaccctccgggccacccccgcgtatttaattgtccctatattcctagctctagctctgccagctagtgttgtgcttttggtccccatcgatttagcatccagttcgcgggatggatccggtcccaaagcaatctggctaccggaacgaatggttttggtctgctggcgcattgcctactggttaatctttgttctcacctggtaagtgtactgcgctcttcataaccaatggctgtcactcattcttatctctcttccagggttatcctcccattactcggtgaatatgtcgactcgggctaccgtgaaccgaaaggccggcttatgtactctctccgatcgaacgccaaataccagatgattgttctgggatgtgctctggtagggttgatctacgtttcaatctcgaatggcttcgaattcacatccatcaaaggtctcgtcatggcattggcatatgtgtggggtctcgtccttgccatttacctcatgggtcatgggcttgtttcgatcccgcgcaatctgctccgaaactccaatgtaagcggtcggctacgcagactccaggcccatgcgcccaaggtgcacgatcgcctgatggactcggtcaatgagttagcgaatctcaatggccaggtttcgcaactacaacgccgtaagacgggaaccgctcgtgacttccaggaatggattgaagagcttcgggaaggccacggccaatccgacgtgcgcgccccgatcctcgagtcacccgatacatccgcaacgataccttctgtcatcacggaacgctatctggccgaccttacacggcggcttcagcgtgctcggcatatgaagacccgatttgtagacgagtgggatcggctagtccaattatcagccgatctgcaagccatcattaattctgcagcttcaaagaagctggaatttgcaccggctccacgtcggtcatcctgcatccctcgtgtgaaattcctcaccccgtatatgcggtaccagctgtattccaacgtcattccctcggttcggttggccttaggtgcattcttcgcagtggcatcagtctgcattgtttggtcggaaatgatcaagtctttggcgccccatctctctgccgtgagtttgaccgtggtgcctcactggaaggacaatccagttggctttggtggtcaactcactgcctctgcctggctattgtacatgtgttcggcggctctcgttggtgtcagtgatgtcaaggtatggggaaaccgcgcgcttgtccgtcgtaatacatatggtgagagtgcctgctggtacgccggtcttgtggctcggttgacagtaccaattgcgtacaacttcttgaccttcttgccaaaagagtttaggcgaacgactactttctaccaattccttggtaaactcatcaacctgacccccctcgggaaaggctttgatttcatcttcccaatcttcattctcctgcctatctgcgcaacaatgttcaacctgtacgggcgtatcaaaaacatcttcgggtgcggccttgcagaggacgatgatatccacgatgtcgaaaacaaccctgccgggtatggcatgggtggctggcgtgagggtcgcgacctcattgaacgggaattgaatggcttcggttctctggcggtatcctcccgtggtggtcgctcaacgtgggcgtcggatcgtgatgatgaaggttcccctgggtcatccagactgcggctcccggttgcagagggctcccaacctgcccagaggacagttgttgcgcctactattgtagaaggcgaggatgaggaagacgagggcttcttccagtcctttgcgcatcgtgtcaaaaacacatttgatactaccagcactcctcggtggttccagggtgagccattccgacttccgcgctggatgtcgggtgataacaatcccacagaagaagcttcggcactattcggaggtcgggacgtgcctggtcgtctgcgcctaggttgattacattccggtccttgggtctcgtcaactgctggacagtgtaatataccgtttacttgtacatagctcaattcgtttgtcttgcttggatacaccagttccaattgaacatttttatatacgaaaaaattatccatgattaaagaaggggtattgatgctaccacccgccccccttggataataccatttccctctgcctgaaatttcagtagcgccttcctcatttagctaagtacctctagtttatatggtaaaaagacatacattttaattagaaaagaatcgctgatttctatatgattcaatcccttgattaatgaggtatttgatagagcagttaacgataaagcagtatataaagcagttgatataagatataataggagtgacttgattttattagggatatatatataaactgtaggtacctgctgtctatgcggtatatacagtaaattgggaggcggtaaggagagcggtaggcagaagcaagtgtcgaagcaggtacttagctaaatgaggaaggcgctactgagatttcaggcagagggaaatggtattatccaaggggggcgggtggtaactagcatctataccctttatttagtgggtaaataaaattggtttaaaaaaaaatgccctcgtccaggatcgaactggagaccttcggatttcaatcttgttaccaagaatgtcacattgaaagtatatgagaccaacgtcataaccaaactagaccacgaaggctgtcggcgagttgtctgatagaccactggagccgattatggactgttcccaatttgatagcattatactctgaacataactaataagtgagctacgcttgggcttcaagtatataatctatcccttcgatttggtcgatttttgttgaatatctaataaataaagtatgcccgttgaatctcttcatgatacaaaaataaataccaagttgtatatagtgtaccagctacccgtaagcgaccactcggggtggtggcgcatacgtgttacccgactatctgctgtttgcatgtttgctagatatattgtttgctacacagtaaacgatatgttcgaggcttgcaatatttgcaaaaagtcggctatatcaacaggctgcttcccactttgcaacttgcttcttctctcttcatcttcgttatttcgtcgaatgtattgaacgtactcttactgcttgatcgacctggcacctcataaactactagtattctcggttaacctcacctaactagttagttattctgtatagtttacctcgctccgcttagcaaaattaagctggcattcggatgtccacatatagatatggtgggactacaatgtagtggtgcgatgtaagagggagagagttgtctattcctaaggggcagaatgcccgactatctagttatggagggttggtgcctgccgcaccgggctgatggtcaggtgaccaccatgtccaacaatatatctctctcagacattagaaacatccgtatgacattttcgagtctttaattgcctgcaacaagcatggtcggccacctgtgtgaccatcttacatatttctagtacctcatgtccctttcccctttctccttcctcctttcctgatactcccccaaaatataccataaacagttagttgaggttttaaatcagtacaccactgttcagggccctcgagcaaaaccaattactactgtttccgatcaaattatgatcaagttcggaatacctaggatctcaaatttgcggccgaccacattgtgccctgggtcagcgacagactcaagctgtcagtttctcaaggcctctacctggaatatctcccactacctgtgatagatgcagttatgtcaaagtccaagtccactaagagaatatagaatttgtcaaattcaacttgaattcttcaactatccagttatctcatattccacggtgcatctactctcctcgcaagtatactaccctaatacagttcttcccctcacaatggacgggctaaccttccaaggcaggtaggtattgtatatacctgggccctcgggtattagtgtattatcacatgcacctgagtaatattacttgtcctagagtactacatgtaggtttcaatcttttaaggctttttctccgagtcatgctttatcccaaaatttggaattgagccctggagttttgtttagctgaattaattgtactattacctgtcgttgccttgattgactgctggctatctcattgatggattattcacccacgagccttggagcagcgcgaaagtctttgtggagtcgcggttggttgcgctcgattcattgacttgcaaaacaacacattggacctacttgcgtttgatatatatgttgcttgtcatgagaacggcgtagcggtgccgcctcgtcttgtttatgtatgtacatattcatctcgtacaatacggcaaagctcatatcaatagtcccaccacaatgcgggggtccgttctgcggaataaagaaacatcagtatgtaaataattactctctaaggacttatgtcgaccaaaacttttaccgctttaggacgacatctagagttgctgattcttgccatcctccgggacccttgcagcccgtgaatccttctccctgcaattgcggcaaagtggtaataacaggagcttatggaccttgaatttcttggtgccatcttttccctctcttgttccacatggacatgtaatctcgtgacctagttttctcagaatattgacttctgcttgtgtttcctgtaggcgttgcaattgcgggtcacgaccacctggaaccctgtagcatggccggcaaatgttactcccctcagacctatgccaggtctttgagacacctggaaagccctccacagcatgacacttgacacaaacatacggcggccttttctgaagctttgcaagctcgtctggtgttggagcaagcttctcagggccgtttcgatcgttgccatatctgaccaggtaggcataacatccgccgcaccgtaagctaacctctttccagtacaagagtggcttgccatatttaaggcggttgatattctcggtcacaggacaattgccattttggcatcttccgacgttctgcacgagaaagtccttgtcctcttgtcgtttcttggcgccaagggatcgcagttcaccggtggcatattttgaagcccggcaagccctacacaagatcatctggtattcatctgaccatgtgtaatccggcgcatttgggttctgtggagtatgacaatgtccgcaatgtacttggactccagccttcttatcctcgagccgcttttgctgagcctgcgcgttggccacatactctagcttgggcaaattgtgtttggaatctcggtcgcggtaaccgtagcaataggagcagatgaaaccagcaaggggatcatcctcccgcagcaggaaacgccgagtcatcgtgattgggtgactttccatatgactcaaaacctgtcggcgaagaaccgtgttcttacaaggaaaattgctgcactccgatgcccgctgaagatttgttccagggattccctgtttgagggaccagcatgagtttaatcctttccatcccggagaatacaggactggatctcgaatcacctcagctagctcgaaggtggacagcgtgctacctgcgtaaacacgtccatgccactgaaaagtgtcgaagataatcataaacagcccttctgcaagctgagcattggcagcatcaacacctgagccgaaaacagcgagtagcacaaacctgctcagagccccaggaagacgcgctctatcatagtgtagatttcgaacgccactcctgatactcaattcatggccggttcggcgtactcccccatgaccagtgaatcccacataaccatcacatccaaactcttgatctggaaaatcgccaggaacaaggtggcagtaattcaccatgcgttcatcagcgtaacgcaacaaaggaagagaaagtaggtcttcaaccatccacttgtccttctcgaatagtgctttcacctctggcagtgtaaccgagaggacattagtcataagtgtacccacatcgtatcgtcgcagaccgagaaaaaaagtccaggtgataggcttttctttcttgaagcaggaaaaggacattctctgagcccagtccagcagaggctcaatgacggatctcagggcacgctcaaacttgtccccagaaggtaaaccgcacgggacacccatgactagatgagcagacaacgcttcatcttggccatgatcagacactggagccgtgccaatgtcagccagaacacaagcactatgttcctcagaccaatctgcatcaggatcctgcaatcggtcatattcgtcctcaatatcagaaagatcaaatactgtgacatagttagcgagaacaaacagcgtacttaataatagggtgtatctcttaccatatcgatcttcgacctgatcctcgaccacagaccatggattctcgtgatgtggcactgcatcaacgcgctttatattgcccgcgatcaatgggctacaacgttgatgatttttttgagcgttgtcagaagcgtgggtggtatgattagctgggtgatatctctttggggcccgaggtatgtcttccctattgccgtccccgtgattcttcctcttattgctgggcggctccattgcgtccggcaatcattcaattcaaacacagaaaagatcttatggggtatatattggcccagtgagatagaccttcagatattggtgaagtagaaaagcaagagtgtactatactagtgtccaaatatgaatggatggggcaaccttccaacaatggaagtacctcttccaaaccgtcacattaccaaacaagattaccatttcgttcttatctggctatgtacattgtatactagtagatataccttttggacttgtgatgatatgattgtatattatctatgaacctatgacctggaggaacccaacagctccgccggcctcggcacattttacttacatatagagagtttgcataactacgactacagacgattaaagtatattccaaataggacatattattataattcttatatcataagacaaccccagtgctaattgtcaaatattttagaaattcgatcattgtttacaagtgtcttactggctgctttcagttctggtatatagtactattgtggggtgcaaatttcacaatcggctcaagtggtctatcagacaactcgccgacagccttcgtggtctagtttggtcatgacgttggtctcatatactttcaatgtgacattcttggtaacaagattgaaatccgaaggtctccagttcgatcctggacgagggcattttttttgcctttcctatttagagacgcgggtcatatctatggatcagaccaattatttcgggtgtactccgttgtagggttacttgccaagaaccgggtaattgggctaagcgcccaagcgacgattagattatacttagttacccggttcttgctaagtaaccctaccccccccccccctggtnnnnnnnnnnnnnnnnnnnnnnnnnnnnnnnnnnnnnnnnnnnnnnnnnnnnnnnnnnnnnnnnnnnnnnnnnnnnnnnnnnnnnnnnnnnnnnnnnnnnnnnnnnnnnnnnnnnnnnnnnnnnnnnnnnnnnnnnnnnnnnnnnnnnnnnnnnnnnnnnnnnnnnnnnnnnnnnnnnnnnnnnnnnnnnnnnnnnnnnnnnnnnnnnnnnnnnnnnnnnnnnnnnnnnnnnnnnnnnnnnnnnnnnnnnnnnnnnnnnnnnnnnnnnnnnnnnnnnnnnnnnnnnnnnnnnnnnnnnnnnnnnnnnnnnnnnnnnnnnnnnnnnnnnnnnnnnnnnnnnnnnnnnnnnnnnnnnnnnnnnnnnnnnnnnnnnnnnnnnnnnnnnnnnnnnnnnnnnnnnnnnnnnnnnnnnnnnnnnnnnnnnnnnnnnnnnnnnnnnnnnnnnnnnnnnnnnnnnnnnnnnnnnnnnnnnnnnnnnnnnnnnnnnnnnnnnnnnnnnnnnnnnnnnnnnnnnnnnnnnnnnnnnnnnnnnnnnnnnnnnnnnnnnnnnnnnnnnnnnnnnnnnnnnnnnnnnnnnnnnnnnnnnnnnnnnnnnnnnnnnnnnnnnnnnnnnnnnnnnnnnnnnnnnnnnnnnnnnnnnnnnnnnnnnnnnnnnnnnnnnnnnnnnnnnnnnnnnnnnnnnnnnnnnnnnnnnnnnnnnnnnnnnnnnnnnnnnnnnnnnnnnnnnnnnnnnnnnnnnnnnnnnnnnnnnnnnnnnnnnnnnnnnnnnnnnnnnnnnnnnnnnnnnnnnnnnnnnnnnnnnnnnnnnnnnnnnnnnnnnnnnnnnnnnnnnnnnnnnnnnnnnnnnnnnnnnnnnnnnnnnnnnnnnnnnnnnnnnnnnnnnnnnnnnnnnnnnnnnnnnnnnnnnnnnnnnnnnnnnnnnnnnnnnnnnnnnnnnnnnnnnnnnnnnnnnnnnnnnnnnnnnnnnnnnnnnnnnnnnnnnnnnnnnnnnnnnnnnnnnnnnnnnnnnnnnnnnnnnnnnnnnnnnnnnnnnnnnnnnnnnnnnnnnnnnnnnnnnnnnnnnnnnnnnnnnnnnnnnnnnnnnnnnnnnnnnnnnnnnnnnnnnnnnnnnnnnnnnnnnnnnnnnnnnnnnnnnnnnnnnnnnnnnnnnnnnnnnnnnnnnnnnnnnnnnnnnnnnnnnnnnnnnnnnnnnnnnnnnnnnnnnnnnnnnnnnnnnnnnnnnnnnnnnnnnnnnnnnnnnnnnnnnnnnnnnnnnnnnnnnnnnnnnnnnnnnnnnnnnnnnnnnnnnnnnnnnnnnnnnnnnnnnnnnnnnnnnnnnnnnnnnnnnnnnnnnnnnnnnnnnnnnnnnnnnnnnnnnnnnnnnnnnnnnnnnnnnnnnnnnnnnnnnnnnnnnnnnnnnnnnnnnnnnnnnnnnnnnnnnnnnnngcgatcgaaacggccctgagaagcttgctccaacaccagacgagcttgcaaagcttcagaaaaggccgccgtatgtttgtgtcaagtgtcatgctgtggagggctttccaggtgtctcaaagacctggcataggtctgaggggagtaacatttgccggccatgctacagggttccaggtggtcgtgacccgcaattgcaacgcctacaggaaacacaagcagaagtcaatattctgagaaaactaggtcacgagattacatgtccatgtggaacaagagagggaaaagatggcaccaagaaattcaaggtccataagctcctgttattaccactttgccgcaattgcagggagaaggattcacgggctgcaagggtcccggaggatggcaagaatcagcaactctagatgtcgtcctaaagcggtaaaagttttggtcgacataagtccttagagagtaattatttacatactgatgtttctttattccgcagaacggacccccgcattgtggtgggactattgatatgagctttgccgtattgtacgagatgaatatgtacatacataaacaagacgaggcggcaccgctacgccgttctcatgacaagcaacatatatatcaaacgcaagtaggtccaatgtgttgttttgcaagtcaatgaatcgagcgcaaccaaccgcgactccacaaagactttcgcgctgctccaaggctcgtgggtgaataatccatcaatgagatagccagcagtcaatcaaggcaacgacaggtaatagtacaattaattcagctaaacaaaactccagggctcaattccaaattttgggataaagcatgactcggagaaaaagccttaaaagattgaaacctacatgtagtactctaggacaagtaatattactcaggtgcatgtgataatacactaatacccgagggcccaggtatatacaatacctacctgccttggaaggttagcccgtccattgtgaggggaagaactgtattagggtagtatacttgcgaggagagtagatgcaccgtggaatatgagataactggatagttgaagaattcaagttgaatttgacaaattctatattctcttagtggacttggactttgacataactgcatctatcacaggtagtgggagatattccaggtagaggccttgagaaactgacagcttgagtctgtcgctgacccagggcacaatgtggtcggccgcaaatttgagatcctaggtattccgaacttgatcataatttgatcggaaacagtagtaattggttttgctcgagggccctgaacagtggtgtactgatttaaaacctcaactaactgtttatggtatattttgggggagtatcaggaaaggaggaaggagaaaggggaaagggacatgaggtactagaaatatgtaagatggtcacacaggtggccgaccatgcttgttgcaggcaattaaagactcgaaaatgtcatacggatgtttctaatgtctgagagagatatattgttggacatggtggtcacctgaccatcagcccggtgcggcaggcaccaaccctccataactagatagtcgggcattctgccccttaggaatagacaactctctccctcttacatcgcaccactacattgtagtcccaccatatctatatgtggacatccgaatgccagcttaattttgctaagcggagcgaggtaaactatacagaataactaactagttaggtgaggttaaccgagaatactagtagtttatgaggtgccaggtcgatcaagcagtaagagtacgttcaatacattcgacgaaataacgaagatgaagagagaagaagcaagttgcaaagtgggaagcagcctgttgatatagccgactttttgcaaatattgcaagcctcgaacatatcgtttactgtgtagcaaacaatatatctagcaaacatgcaaacagcagatagtcgggtaacacgtatgcgccaccaccccgagtggtcgcttacgggtagctggtacactatatacaacttggtatttatttttgtatcatgaagagattcaacgggcatactttatttattagatattcaacaaaaatcgaccaaatcgaagggatagattatatacttgaagcccaagcgtagctcacttattagttatgttcagagtataatgctatcaaattgggaacagtccataatcggctccagtggtctatcagacaactcgccgacagccttcgtggtctagtttggttatgacgttggtctcatatactttcaatgtgacattcttggtaacaagattgaaatccgaaggtctccagttcgatcctggacgagggcattttttttttttcccacatcctaaccgagatggaattcctctaatgcctctcttctatactgtacaacccttggatttgtcgatttttagtatgtttgctagatgctaggcagttagtgatactcgggacctactatatattaaattgagggttgggagtgctactgtttaaatattgaattcttttgcatctgtaaaaatacttaattaaatacaacgctatttgtgagctaaaggaagcctgggtgatttttctacagcgtatgggatacacctatgaaaggtgcttcaaagtatatgtatacatctcgaccacctctcaatagcggtccgtatttcgtgcacatggcgcgactctagcatagggacctgttcctaggtgtacatagttgttaaacttcttagtctaacagctcttcaatctcacctacattcatcatacacctcggcatctctgtagacctctatcctcatggtacctactataccagcccattgatataaccttggttgtatccagcatgtatctcaagtcttttctctgtctctagacaccagcctacgcttcattccccacttgttgttgcatccataggcggatagtttaggataataccattcatactgagtggatatcttccacctggctctgcggactactaaaaattgagttgcttcttcactgaaatggcttgttgtaatagacaagtgtgttttcttctcgccactcttcgtagcctgtatcactatcttcccaatcaactcggaacatgtatagtcgtcaatatctaccaatccggtgcttaacaagcagcctcgagtcaaatacataggtattggccgtaaccagctacatgggtgaaattagaagactgtacgatgggtcaggccgcgacaagcagccgtgtggcaagaccaatggcccggttatcaaaaatatatacatttctcaaacgtggtttacactggcatattcttgatttattgattgaagaacatcgtaacgaacatatgcaggtggtattcagaatgcaccccggctgatgcagctggactcaaatggatggactcacatggtactgtcgaatatctacacttcaaatgggcgcctttgtcaacctttacatagtcccctaacttaacttcttccacagttgaccatcttctcgcatttcaccatgcacccagacgtctttgtagacctgttggtatgtcagatcctggttcttgggtatttgatacgccatatatttgttactgtagaccagagagagatagtaccggcttttatagtagctgccccattattcttcttcatcttcttcttcatcttcttcttcatcttcttcttcatcttcttcttcatcttcttctgcatcttcttcttcagcttcttcttcatcttcttcatcatctgcttcttcatcttcttcttcatcttcttcttcatcttcttcttcatcttcttcttctactctctctctctctctttatgtcaaatacgtagcttgtcatagcagggtgtcttggagacttgatcaaggacaacttaggtggttatcaggtgagtctaaatgacatatctactagtatataatgtaggtatagatgacatggtaaccattgtatggtactgtaacggttccggggaagcactttgaccttaaaaatgttgccctatctatatttggacactagtatacacttgctttcctacttcctaattcccgaaggtctgtctcactgggttagtatatacctaataagttaatttctgggtttgaattgaattgattaccgggcgtaatacggggagtgcaatggggaagacatatattgagcccccaggagatatcacccagctaatcacactccccacgcttttgacgatgtagacgactttttaatataaccgcagattttacctcgcttgttctctttctatatatagaaagatcttctatacgggttatgcttctaattgccttcgcagtctatacacatatggatatgatccctgttattcttcattattcttttggttttaatactacgagtagaacgatataccacctatgcagataaataggatcattgaagtgctacatcctcttcggggggagaagccagccagctactcttgttacttgtattacttgtcgtagacagaaagatcggtctgaacattatactcatttctcgctaacttctttattttgcagctaattcttcttgtcttctgggcacagtaccggtaatttcgctactccccgtgaaccagtaatagtaagtggcacccagtaaacgccatggatccaagccaattcttgtcggctccttgcaaggaggagtgccaggaggtgcttgttggagtttataagcgaaagcaagttccttgcgaattgtatccagatccgctgtgggattcacatttccacgtagtcacatagtgtaattgctgttttcaaacgaatgtcgatcccagtccttggggatggagctggcgattggggacctattgccttggttggttctggcataggttttgctcccctttctagttcttttcgacttatcttgctagtctgttagatgttgatttggggggcattcatttactcagtgctctatatctccacggataaacaaagccctttcgttaatccctgaagtatctgtatacctgcatgctcgtgtcactccatcactattgggtcctaaggatcgaacattctttggggtttgaattctttcttctatttcccctaccccggctctgccataatagctagggctgacgtctgttggtggttatcactgtttcgattcgtgatagggaaataacaagaaacggaaaatgaagagagggacatggccacataaatggccggccatgcttgttacgaacaaaaagagactcgaatgtgtaaatataggtgtttctaatgtccgatatatatacatgcggacatccgaatgccagccacaatacacactgtataaaattttatttttattttttttgatcatgaggaactttagggaaaatttatttgttaaatattcaaccaaaattggctacatttggagggatagaatttcggttatttacttgaagcctggctttagtccatagtaccattaagtcgtgtaacttccataatcggctcaagtggtctatcagacaactcgccgacagccttcgtggtctagtttggttatgacgttggtctcatatactttcaatgtgacattcttggtaacaagattgaaatccgaaggtctccagttcgatcctggacgagggcattttttttgcctttcctatttagagacgcgggtcatatctatggatcagaccaattatttcgggtgtactccgttgtagggttacttgccaagaaccgggtaattgggctaagcgcccaagcgacgattagattatacttagttacccggttcttgctaagtaaccctaccccccccccccctggtnnnnnnnnnnnnnnnnnnnnnnnnnnnnnnnnnnnnnnnnnnnnnnnnnnnnnnnnnnnnnnnnnnnnnnnnnnnnnnnnnnnnnnnnnnnnnnnnnnnnnnnnnnnnnnnnnnnnnnnnnnnnnnnnnnnnnnnnnnnnnagttcccgggttcttgctaagtaaccctacccccattcgggtgtagccatggtatccctacacccgaatgggggtagggcaagaaccgggtaccgagaaaatcataacatacggcatgtcttcgttctcgaccctaagggcgatctagccgaattgaaacgagcagaaattgagcataattgtttaggaattcttttcaagacacattagatattgcacgtaaatgtatatgtaactagctcattcctcttcgtaatccatggagggttactcatcgaatttggtttacatcaatacagttgactatacaactagctatatgttaatatctgatgtagccgacattttgatacataccgaaagacaggggctgtatgaccccgcgtttttgcacatacatacgccgatcgaggtcagattgggttactcaaggccgagaaagagcctccatatcacgactaatgaggagctgcatgtaccttgataagatctccaaaaaaatacagccgggaagtatataaccatattcaggatagggacatatggatgtaaccggtctgccttgtgggagcatcgccacactgccaggcagcctcaaggtaatacaaggcacccatcaatttagttaccccaaccattgcaaatgtcgccatgattccgacgtcaaaagaattgacctgaattcagacgatccactaggcagacacaaccttgttgggagtatcactaaccaattgctatggcaaaaaactactctccgccttatctgcccattccagacgacttgggggcatgacttcaccgtccacgctctcccctccacagagatccatgactttactgcccccaatcctcgctcagtccaccttgggcgagaagtgcgcagtatacatagaccaggtcaccgataccctccccgttcatctacattccctccgccttcaactggaccccgttctcatctacctgtccaacacgccactcggccctcttgcgaaaaagctgccatttgctccagacgaccagccgatcgctctcctcgcagctgttgttatttgcatattcaccatcgtgatgagttggcgcaaccccttaaaaatgctccgccgctcgccgagctacgctcccgcatcatccaacccgcaggttagcgatgaggatttcagctacatcacaccttcagatatggcgggctcgcctggagatgaagccgacccggatgttatttcactccgtcaccgcggcactatctacccattgcgcttccgcgcatacgccattgtcgacggtctcttgactatcggagacatacgaaaggcggctgctgagtgcacaggagccgaacacccgaactgtgtgagactgctgtacaagggaaagctactcaagaacgacgcgcagacatgcaaagccgaggggctcaagcagcactccgaggtgctatgtgtggtgtctgacgcagtatcccagagcgatgtctccgatgataacggacaaaacatccctgtatctgcatcagcgccagcacccccgccgctacctcgccccactagtgcagggggcgcctcgtcccctcccacctccgcgggtggaaagagcaagaactcgagaaagaagaaacgcaatggcaagaagtcgcccgtcggtgcagaagcccccggtccctctcggtcgccacggcctacatcgtcaggccactcaggtgcccctgccgcgtcgcctaacatcaagttgctgcgtactccgctggaacaggtcaatgctctggcggaatggttcgagcaggagatgaagccgctctgcgatgaatacattgcgtatccgcctagtgacaagaagaaacgaaactttgagaataagaaactgagcgagacgatcctcacacaaatccagttgaaggcggatggaatcgagccaaatggtgacgagagggcgcgcagtgcacgccgggccctcatcaaggatacgcaggcggttctcgccgagctggacaaacttgtacagccgggagatttgtaattggtctacatacatatgtagacacttacctccgtacaatatgtatcaatctcataccaagggctgttctaccggtcaagtttccattttgctgggacctgtccagcccctcggggtggcattggcatattgtgatatatcaaccttgctatttcccctactaaacctgtcggaatgatttgccggcatgtatacatacccttttcgtatttcccctctctttcttccattttccccgtatacccaaattgggggagctcacaggaggttctcaccgttgtctagatcactttagtggcatctcggaatgatcaacatggctcaggggcaatgcacggcccagaactaaagttgcgagaatcgagatttttcttaaatcatagtctattgaacatttagaacgattattgattaatatgctgtaagagagacatatgatgcatgcctgggaggatgcgataacaaataccgtagtccatcctccgtactccgtagtatgtactgagtggacttggtttccacctactattcccagtctggctacctttcctccagggctctccttagactctccctcttgctctttttttttccctatcttgatcttctcttctttacattctctcctcttttctcgaactttcatttattctacctccttgccataattggtaatcgacctctccttgcctcatcctcccggccccgcgagacctcgaagaagccttccacgggaccagccaccccccgccagcagctcttgtcgaaccaaacttgacaaactggaccccctgcagttgtgctcaaccctacggctgtgttgacaatttgctgttttcggtgtaccccttacgctctaccttgcgactctacctggaatggcttgacccgacaagtcaacccatctctaccgcaatctctactactgagccgggttacagctggactggcctttttttcatttgtgaacaataacctctggaatggcgggtgtcgctacagcggcatattccgcagatgccttagcatcgcccgtggatggctcgctatgggattttgcggtaccacttgtgcacgaggtaagattattcggtgtggcattctagtctctgacctggtagcccaagaatgtgggaaagaaaaaaaaaagcgctgatccccttttcccccgcaggataaccaccactcatcgaaacaacgtgagtcgcacgactcgaactcaatcggcgcaaaattctctcgacagcgtacctcgaacggctcacgcagctcctcggtctcgcgcaacgtacacgcacatgaatcgccctatctagcctcgaaccgaggacggagggaacccagtctcaatcgacatgggagtgaagtaggcagtatgcgagatgcttttggttccgaggcagccggtcgtaaagagcccgaagaggccgatgatgatcttcaactgagtttagacggaaagacgaaccaggaaaaatggatccaccgagacaagctggcaaagatcgagagtgaagagctccaccaagcagccattctcttccagcgacggatgagaggagagagcaaatcgagtgtgggacgtggaaggagctatgattcacaccagagtcctgctaacgggactggtacagcgacctcgcccgctgcagaatattccgaaccctggccgaaagtgaaagaagaacccggcaagcggggtgtgaacaacaatgtaggtggcagtgtgcgggaacattgggatctccgccgaccagaggagattgctgcggacgatgcagccgccagcctctacagccaccctggccttggaaaaagcgcctcccgaatacccatctctacggctagtccagttcccatcctcggccgcgattctggcagttcaaggagccgtgccgcaacagatgaagaagaccggtcttcacggaaccgtagagccagcgaacctatcaccatcgagcaagatggttcgactccttctccacaaagtcgaccaggcagtcgtggattcagcagtacacagaacacgggcaagaagacagtcaagagctctacgaaccgaaagacctctgctccacctgcgaacaggaagacgagcactcctcgatctcgcgctgtctccggtaacaacacacagcgccctaccacccggtcaggtgaaagtcgtcttccaacaaccgctaaccgacccgaaggagacccgccttggttggcaaccatgtataagcccgatcctcgccttccaccagaccaacagatgatcccgaccgtcgccaagaagatgatgcaggaacgctgggagaaggaaggccggacaccaaacacatacgaccgccacttcgcgcccctcgcagtgcacccattcgatacgccgcctcctgtagccaccaaggctgagccagaaccgcaaccacaaccgcaaccgcaaccagttgagtctctacagctcgaggatttgtcacctcggccatcaaagagcccagaaccgccccgcccgaatacaagcaccggctacagcaccatgcccaaggtgcaggaaacacccccaatgggattagcacctaaccccaaccccaactggagccctccagttgtcaccgcgcaacagctaccgaagaaagagaagagctgcgggtgctgcattgtgatgtgatggactctcactctacaaccatctgtccaatctctcttctatttccccaacatacttttgatatttgcacatctgcttgattcccttctctgtcatttttttattatttctagcgtctccggcgggatggtgttctgtcggttctgttctgtgattttatatccggcgatctagggcatttcttcgccttgagttcaaatttctccagactgctttttaatttggcatcctccttcaacaccagagcatggatattcttgtttctcttctcccatgcattcattccttgatatttcccttctcatctcctgtgatcattgtgattcctaccgaagtggtaagggggacctcaaaaagctcgctccagattgcgatggatggaatggggatgagagacatacacttcacaataaacataagttgtgatgtgcgcctcttccttcccatcctattacctgcctgtgactttcttgaccccatgattccctttcccttctccaatccttggatttctctccgaaacatctttgaagcctgttttcccatattcccaagccttcttactagcgattttctcctctttttttggtctggtcaggtggatttgtttgccttttgaatgccagataattacggagttaatcagatatcaggttaaatgaatgaacacatacctgcacaaaattactatttgacttgtactcgtaagcatgtagatactgcgccaactagcccaatatagatcaaattgtattttatagacatctacgaactatatgtaccttagctatctagactttacccaaacaagaaaaagcttcccggctgacaaatatcacatgacatcattgccgcatccaatcccgcaatcttgacggaatggccaaccaatcctctcatctttttgcttgtacttgtaccccgccaaatctcctataaaaagagacactaccgcctcctctctttcctcccaaaccgcccaccatttcgtccatctttacccgtcttttcggctccttcgccggcccaaatcccgccgccatgtccgccgcaaagactcgcgctcagtccctcattaacgacaacgctgtcgttgttttctccaagtcatactgcccttactgcgattcttccaagaagttgctcgacagcttgaacgccaagtacactaccctcgagctggatcaggatggtaggtcttttgcttttgctcgcgtgcgagaagaggagttttagcaccgagctagctatatttttgatacgttttttggtctctcttttgaatgaatcgctaatatgagtttattacagaggaaggagctgctatccagagcgctcttgccgagatctcaaaccagcgcactgtgcccaacatcttcatcaacaagaagcacatcggcggcaactccgacctccagggtaagaaggacctgaaggagctccttaaggccgctggtgcgatctaagcggtgatgtcatataaacaagaatctcccgaggcctgagtctgaatatagtctgaggtatatttcgtactctacagcctttattttatatctgccaatccagtcgtctcatagacttcctttcctaggtcttgtagatctatgtaatgtggggagatattttcatgccgtaggactggagggatcaaaagagccctgtcatctttcagcgttagatgcgtattgagtggagcattgctctggaatgtcttgtagtccgacatgggagaaaagtgaacagcgactaactcgtacaggtatgttgatacaaacaaacaaaatcaaagccataacccaaggataaatcagataaccttctgtacgacggttccaagtggcctctcaacaatcgacatcaacccgtcgacaatactcgtccgggccccttcacttgaaacagtcttgccagccaaataattcaaccaaacaagccgactaatccgctcatcagcgacacgccccatccacttaactggcttatcagtcccaggctggaagagcgcgtccaaagcgccgtgcgcatcgcgcatcaaaaccagcgtctgtcccttcggcaccgactttcccttccctgcgccgaaaacagccttgaaatcattcattgaagttccgaagctctcatcctggaactcgctcggccccgcggtcttcttcgccttcgcgcgcgcagtgataccacgcacccatccgtcgcgcagatgcataaagtctgtgttacgagtgggaacgatacggaatgcagtgcggatgccgttttccttgatgatagcagaccaggcggcgtcgccgcggtccgcgtcaaggagaagctccttgagctgctggcgctctggcgagacgagggaggtagcggcggtagtgccaacgccggaaatggccgcgtcagaatcggtagtgagcgggtggattgctgtgtgcaggaggcggcgttgcagctcggttatgtcggatttcgcgacgtacaggccgaccacgtaaacttcaattgagaggaaggagacggtgcggacaccaaggccaagtaattggtattcttcgccttgggacggcgctagatcgtcgccttcttgcttgccttctgttgcttcggatgtggggagtcggattgtgcttgggaagtgagggatggtgcttgttcctgttggcacttgctcgagtctgtcttggccttggatcgttattaatgatgggccaccgctggtgaagccgactggtccgtccatgcgcattgcgccattcttcggaggtgtggagatggtcttgtcatctttgctggtatctagttcgttgaggccgaagaggtctagcttgatcacaccgtagagaccgactgcacagacaatcatgccggctgcggagaggaccatctttcgctgagcttgggaggcatgctggagatccgccgctgcggatgctcgggagcggagggggttattggtggcattggagcggaggggagtggtggagagatggcgagaggagaggcgtgttgtgcggatttgttgccgagtgaggcattggtaagtccgccatgggttctgacggagggtggaggccattttgagcttcgttcgttcgatgaggaatggcgagggcaggattggcgggtgacggagatggagtgtggggatgcacgtgatatggcatgatctacattagtataccgtcatgtatcaagagatggtttcggtggaataaggaggtttttttaacttataatgatggagctctactcatctcatgtgaaagctggcacatcttgatggcagttacttaaataatcagtctctaacagaagggctgtggatgcactatgatatgactacgtctggtgcatgttgatatttacttgacaataaccttgtgagagccaccggtcacttcgaagattgctgtatcatcagcataggcaacttctcttatcagctgcttgccatcaatggtgatcaaaggcttcttcgacgcagtgacatagggcaaagtgacattcccaatagtacccttcggcgccgagaaagtcaacacatatccactagaattcaaagcccaagacgccttaaacttcccgagggaggtgacaaagccagcctcggcaaaatccaagtctccaaattgcggcgcgattttccacgtcaatcctagtggcgagaccacagagagaccgacaacaaactctgttaacgcagacgtcggaccagatgaccagccgtgtgcatgtgagacatatgatggatcatagccatatccgcggtccatccgatacccgaaagttccgttccttagatagccctcaattacagtgctctctgtaccattcgggttgttgatataccaaccccagctacgacgaatgaggtccagggcgcgtgcgggcttgcgagcaatgaagtgactttggatctcaaaagatgatatgaacgaagcaatgttctctggcaactcaggagctacggccccgatgggggtccagttcttgagaagcttttctgaaatgctggctgtgtgctcttcgtcaacaacaccgaaaataattgccatactattagcatcttgtggatgtagagaggtatcggttgcgttgtccttgaatgcgccgtacgactcgtcccagcagtaggtgttgattgcttttttgagattgacagcctgggagctccaagtgcttgagagattggctgaatctccagcccacaaagagagagaggctcccgtttgtagcgtatgatagagactagagcgtgttagctgtaaagccttctgcataattgattcacaacgtacatcatctgtgcttccgagttgttataaccttgctgccatctcgcccagtctcgcgtgcctgtcacattcaaaagcccgctgggataagtcacctttccataaatatattccatggcgtgcagatagctggcccaattctccaacaagaagtctgtatcattggtgtaaagcacataattataggtgccaatcatagaccacatatgatatgtgtccgagtccttctggctcaatggaggcccagactcatcaaatgcacctgttgtcttgttctataatccccagaactgtcagttctatgctaaaaatagaacaaacaaaactcacctgggtgttgtacataatctgcaaagcgtttttaacactttccaaatctcccagactcacaaaagcggaaggcacggcaatgcccatgtcaccaggccaaaccgcacgatctcgctttgccccatcaactataatcgtgtctcctggcccgagagtcccattgtttgcccacccagaggtgataccctttgcaacacgaccagtagtcacaggcacttcattcgtctgcagagtatatgcaccgctataccagatgcggttcaaaagctcatcattgcagtgaaagtacccctgataagctcggagattcgaccaagtgggcttaaatgcgacttctaagctcaaatcatcaatttgaacactgcctgaattgtctgtgatcaagaagacggtcaagtatcggaacccgccccgcagatatttgtccggcatgatatatgtacccttctcagttgacgatatatttgcatacaacgcgccatcatgatagagagcgtttgatgagtccgaccactctccaatccaatttttggcttctgtaaatgctagccctagagctccgctaccggtggaggtatagtctagatggacgatgccaccgacttcaataccgaagtcgaatacaatgagtgatccattgccgtataattttgctttgtatggatgcgaggagtctgccacagcgttcgtttttaactccgataaggttgagactggtcgtactgttcgcgatgccggtgcgtatatgttctcttcccatggcccgctgaatgcagtgttcgtaggcccagaacaagaggtatcacgccagcaagtgtctgcaacagatagcgagaagagagaccaaagaatcaataccacactgcaccagtatgattgtgccattggtggttgagttgaagtagataaataccgcatatcgtaacagcataccaaccttttttaaatacagagcatagcacagatagaaatggctcgaccgtgcaatagtggatatgggaaggttagttaccccatattcgcgattggtggaagaatcagggcaaacgatgttaacacttgtaggactttggcaaggatcggcgaaacaagcactcataagacttcgaaatcatgtttttactgcataaaccatctagcctagtcttttctcgcagtaaattttctccgcaatgtcatgttgccatgtccgctcggtgtaaagaccgaccgagtgcaacatgggaaattcgagcaatgtgcggggttctatagctagggaatataagacctcgttttttattagaaaaatatccaattgagcagtccgatccgagctcacaatgcgattcttcggcattccttccctagccatgcccctatggctgactgtgtcaccatttgtatatgcaaatgaagaacgcagctcaaatgtttgcattgtcaaagccaatgggcaccagagagatgacgtccctaacatcctagaagccttccaacggtgtggcaatggtggtactatcatatttccagaggaccaagcctactggattggtactcggttgaaccccgttgtaagcaatatacaaattgaatggcgcgggaaatggacagtaagtgggctgtcactgtatccaatgataaacgcaactaatacgagctagttctccgacgatttggattactggcgtaatcactcatatccagttgccttccaaaaccacgctgctgggttcattatcacgggccacaatatcacgatcgatggatacggcactggtagtatcgatggtaatgggaacacatggtacacagccgagaaaggcgacacacagcccggtagaccaatgccgtttgtattttggaatgtatccgatgttagtgtcgaaaatttctacgtcaaagacccccagttgtgggctgtaaatatcatgaacggaaccaatatgcgcttcaataacatctactgcaatgcgactgcggtagatgcaccatacggcgaaaactgggtccagaatacagacggatttggtatatccacccactccggtttcctcgcggccaactaacactatggatagacacaatggacgtgcagaatgtccaactcagcaatttcgtctaccaaggtggcgatgactgcgtggcgattaaaccgcgatcctacaatgtcgatatccacaatgtcacctgccgtggtggaaatgggattgctataggcagtctgggccaataccaggaagactcaagtgtggctaatatccgcatcgatacagtcaaggtgatccgatacaacgatgacatgcacaacagcgcgtatatcaaaacgtgggtcggcgcacttgtaccgcagagctcgtatgagaatgctggactccctcgcggcggtggctggggcagcattcggaatgtgttgttctcaaacttcgaagtccatggagccaatgctggacctactgtcaaacaggacaatggaaacaatggctcgtattcgggaacaagtttgatgagtatttccaatgtcgcatttgtaaatttcacgggctatattgagagtacttcgacgaatgtggcatctgtttcatgctcaaatgtgcatccgtgctacaatatcgattttgataacgtgattctatacgcccaagagaatgcaacgacgccgggaattgggtcgtgcaagtatacattggaaggaggggtacacgggctcgatggatgctgaaaattcttcataccagaaacacaagcaagtaaggggacataatgtcagaatctaggatgaatactgtcatttttcatccctgatacagttggatcacgtgactnnnnnnnnnnnnnnnnnnnnnnnnnnnnnnnnnnnnnnnnnnnnnnnnnnnnnnnnnnnnnnnnnnnnnnnnnnnnnnnnnnnnnnnnnnnnnnnnnnnnnnnnnnnnnnnnnnnnnnnnnnnnnnnnnnnnnnnnnnnnnnnnnnnnnnnnnnnnnnnnnnnnnnnnnnnnnnnnnnnnnnnnnnnnnnnnnnnnnnnnnnnnnnnnnnnnnnnnnnnnnnnnnnnnnnnnnnnnnnnnnnnnnnnnnnnnnnnnnnnnnnnnnnnnnnnnnnnnnnnnnnnnnnnnnnnnnnnnnnnnnnnnnnnnnnnnnnnnnnnnnnnnnnnnnnnnnnnnnnnnnnnnnnnnnnnnnnnnnnnnnnnnnnnnnnnnnnnnnnnnnnnnnnnnnnnnnnnnnnnnnnnnnnnnnnnnnnnnnnnnnnnnnnnnnnnnnnnnnnnnnnnnnnnnnnnnnnnnnnnnnnnnnnnnnnnnnnnnnnnnnnnnnnnnnnnnnnnnnnnnnnnnnnnnnnnnnnnnnnnnnnnnnnnnnnnnnnnnnnnnnnnnnnnnnnnnnnnnnnnnnnnnnnnnnnnnnnnnnnnnnnnnnnnnnnnnnnnnnnnnnnnnnnnnnnnnnnnnnnnnnnnnnnnnnnnnnnnnnnnnnnnnnnnnnnnnnnnnnnnnnnnnnnnnnnnnnnnnnnnnnnnnnnnnnnnnnnnnnnnnnnnnnnnnnnnnnnnnnnnnnnnnnnnnnnnnnnnnnnnnnnnnnnnnnnnnnnnnnnnnnnnnnnnnnnnnnnnnnnnnnnnnnnnnnnnnnnnnnnnnnnnnnnnnnnnnnnnnnnnnnnnnnnnnnnnnnnnnnnnnnnnnnnnnnnnnnnnnnnnnnnnnnnnnnnnnnnnnnnnnnnnnnnnnnnnnnnnnnnnnnnnnnnnnnnnnnnnnnnnnnnnnnnnnnnnnnnnnnnnnnnnnnnnnnnnnnnnnnnnnnnnnnnnnnnnnnnnnnnnnnnnnnnnnnnnnnnnnnnnnnnnnnnnnnnnnnnnnnnnnnnnnnnnnnnnnnnnnnnnnnnnnnnnnnnnnnnnnnnnnnnnnnnnnnnnnnnnnnnnnnnnnnnnnnnnnnnnnnnnnnnnnnnnnnnnnnnnnnnnnnnnnnnnnnnnnnnnnnnnnnnnnnnnnnnnnnnnnnnnnnnnnnnnnnnnnnnnnnnnnnnnnnnnnnnnnnnnnnnnnnnnnnnnnnnnnnnnnnnnnnnnnnnnnnnnnnnnnnnnnnnnnnnnnnnnnnnnnnnnnnnnnnnnnnnnnnnnnnnnnnnnnnnnnnnnnnnnnnnnnnnnnnnnnnnnnnnnnnnnnnnnnnnnnnnnnnnnnnnnnnnnnnnnnnnnnnnnnnnnnnnnnnnnnnnnnnnnnnnnnnnnnnnnnnnnnnnnnnnnnnnnnnnnnnnnnnnnnnnnnnnnnnnnnnnnnnnnnnnnnnnnnnnnnnnnnnnnnnnnnnnnnnnnnnnnnnnnnnnnnnnnnnnnnnnnnnnnnnnnnnnnnnnnnnnnnnnnnnnnnnnnnnnnnnnnnnnnnnnnnnnnnnnnnnnnnnnnnnnnnnnnnnnnnnnnnnnnnnnnnnnnnnnnnnnnnnnnnnnnnnnnnnnnnnnnnnnnnnnnnnnnnnnnnnnnnnnnnnnnnnnnnnnnnnnnnnnnnnnnnnnnnnnnnnnnnnnnnnnnnnnnnnnnnnnnnnnnnnnnnnnnnnnnnnnnnnnnnnnnnnnnnnnnnnnnnnnnnnnnnnnnnnnnnnnnnnnnnnnnnnnnnnnnnnnnnnnnnnnnnnnnnnnnnnnnnnnnnnnnnnnnnnnnnnnnnnnnnnnnnnnnnnnnnnnnnnnnnnnnnnnnnnnnnnnnnnnnnnnnnnnnnnnnnnnnnnnnnnnnnnnnnnnnnnnnnnnnnnnnnnnnnnnnnnnnnnnnnnnnnnnnnnnnnnnnnnnnnnnnnnnnnnnnnnnnnnnnnnnnnnnnnnnnnnnnnnnnnnnnnnnnnnnnnnnnnnnnnnnnnnnnnnnnnnnnnnnnnnnnnnnnnnnnnnnnnnnnnnnnnnnnnnnnnnnnnnnnnnnnnnnnnnnnnnnnnnnnnnnnnnnnnnnnnnnnnnnnnnnnnnnnnnnnnnnnnnnnnnnnnnnnnnnnnnnnnnnnnnnnnnnnnnnnnnnnnnnnnnnnnnnnnnnnnnnnnnnnnnnnnnnnnnnnnnnnnnnnnnnnnnnnnnnnnnnnnnnnnnnnnnnnnnnnnnnnnnnnnnnnnnnnnnnnnnnnnnnnnnnnnnnnnnnnnnnnnnnnnnnnnnnnnnnnnnnnnnnnnnnnnnnnnnnnnnnnnnnnnnnnnnnnnnnnnnnnnnnnnnnnnnnnnnnnnnnnnnnnnnnnnnnnnnnnnnnnnnnnnnnnnnnnnnnnnnnnnnnnnnnnnnnnnnnnnnnnnnnnnnnnnnnnnnnnnnnnnnnnnnnnnnnnnnnnnnnnnnnnnnnnnnnnnnnnnnnnnnnnnnnnnnnnnnnnnnnnnnnnnnnnnnnnnnnnnnnnnnnnnnnnnnnnnnnnnnnnnnnnnnnnnnnnnnnnnnnnnnnnnnnnnnnnnnnnnnnnnnnnnnnnnnnnnnnnnnnnnnnnnnnnnnnnnnnnnnnnnnnnnnnnnnnnnnnnnnnnnnnnnnnnnnnnnnnnnnnnnnnnnnnnnnnnnnnnnnnnnnnnnnnnnnnnnnnnnnnnnnnnnnnnnnnnnnnnnnnnnnnnnnnnnnnnnnnnnnnnnnnnnnnnnnnnnnnnnnnnnnnnnnnnnnnnnnnnnnnnnnnnnnnnnnnnnnnnnnnnnnnnnnnnnnnnnnnnnnnnnnnnnnnnnnnnnnnnnnnnnnnnnnnnnnnnnnnnnnnnnnnnnnnnnnnnnnnnnnnnnnnnnnnnnnnnnnnnnnnnnnnnnnnnnnnnnnnnnnnnnnnnnnnnnnnnnnnnnnnnnnnnnnnnnnnnnnnnnnnnnnnnnnnnnnnnnnnnnnnnnnnnnnnnnnnnnnnnnnnnnnnnnnnnnnnnnnnnnnnnnnnnnnnnnnnnnnnnnnnnnnnnnnnnnnnnnnnnnnnnnnnnnnnnnnnnnnnnnnnnnnnnnnnnnnnnnnnnnnnnnnnnnnnnnnnnnnnnnnnnnnnnnnnnnnnnnnnnnnnnnnnnnnnnnnnnnnnnnnnnnnnnnnnnnnnnnnnnnnnnnnnnnnnnnnnnnnnnnnnnnnnnnnnnnnnnnnnnnnnnnnnnnnnnnnnnnnnnnnnnnnnnnnnnnnnnnnnnnnnnnnnnnnnnnnnnnnnnnnnnnnnnnnnnnnnnnnnnnnnnnnnnnnnnnnnnnnnnnnnnnnnnnnnnnnnnnnnnnnnnnnnnnnnnnnnnnnnnnnnnnnnnnnnnnnnnnnnnnnnnnnnnnnnnnnnnnnnnnnnnnnnnnnnnnnnnnnnnnnnnnnnnnnnnnnnnnnnnnnnnnnnnnnnnnnnnnnnnnnnnnnnnnnnnnnnnnnnnnnnnnnnnnnnnnnnnnnnnnnnnnnnnnnnnnnnnnnnnnnnnnnnnnnnnnnnnnnnnnnnnnnnnnnnnnnnnnnnnnnnnnnnnnnnnnnnnnnnnnnnnnnnnnnnnnnnnnnnnnnnnnnnnnnnnnnnnnnnnnnnnnnnnnnnnnnnnnnnnnnnnnnnnnnnnnnnnnnnnnnnnnnnnnnnnnnnnnnnnnnnnnnnnnnnnnnnnnnnnnnnnnnnnnnnnnnnnnnnnnnnnnnnnnnnnnnnnnnnnnnnnnnnnnnnnnnnnnnnnnnnnnnnnnnnnnnnnnnnnnnnnnnnnnnnnnnnnnnnnnnnnnnnnnnnnnnnnnnnnnnnnnnnnnnnnnnnnnnnnnnnnnnnnnnnnnnnnnnnnnnnnnnnnnnnnnnnnnnnnnnnnnnnnnnnnnnnnnnnnnnnnnnnnnnnnnnnnnnnnnnnnnnnnnnnnnnnnnnnnnnnnnnnnnnnnnnnnnnnnnnnnnnnnnnnnnnnnnnnnnnnnnnnnnnnnnnnnnnnnnnnnnnnnnnnnnnnnnnnnnnnnnnnnnnnnnnnnnnnnnnnnnnnnnnnnnnnnnnnnnnnnnnnnnnnnnnnnnnnnnnnnnnnnnnnnnnnnnnnnnnnnnnnnnnnnnnnnnnnnnnnnnnnnnnnnnnnnnnnnnnnnnnnnnnnnnnnnnnnnnnnnnnnnnnnnnnnnnnnnnnnnnnnnnnnnnnnnnnnnnnnnnnnnnnnnnnnnnnnnnnnnnnnnnnnnnnnnnnnnnnnnnnnnnnnnnnnnnnnnnnnnnnnnnnnnnnnnnnnnnnnnnnnnnnnnnnnnnnnnnnnnnnnnnnnnnnnnnnnnnnnnnnnnnnnnnnnnnnnnnnnnnnnnnnnnnnnnnnnnnnnnnnnnnnnnnnnnnnnnnnnnnnnnnnnnnnnnnnnnnnnnnnnnnnnnnnnnnnnnnnnnnnnnnnnnnnnnnnnnnnnnnnnnnnnnnnnnnnnnnnnnnnnnnnnnnnnnnnnnnnnnnnnnnnnnnnnnnnnnnnnnnnnnnnnnnnnnnnnnnnnnnnnnnnnnnnnnnnnnnnnnnnnnnnnnnnnnnnnnnnnnnnnnnnnnnnnnnnnnnnnnnnnnnnnnnnnnnnnnnnnnnnnnnnnnnnnnnnnnnnnnnnnnnnnnnnnnnnnnnnnnnnnnnnnnnnnnnnnnnnnnnnnnnnnnnnnnnnnnnnnnnnnnnnnnnnnnnnnnnnnnnnnnnnnnnnnnnnnnnnnnnnnnnnnnnnnnnnnnnnnnnnnnnnnnnnnnnnnnnnnnnnnnnnnnnnnnnnnnnnnnnnnnnnnnnnnnnnnnnnnnnnnnnnnnnnnnnnnnnnnnnnnnnnnnnnnnnnnnnnnnnnnnnnnnnnnnnnnnnnnnnnnnnnnnnnnnnnnnnnnnnnnnnnnnnnnnnnnnnnnnnnnnnnnnnnnnnnnnnnnnnnnnnnnnnnnnnnnnnnnnnnnnnnnnnnnnnnnnnnnnnnnnnnnnnnnnnnnnnnnnnnnnnnnnnnnnnnnnnnnnnnnnnnnnnnnnnnnnnnnnnnnnnnnnnnnnnnnnnnnnnnnnnnnnnnnnnnnnnnnnnnnnnnnnnnnnnnnnnnnnnnnnnnnnnnnnnnnnnnnnnnnnnnnnnnnnnnnnnnnnnnnnnnnnnnnnnnnnnnnnnnnnnnnnnnnnnnnnnnnnnnnnnnnnnnnnnnnnnnnnnnnnnnnnnnnnnnnnnnnnnnnnnnnnnnnnnnnnnnnnnnnnnnnnnnnnnnnnnnnnnnnnnnnnnnnnnnnnnnnnnnnnnnnnnnnnnnnnnnnnnnnnnnnnnnnnnnnnnnnnnnnnnnnnnnnnnnnnnnnnnnnnnnnnnnnnnnnnnnnnnnnnnnnnnnnnnnnnnnnnnnnnnnnnnnnnnnnnnnnnnnnnnnnnnnnnnnnnnnnnnnnnnnnnnnnnnnnnnnnnnnnnnnnnnnnnnnnnnnnnnnnnnnnnnnnnnnnnnnnnnnnnnnnnnnnnnnnnnnnnnnnnnnnnnnnnnnnnnnnnnnnnnnnnnnnnnnnnnnnnnnnnnnnnnnnnnnnnnnnnnnnnnnnnnnnnnnnnnnnnnnnnnnnnnnnnnnnnnnnnnnnnnnnnnnnnnnnnnnnnnnnnnnnnnnnnnnnnnnnnnnnnnnnnnnnnnnnnnnnnnnnnnnnnnnnnnnnnnnnnnnnnnnnnnnnnnnnnnnnnnnnnnnnnnnnnnnnnnnnnnnnnnnnnnnnnnnnnnnnnnnnnnnnnnnnnnnnnnnnnnnnnnnnnnnnnnnnnnnnnnnnnnnnnnnnnnnnnnnnnnnnnnnnnnnnnnnnnnnnnnnnnnnnnnnnnnnnnnnnnnnnnnnnnnnnnnnnnnnnnnnnnnnnnnnnnnnnnnnnnnnnnnnnnnnnnnnnnnnnnnnnnnnnnnnnnnnnnnnnnttgttttgtttgttttgattactaagttgtccatcagattgtcatgttttaggactattgtcagttttagagagttagagaatttattaagatttttctgccacaaaatacactcgccttaccaccgtttttccgtcacataaaaaccgaatctgaggttatctagatcggcaaatttgcttttcattgcgagtatgtgcagcaatcaccttgattctaggcataaggaacagagacttcaggcatcgtgttcttaaaaatagcattgctaatattgaatcagatttctgtaaccttgggagaaaaacaagacaattaatacttaagcataaatcgaaccataaagactgaccccgcagccccacctgagcacttccctatatgacgttcgttcccaaggttgattaataaattaataatgtcgctgtagcttcttttaacctcatacccaccccactgattgtctaagtccaggctataatgccacaggaaacagttcgacctgcatttgagggccgtgagcgcccacttctttcctatggccttgcctttcccgcagcgacagcacgccatcttgatgacatattccaggcttcccgtgtatatgtgatttgctcagggtcattggcgcgtaataccgatgtaatgaaccagctggaggctgctctggggccagataagctggttggtcattggatcggtatgcgaagccacactttgtggtcagaggtgctgcagattgccgaagaggttaggactgtgcatgctgatctgctattgaccgttggagctggcagcttgactgacggcgccaagatcattgcattagtaagtatacctttttctttcatatcttcattctgtttctgtttgcggtcttcttgtctcttcttatcattccctggaagacctatatatttatttaatatcagcctaacatccccttcaggcccttgcaaatcaagtcagtacactagaagagctcgaaacacttgcagaaggccccaaaaagcgattgggaatcaaagctccaacgctcccgattatttctgtgccaacatctctctccgccggcgaatactcaaacttcgcaggcggcaccgaggaccgctcaaagcgtaaatacagcttccaaaatccaattcgcggaccggagctggttattctcgacccggagctggcgaaaacgactcccaattcaatctggctcagcacaggtgtgcgcgcaattgatcattgtatcgaaaatctgtgttcgacatcaggtaccactccggaatcagacaaactggctcgggatgcgctaggattgctggtccctggtctcttgcgctgtaagaatgaccgatcagaccgtgaggcgcacctacagtgccaacttggatcagtggatgctatggcagcctgtactagtgggtcaatcgaattgggtgctagccatgggattggacatcaggtaggcgattgctttcctttatttacattataagaaacccacaatgcaccaatgggcctggcttacagttctctagcttggtccactgggtgtcggccacggtgagaccagttgtatcctgctacccgctgtgtgtaagttcaatgctaagtacaacgccaaccgagaaaaacaagctagtgtgtgccaatttttgattcaagatccggtcgtgtcggaggtgctacgtgcccgctcggtcaacgtggaagcctctgacttgggcgatattttggatgctatcatccgcgaattgggaatgcctcggtccttgagcgatgtcaaagtagggcgggatcagttggatggactggcggagaatagcctacatgaccgttggtgcaagacaaacccagtaccactgaaggagaaatcccaggtactggaaatcttggaaatggtagtttaaagacgagataatatgctctttcacatttggataattgagacatccacggactaatctcggctttcaaataacccacctatcagttcagttgtatggctgaggtcataggggctttatatacttccgatggtgatgggattggcatatcgacagatatttctaaatgcgtcgctgtttcaggataacaataatagccgtcacggtagaaaaggcatgcatttatcaagtttcgttcaagtttctaaattacagttcctagttttggtggtggcaacgtcctatatctacactgagacatgtagacatcctaaccacttgggtatttccaaccctaaatgcattatacaacatatctttcattctacaatatctaactaaaatacagattaaatatgaagcttgggagcctctttcaattgattgataagcaggactccaccccccacatttcacgttatacataagctcgcgtcatttccgtctctaggactgcactgtcgacacagcaactatatacaactatgtctctcgccaagaatatccttctattcggcgcaacgggcaacattggctctttcatcctggacgccatcttgaccgagcgctcccaattcggccgcgtcgccatcttcacttccccgcacactgccgaaaccaaagcctcgcagctgaataagctgaaagagcaaggcgtagaagtgattgtgggtaatgtcgaagatgagaatgccgtgaaagcagcatacgaaggtagcaaaccctctcttcgtatccctacttatctaactgcccaaaccaccaaaccaaagactaaccactaagtcgaacaggaatcgataccgtaatttcagcactgggccgcaatgccctagctcaacagatccctctcataagactcgcagccgccagctccactgtgaaatggttcctgccctccgaatacggcacggatatcaagtacgggccagcttcggcgaacgagaagccgcaccaactgaagctgaaagtgcgcgcatacctcgaggatgagagctcgcgtgacgacctcgcctattcgtatgtagttaccgggccgttcgcggagatgtatcttaatctcgtgcctgggttggagacggctggtgggtgggatgttaaaggtcggagggcagttctattgggcgagaaggggaagggcgaggttagtttgacgacgatgaaagagtaagatttcttcccttcactattttggtgtttgtttcgttgggatggatgggctattggctaactattccgctagcgttggaactctcgtcctgaacactctgcttcatgctacggctgagacgcggaacgctgccttgtgcgttaattcgtttactacgagccctgaccagattcaggcggaatttgaacgccagcttgatggtcagccgtgggatgtgtctcgcacctcgctggcaaagttgcgcgaggcggaggctgcagcgtgggaggctgggaatccggcggctactctgttgactttgcgtcggatctggggtgaaggcggaacactgtacgcgcagcgggctaacggattgattggggagccgaaggtgatgagcctgaaggatgtggttgcgaatgagatccagagggtatcgaagttgtagatagcttgtcttcattgtttcattttttttcattatcttaatttttacatgctagttggccacacaacaaaggcgacatttgatctacatagacatcgcgcacactgtggaatccaacgtttaaagctcatcgcattcgtacgtaggaactaagaataaaagaaacatatcgggggttcaggtaacttcagatttcacatgaccgaggggaatgatttggaaaaggataaaaaagggggaaaagctctgccggatataaaacaaaaggatctgagctttattggaagaacttgcgcactctttcctggctagccgggtccacagaagccagaatctggtctgcatttgcgccggttacttgcaccagctgcttggcggatgtggccacccgggtagcggtctggccctgcagagtagccgcctcgagtgcctgaacgatgaaaccgaagacacggtcagccttggcaaagacggccgggttgtgcctggtagtaagatattagcatgagtatgagggtcttcatcaagaatacttactggtcaatcaactgtgcaatgaaggaataggcataaggagcagcctcctcgtcgtaggtaatgggcaaagtctcgatccagttggccacgacatcctgaggagcctgaaccttggacgggttgtagtgcaggatcttggcaatactggcagatgcattctcggtcgcgaacacattctcctctgtgcgggattgcgcatgctgtgtaacctggaacaagctggggaggctggctgccacaaattcgctccaggcggcaccacccttctgtgcggccacaccaactccatacgccgctgcctgacggttagcggcattctcatcccgcaaaccggaagccaaaggctgcatgatatgatccttgtatgcccacgactcttcaccacagaactcgagcacgtcatccatgatgcaaagagcccactgccgttgtgtcgggtcctggcttgtgataaaagcgtcgtagaatggaatcaattgctgccaggtcggcaggaacgtgttgccctggttcttaaagatggtgtggaacgccttgttcatatcgctcaataggttttgatcgtcctccacggcgtactcaaagtccaggttttcctcgtcaccatcttcaagctcagcctgctcctccaaacgttgcttcacgcgcatctggtagtcctcaagggtcgacttcgccgattcaatgaacgcctgcaagtgctggggggtgagggagtttctgccaacgacctctactgactcgtagaagcactggtacatctcagccagcgtgtcaaccgtcggctcagcgctcagaacctcgatgatcttctcggcaaccttgttccacatttcggcaaagcccggcgactggccaccgtgtgccttcttgtaagagttcaggagctggggaatcagcttggcagcggacactcgaacggggtcgtggaagaagaaggcaagaccagggactgcgatcttctccatggtttccaggacgtaaggctcgaagttctcctcgagaatttgggcatagatcgtgatcaattcgatagcggtattcttgtcttcaagagcactggtcttgataccaataatcttgcctttgagtggcactatctcccagccatcatcctgctcaacctgttcgatctgttcctcatcatctagcagctggatatcggccttggcagcagccacggtgagaagaggcggcataacaccggggagataaggtacgaagtctcggcctaagacgcggcacatgcggccccagcagtgaaggaggtactgtgactgtgggtcgtcggcgtcgacaatgttttgctgaatgtggccgagaatctgcacaaggttcagggcgtcttgacccatcttctccttaccaacggccagtgcgatcagagtagcacactccatggccttggcacgaagaaggcggtactccttaccctgttcctccttgagaacattgagcaaaagaggcatcaaagtggtataatactggtcgaaggcggcctcggcagaatcagcaatagtggcaatagtggacagcgcctgctcctgcagataacgcttagggctgcgcaagagatccaggagatggctgagaaggtttccgaggtatggctccaaggtgctgcgctccgcctcctcgcagaaattgacaagagcagcggcagcgtgggactgcacacgcggctcggtagaggcaagaacgggaatgatgttagtgaggacaatctcgtgatacttctcctgcatggtaccggcaaagtcggtgctcatctgaccaagagcattgcagcctgcataccggactcgggggtgagggtcttggagggcaggaacaacaagcgctaggacttggtcgagttcaccgaccatcaggtcgcgacaaccttcggagatagcggagatggccatcaaagcagcatggcggtcgcgccagttggtagacgacatcatgcgaggaatccaagagaatgcgggctggaggatggcctgtccacccaatttgttggcgagacgatccatgcactgctcaccggcgatgtggttgagatcgttctcttcaggctcaagctgttactggtcaatggcatgtcaattataacgacagaaatgccaacacttacatcttcagacgcgttccattcctccgcatcgtcgtcatccgcaccgacatcagtcatcagactcagacattgtgtgaccatttcctgtgcgaactccggctccttcctgcacatatttggggcgtaatcggcaaaggtggccatcaattcgagtgcgttctggcgcacctggtcactgagctccttgtcgccaatgacactaatgctgaacttaactaagttgttgaacatgaccttgaacatctttgggcagatttcagccaattcgatcagggcttggagtgccgaggacagttcctcgctctcagaggactccttgagaggaggaaggatgttgagaaggtctggcatgaggccgaagaatttaggctgggactttctggagattgaccggaacaacgaagcgaaggcttccatagctgaaattcgcacctgatgaaatggtcaaaattgagttcgaagggcatatccagatgtcgacatacggaaatattatcgtccttgaaacccttggtaaaaaccgccacaacagcgtcttcgtgctgctgttcaatgataccgggggtggtcgtgaacacacggtatgcggtttcccgcaggcccgagtcagggctctggcttgcctggaatagaacaccgagaagttcgggccactgttcgtctacaatcacaggtgaaatcgtcagaactaagagtcctcattttgtcaagggttgttcgaatcgcataccattatcggtgtattgcctcgccacctcagcgagtgtgtctccaatcttcttgcgtacatcggtgacggtctcactggttagacagatcaccaatttctcgcggatggcgattcgctgctcgttgggtaggctcgagaaaatctccctgctgtcacctgtggcgggatccttccgggtttttgtcgcgattcttcggaaaagcacagcggcgaaagcacgcatctgtaattaaaggtctcccatcagttattgatcccaaatcacattgaagttcggctgctggcctggtcgtcgatcgtttgcaacaccactccttcgaagcagccacacccctggagtccggtgtaacttactattgtgtcctctgcacccccaagctgttccgccaatcccatcaagaggacatctggtcggttcagaacccagtcattgttaagctggtcttccgcctgggatctgacgacattgtcgggcgtgctcaagccgcggagcagctgagaaagcgcggtgtggacttcgggaggtaggagggacatgttgggcgtgtctgttcccaagttccagacgatccaagcaacccagttctttcaaccctcgtagaagtaatttggtggggatagaggggtggaacgaaggaggagttttgtttttggtggggcggggagagagggaaaaaagaagaatttctgatggataggtccttggaagtgaagaagaacggaagtgccagtcgaataacacaacaagagggagagagattcgactgaggatatcgaggtcttagaatcgggtacttctcgacaaagattgcaaattaactgcacgaaaatccaaggacaacctacaaaagtccataatcgtatctggagctaagccaaatgcggtaatttaaggccacaaggccaactcagatcgaacagacacaactatgaagacctcaaacaacttacttatttgtacatacaaatcgttagatcaaagtcgacctcgaacaattatttgcattgaaggctaaactacctaggtaacgccgcaactgctcatacgaacagcggtatctgaacgcgacacggaatatcgatattagaaaacaaaacgggtatgcaacactccggacaggaaaagaatctactacgctatctcaggttgcttgatatccaagttgattgagagaaaggggagtttttgaagaaagagggtttcgggaatgccaaatatttttaccggtgaccggggcggctgagaatgaacacacccacaataaccgcagccaatgtgacaatagcaccgggcagcagcaagtcgttggggacaccggcaatatattgctcctctggcgcgtgcaagggcacgacttgtggctggggtagggccttgctcactggggagtcttgtgatgtaggttcctcagcagagctttgctcttccataggagtcacaatcttaacatgatgaggttcaaacacagtgttaggtgcctgggcggggtcgtggacaaataaattgaccttgtcgcggtgagtgcggcgggccagatcgatggcatccgtcatatcctggtccgtggtaatggagacggtatcgccttcgttgtccatatagctgagggcatatccagtgtggctcagccgaccctcctcaacagtggcctcgccaccaacatcctcgacttccttgccaagtttcgccgtgacttgcaacacaaggtcggtaatgccgctggtggtaaggacgttcacacggtgcactcgaccaccaggggctttgaacttgaaggggaatggagtaggagcggctggttctattgggtagtgctgagagatagcggaatgatcatcaccgtggtgcgatgctgagtcgttggggagaagactgttgtcgtagcctgagcgagtgaggtcgggactgataactgagcggtgtggggtattcagttgctggctgtggccgccagagaccatggagtctgactcgtgatccattgataaccaaaatttgttccaagcggggccctcgtcatcttgggttgacatggtgttgatctgaatacattagtcaaaatttttgcatgtcagatctgtaactttcaaacatacctgttcaagagtggcatatgtaagcttcaacacatccaccatgccaacgatttcaccaccctcgttcatcacgggcaggttaagatagtggccatctgttgtagagttagcatgcttcggtttgaaccgctgactgaaatgactgaccatgcatcttgcgaagtgcggcttggatgctcatatccgacggggcgaaatcggggtgaggagtcatgacacggacaacactgcaagtagatggatcaaggccaggagcaataacgcgaagaacgatatccttgctagtgaatataccagtgatcgagccttggtcctggactagcagagcagtagtgtggttttccttcatcagagccgcagcgtccttgacggtggtgcggaccgagacagtgaccggcggcaagccatccaagaccgtctcaagagtcggaccggacatcttggatcgcaatgcctccacatattggataacttgctggggctgactggagccaagctctgtctgcacaccttccagcgcatcgtacagcttgcgagacgaactgtatgcgcgctccaatttttccatagcatcgtagaagcacttggtaatatccaaaacaccagagatatcctgattctcatccatgactggcaaatgtctgaatccctttcgcaccataagatcgagggcatcggtagcgctggtgtccgttctcgcgcacagcgggttcttggtcatgatttcagcgacagagacgtctcgcgccttcaggcccattccgacgactcggaacgccagatccttggcagtgaaaatacccgagatgcgctcattatcgtcggtgaccaacacacagtcctctctcttcgcggccataagctgggcggcctctgcgatactcatggtcggcttgatctggagggcttggctgggcttcagggcgagcaccgtaccgggaggcgctttgcgggagctcctcgattttgccggagtattcctttttttgctgaggtcggcctccattttgcggcggatggccttgtgtcgagattagctaaaagccgaggctcaaattgaccatcaggagatcactcccgctagctgccataacgtacctcatcacgttttgactggttctgtcgctgtctgctacttgcggcgctcattgtgccagtgccagtgctagtgggagtcccgacgtcgctagtggctgttgtgcttataacagaggaatctggtctggggggtcgggggatgtgggaagcgctaggatcgctcgcgaaatcgggcagccttcctctcccgatcgtctgattgggtttcccccgaaaagtacctgtggccgacataataatgccgaaaggggaaagtctcagtaaaaaaaaagagagaaaggagatgacacaaacagaacaaggatgtcaagttgtgagactggtatgggagaaaaagcaaggagaaatcctaggaaggagaagaaaaatgggcagttcaatagtcgatcccaaacaggggtgttccttcgttagtcggggttggaggaaccataaacacggagtgacacggtacgatccggacgctagtctgaattaggcgaaaatactgctcgtgaccttttacacatgatccatgcgatacacgtgatccagatatatcatcgcctgagatttgaggcatcagccccgtgacccatctcgcttaagggcttagggctacccgcacaacggaatccaatccatcccgaaagagactttgtgtgagcgagcttcgacaacccactcccgacaagtcaactgtacgctatctacccccccctttcacccacagaccaatacctaaccatccacagaacaaaccgtcaaaatggtcaagaagagggcgaacaagtaagaccaacaaatccccccatctcggcgaaacagtatcccattcgacatctccgcaatgacgccgacggaagcgcacacgacatacatctctaaatacatcgaaaatcgcgacctacgcacattgccggacaagaagaatgggagactggatctcgattgattcgcaacctcaggggcacggtaactaattgatttgatagcggccgcaacaagaatggccgcggccacgttaagcctgtgcgttgctccaactgcgctcgctgcacccccaaggacaaggccatcaagcgcttcaccatccgcaacatggttgagtctgctgccattcgtacgtgacaactctctcgatacctcgaatatacgacaagatctcaagatctatggctacaaaccattcgaggactttcagatgtagcagtgcaactaaccgttctcgctttacaggtgatatctccgaggcttccgtcttcgccgagtacgctgtccccaagatgtacttgaagctccagtactgtgtgtcctgcgccattcacggcaagattgtccggtacgtttccaccgattgccctcctcgatacctagtcgcattccacgtactaattactcgttcatagtgttcgctcccgcgaaggccgccgcaaccgtgctccccctccccgtattcgcttcaacaaggacggcaagaagctccagccccctactgccgccaaggctttgtaaggagatgaatgtcgcacgacaaacaaaataaaatggaactagtttgaaatgaattcttttattttgtcttcactcttcgcattggtgttcttctcaaccggatcgcaggggtgatgctcggtcccaaaactgccggccatgcttctacactgaggatgaaaaagacggcaccaattgtgcgacgaaggcaagttggatgtctctttagcattgtgacgtttatgagcccgtttacgacggcttgttatgactgggaggaaggatggttcaagtccaagggaggactcagaaaatatcaaaaattcctacaaaacatgatcgcgtgacgtagacatcaattatcttgagtagctatgtagtattgctgggtatctgccaagtacgaaatttatgggtacaggtaccctttctcaaaatagtttccatacatatctaccgttccggtccgcaccttcggcattgggccccgcacgaccttcacctctcccttccaatggccttcgacataatgggagagagcaatatggggtgatgatggcatgagtaggctactcatgccggaagcacccgtgccaaccgtgtttcgccgccctctctcacgtcgaatcacctgctcatactcagcctttttgcggcgacgaaaggtcgcaagctctgctacaaggtcaatcatcgggacctggcactgttgctttctatctctagtagctcctgttggaccaggggtctcagcactttgtggatggtgacgcccgagtcgagaagaatcaggtgattgcaacgaagaagaatcgggtgaatacaacgaggcactctccgacggcataagcgagaccttttcgttaagcacagccatgggaaagtatttgccagggtcattttcggggactccacactcttcttcaccgaagaagctgaaatcatcggcggctgcagaccaaagattctccgagtcgcggtcaccagtgcttgaatgccctgtggcattatattggttcccgggtttccatgatgtcagcttggaggtatcaacaggtttaatttcaagaactagacgccgcaagccaaagagagatcgcgagcgccgctgctcggcttgcatgcgtgcttgccctggtgggagggagtagtctgatcctgcttgtagagttgctagtaatgcttcgtttgagcaggcagtaatgaaccgagtgagcgcagaaagtattgaagagttaggcgtcacatgtgatggtacatctgtcagcaccaaagattccatgtgaggaatatgtgatgggtgtaggtaagggaaccagctttctcttcctccttgaagtgggattgattggttacgtggtcgctttgccaacaattcctgtactgttcgtgcgagagaatcgttcggcgagattggggagctgcattgcatggttgcctggagagagaagtctgccgcaagcttgtcgcagtctgaagccattgaaatggatggcaaggtgcttccctcggcctggtctgtatcccatgtatctgtcctagcactgaagaccgtaccttcgttggcgctactgtgtatagggattggctgtacgacctccggagcaaaagctgatccacgcctaaccgacgggccaggctcgtcctcataggatttcaatgtctgggatgctttcaacctttctgtcatggaagatgagctaattgagtcggtcgttgatgtatctgcaagttcaaagacaggtcttgtctcttcgggcaactcataaacctgctgggaggtatccagctcaaattgttcgacttcgcgggggctatcttgtgctgaaagctctggaagaaacttatcattggatgaagcgtctttagtttgtgattggcctgtgagaacagcatgatgcgctcggaaatatatcaaattgtctcctgcaatcttacccaaaattgggactagcttttcggctcccgaatatttctccttccgataatgatgcgtgtgatgtgccttatccggtggttttatggtcccgaaatcgagagcatatagtcgggacgagaataaaagattcgccacagcttccagagatatttgattgccagtaatataaagatgtgtgattcccgtatgcggcaagtcttcaacccatggatgaaataaaacaggctgagcgagaagcttcgcaaactggtcatccaagtccggccgcttgaagaaatccgagccagactcattgattgcaaagtgcgagaagggatctggagaagccgtggcctgccttggactctcttgcatttctcttccgtctggcgggagaaaggatgactgtagcaggaatcgaattgccatgtcagtgagcatgttgtctctcaaatccaaacaacggactcgttgtccaatcgtattggctagaaattcggcgtcatcatctttcagcccaataccacgcaatttgagtatccggagaaacggcatctgagctagcgtagacagtacattgcggtctcgtgctggggtggtgtacgaaagatccaggtaggtcaatgctggaaacaagaggagagtatttgcgagacttgtggaagtggcattcggctcacgttcagccaacaagagccttatattgtactggttggacatttcatggggtttcaatgctgtcatggcatggtggtcaaagaatggtaacttcgagaccatcagacactgaagacatggcagacattcgagaatgtccctcaaccagcccggtcgcggaccaccatatatctccgagagagcgggtggaagatgaagggtatgggttaacgctcgcacctcttgtcgggcatatttgagtgttcttcggaatcgcgtgagagccactgtatgatccagtcaggtattgctttttgagcaatcgctgttgttcataagtttacttaccatagactgcatcattatctgtaccaaagtgagatgcaggattaccccagaggaagggcataaatagaccatgccatctgtggcagactaaagatgcagcgcataggtcgctggaagggatatagcgagcaataattgtccaagcatctctgtctgttgctgattcgtaagaaggaggaatgatatccatcgttgtattattttttccttctttcgatcaaaggcattgtgagttatacgaaaggtggtggaaatgcgagagggagtttggccccatgagtacctaggtagttgcccgactcagccacatagttagttagttctacgacagccttttgggatataccactggactcaggactccgaatattcttcataatgtttatgctttccccccctctcgcttctggctatctataagtatcatggccctttatccacgactatggatatatgacgtcactaaataaagcaactatgaacaggcgggggatagccggtctttgccctaatcctcacttattcctctgccacgcgcagagcccacagtgcttgggagagacttgaagcatattctacgtagttttgccggtccctactctcaacaaagggtagttagcatttcatccattgtcgcttagcatcacgcccgaaaaatcaggcataaataccccagagccgggatggtagcttactaagcatgaaactgagtcagcaagtgaccacgacttctcgacttgcgttgcggccattccggactcgagaatactcacgcggtcctcgaagtgcgatcgagggcttctagaagcagtccagaatatgtcagtgaacagaccccttgttgattccacttccttgtagccgaggcttccttgttacttgttattcttgtactcacctatgcaaagatactttggaatagaatgtatcccactaacatgtcaaatagtcgtgtgattagcaacctcccccagaggttcaccttaccatgtctgaagttcatggagattcagagctcgttccatcgggccctgatctagattatccgcttgctttggctccgcgacaagtaactttgcgagatcgggttaccgttgcgaccctgatcccttttacttcagcagaggaagtaccgcgggctctaatgaagtatctctctgaccaattcaacaaagagattgaaaagggagatacatatgctatgaccgagcccatcccattggctcagttcggacgatattggttttcgaactttggtgtggtcatgcttattggcgacatcgagagtgcagagcagacacatgcgatggaccgtgctggagcgaactggaccaagatctgtctaggtggttttcatattcgacctaattaccccggccgtagtagtcatgtctgcaatggcactttcatcgtcaccgatgctgctcgaaacaagggcgtgggtagactgatgggcgaatcctatctggagtggtcacctcgactggtgagttattcaccacgatcgcttcaaaagggctatgaattaatattttctagggatatacatatgcggtcttcaacttggtatatgagtccaacgttgcgtcatgtcgcctgtgggattcccttggctttaaacggattggccgagtccccggtggaggcagtatcaaatcacaacctggggagtacgtcgatgcgatcatatacggtagaggcctcagcttggatggcgaggattctgtgtctcaggatcgttttgagaaaattcggtattatttgaagcacgggaagtaccctcgtggtgctgaccgggccgaaaagagtcgccttcgcagtgcggcgactcattataaacttcttggtggtgaggatggggagcccgagaaactgatgctgaaggataaggaggttgtgtcagacccgcagcagcagtacgatatcgcccaagaagttcacctcaagcatcatgctggaatcaacaaaaccacagcagctattgcgatcaaataccattgggtacgaatcaaagaaaccgtcaatcgcgtgattcgagactgtccacaatgcaaagagactctcaaggtgccccccataccagggaccaaagatgatgataaatcgccatcggaaacgatgtctggcatggatatggatagcacaatggagcagcccccgaaggacccaatcaatgtcccgcaggagatggacgaagcacctgatgagcctcccaattacaaccctcttatgcaccaacccattcctgcagctatgcccgatacagtccactccatggctgggttcgcacccatgcctctcgatcctcaaatcatgcaactacatcaacagttacgacgctaccaacaacataactctatgacgggacagttcgccccaaacccacacaatctcagcatgtcaagctttgacgacgcaatgcgctaccatacagccagcaatgcatatcaaatgatggtagatgacggctcggatccctttagacaagatgtgcttggacttgtaaacccaccctcacacgagttacagcatgatgctgaattactcgccaagttcgagtatggaagtccttcagacggaaattatgactttacgtgaacacgcctcaacttttatctcggtttctcattccgagggagttattgcatttcgggtttgctttgtcttaacttaaatttttctacctctctcctctattgttctattgtcgaccttcgaagccatccgtctgagataccgctaacactctaccattgtgccgtggacagtgaagcgcgctctctgctacggtatgctttttattgggcatattattcaaaagattatctctatccatattttaaaaactccatattcaatccatagatgtaaattctgtacatctcttcaaatgcgtagggtcgaggagccttgattggtcaccgccttgcgcgactgggggggcttttggggaacagaagctctgggaaattttggcagatcaacccctccgacctttcaactcatcataccccttttcttatttcatttatttttttattgaacggtttcgtgtcctaataccgatttaatcatggccttcaacggccaaacccccacgattgtcgtgttgaaagagggtacgtgctgtttccagtgcgggcagttttgttggtgggattctgtaacctatgctaactactgttcctatacaatctacaggcaccgatgcttctcagggaaagggtcagattatctccaatatcaacgcttgtgtcgcagtgcaaggaacagtcaagagcactctcggtccttatggtggtgatctcctgcttgtggatgccaatggcaaacagaccattacaaacgatggagccacagtgatgaaggtgtgtcttgctattgatgcaactatgtgatcggaggaagttggcgattctgacttgcgtgtattcggtagcttttggatattgtgcatcccgccgcccgcattctcacggatatcgctcggtcccaggatgccgaagtcggtgacggaacaacctccgtggttgtcctagccggtgagattctgaaggaggtgcgagacctcgttgagcagggtgtcagctcgcagaccatcattaagggtctgcggagatcgagcgccatggcagtcaacaagattaaggagattgcagtggacatgatggatgcttcagagagccacgaaaagaaggtcgagacactaagacggttagccgcaacagccatgaacagcaagcttatcaagcggaattcggagttcttcacaaagagtaaggcttccctaccctgtggttgcaggtttggccccgaggctgacgagatggtatcatagtggttgtggatgcagtactttcgctggaccaggatgaccttaacgagaggttgatcggtgtcaagaaggttaccggtggtggtctccaggattcgcttttcgtcgacggtgtcgccttcaagaagactttctcctacgccggtttcgagcaacagcccaaacacttcgagaaccccggtattgtgtgcttgaacgtcgagcttgagcttaagagtgagaaggacaatgcggaagtccgtgtcgagcaggtctcggaataccaggccatcgtcgatgctgaatggcagatcatcttcaacaagcttgaggctatctacaagacaggagcgaaggtcgtgcttagcaagctgcctattggcgatcttgccacacagtacgtgcttgctattcactatgaggcatgtgcctagacactaatgatttaatttgcaggtacttcgcggaccgagacatcttctgtgctggccgtgtggcctcggacgacttggaccgtgtttgccaagctaccggtgccgcaacccaatctacctgcactgacatccaggagcgccacctgggtacctgtggcgcgttcgaggagcgccagattggtggagagcgtttcaacttgttctccgactgccctcgcgctaagacctgcactctcgtgctgcgtggtggcgctgagcaatttattgcggaggtggaacgtagtctgcacgatgctatcatgatcgtcaagcgtgctctgcgtaacacaaccatcgttgctggcggtggtgctactgaaatggagttgtcgagctacatgcacgggtttgccgaccgtaacgtcccgcacaagcaacaggccgtcgtcaaggcattcgccaaggctctggaggttattccccgccagttgtgtgataacgctggcttcgacgctacagatatcctgaaccgcttgcgtgtggagcaccgcaagggtaacacctgggctggtgtcgacttcgacaacgagggcgtccgtgacaatatgctggcctttgtttgggagcccagcctggtcaaggtcaatgctatccaggccgcagtggaggcctcttgcttgatcctgagtgtggatgagacgataagtaagttccttctctttgctttccatcctcggaatcaccactaacctatgttttctttccaacagagaatgaggaatcagctcaacctggtcaacagcgcggtatgccgccaggtgctgcccagcgcgccctccggggccgtggccgcggcatgcctcgacgaggataaacgagtttgaccaaaattggatgatgctcgatgatattccccccaaaaaaagaaggacgtctgcatgattgagggccacaagcagttgaagcgaactctgcccaaagccggtgtttgtgagatgaatattgaatatgaagtacagggagaatagaagacgagttgctagagatgacccgagtgaaccacacagtctttccaggtacatgcaatataaacatagtcctcatgaaagtatttcctcagacttgatcaattgcaggtgatatatcagatacactttcttaaagccgagctggtccgcgctacgacggggtcttatacggatcctaataatatctacggagtagtccgtacgctgtaccccgtgctattccgtattttatttagaatctctgtctaggtagctatattccaaacacttccacccgttttacatcccattggcccattttcggcgccaagacagtgctattgaatctccttcagctgtatgacgcgcagaaaggggatctatttggtataaccatcgtgtgtgggatctagttagttagctagttatgtgtgtgctttgctaccactccgtagatactgttacaaaatgatccgaacaagtacaaaccttcaataaagtaagtgaggcccaatgaccgagggtcttgggcttccaggggttgatcggagctgccgatgaacccatgtcagatataaaagttagttcggattatgtcgtgttgatttgttgatttttttttcttcttttcttttctgttttcccctccttttctctgttttctgtttcttttttggttgtcttagtgtctagtgcctatccgaaacagccttataaggaaatagtggacgccgaacctctttgtaagtggcgagtttctagacgatccccgccaaattatctctggactctacaaatccccgaactgttcggacgctttctacttgatctcattctttgcatattttacattttccttttcagaatttatcttgctctcttcaaggcttggcttggcagctgccgtactcccgatctgttctgccttggatcttctcttctccacattcaacatcgcgttctctcctctacatctttacatttcgcttgattccctaggtggacttggggatttctctgatgtcttactatccaccgtactcgggcgcgccgggataccccccgcagcagccgtcatatcccccgcaacagcagtacccgtacgtttatccctttgctctattgagaacctacccgtctgacaaggatttgattgcagacagatgaatcagcagcagccctcttatggcggctatcccggccagtcctaccaccagcagcatcagccgccgccgcagcagcaatccaacccgtatggttacagccattcgccccagccatcccagtcctacggcgcgcctcctcctcagcaaggctacaatgtatgttatgatgagttttgccttgaatatacacgagattgacatgtatcaatcctccccaggctccgccgtctgggtacaaccagcacgccaaccagcaccctgggcaatcaatccaaggaagaccaggtatgcctaccatttcccagcttgaaaccacatcgctagcagtgaaagctaatcaggcggaaattaagcctacggtcaggccggcggtccgcttccccctcccagcaaccccgtcgccttcggtcacggcgctccccaaggctatagcttccaatactcccgctgtacaggaaagagaaaggccttgttgattggtatcaattatttcggccagaaaggtcaactgcgcggctgtatcaacgacgtcaagaacatgtcgacctacttgaaccaaaacttcggctatgctcgcgaggacatggtgctcctgactgatgaccagcaaaatccgatgagccagccgaccaaggcaaacatacttcgggctatgcactggctggtgaaggatgcgcgtcccaatgactcgttgttcttccactactctggtgagtaaaatgcctccatcgctgctatagcggtgaactaataagaactcaggtcatggcggtcagacacccgacttggatggcgatgaagaagatgggtacgatgaagttatctacccggtggacttccgggttgcaggccacatcgttgatgatgagatgcaccgtatcatggtgcagactctacaaccgggagtccggcttacagcgatcttcgactcctgccactctggctccgctctcgatcttccctacgtctactccacctctggtgtgctcaaggagcccaacttggccaaggaggctggacaaggcctgcttggtgtggtgtcggcatacgcacgtggtgacatgggcagcatggtgtccaccgccatgggcttcataaagaaggccaccaagggtgacgaagtgtatgaacgcaacaagcagacaaagactagccccgcggatgtcatcatgtggtccggcagcaaggacgaccagaccagtcaggatgcccagattgccgggcaggctactggtgccatgtcatgggctttcatcgcggcgcttcggaagaaccctcagcagagttatgtccagcttttgaacagcattcgtgacgagcttgcgaccaaatattcccagaagccacagctaagctgcagccaccctttaggtacgagtctcggattacttgaccgcaatcaattctgacctcccctacagatacggacatcctttatgtgatgtaaatggacttggaaatgaagataagggacgatgcttgtctggctttcaatgaagcatgctttcgtgtttaatgaattgccatgtatgtaattccaccatcggtgttccagtgaatattttgcctgtgggtggcgcactatttgtgattaatccttatgagtccttcttatgcgttgaaaatggagtgcagattagctaagcgtcggtctggaatcatcgtagacaactgccctgggcatctgcacaccaacacatatactctcactacgggaaactgcagttagcttcgttatctcgagaagatcaaggctccaagctctcatcaactatgtagacatgttcaactcgatatgatgggatccatcattggcggaagagctgaccgagtgatatggatggtggcgctgtacggattttataccctcaggggaccgtcatatgtcaattttgccccctaggagcccccacggaaattcatgcccccaactgatcttaatattcaatataacaagggcggataccagaaacgcaggacccgaatcaagcacaatgcagtcaattcgccagcaccgcgttctgcgcaggaagctccaacaacaatttgttacaaagcatgagaagcccgacaatgtctggactcacgagggccgctacgagtaccgcggaggagagatccacacagaacctggcgagccgaatgatgacccggctgccggacgaaggagggagcatggccatcgcacttttatatctgggccatccctcaatcctcgccattcagtccgatcacatatagagcgagaaggggatatcgagggctcggagtacgacccggtactctcaaccgatccccataccatcaatacacaagagacgctgggaaatacgcctgatattatggtgactggcgttgaaagaccccggccgtgtgacagtacgggcagtgagactgatatcgagtcattgaaaaagaacgaactcattatcgtcacatttgaaggcgagtgtgacataatggatcctcacaactggtcatttaaatgtcgactgtttacgactattctcacttcacttactggatgtgtggtcttctggtcatccacgatcgattccactgctctcatgacaaccaagcaattgtatcatactacctttgaggtcgagactttgcctactggtacgtggttaacactttgaatcgtttcaactagactaactgagatcatctagctatgtttctgattggttgtggagtaggcgcattgataacagcacctatatcagaactcttcggacgcaaccccgtgtacattcccaccatcatcgggttcattttgttcaacatgggcgcagggctttccgaaacagtggtgcagcgagtcgtctgccgcggtctagctggactcttcgggtctgccccggcgattgtatcagcagcatccctggtggatgtctggtcacgcattgaacgagtctacaccttcccgatctttgcgatattcatcttcacgggtccattggtggcaccaacaccaggagcattcgctgtcagttctgacgcggtaagctggcgctgggtagactggatgactataatcttcgcaggagtcctcctgatcccggttgtgctcttcttgcccgagacatacagcccgaacctgctgtactggaaagcaaaagagctccgccgcctgacaggcgacgaccgttaccggtctcccatagagttcagaaaatccacgttcacccaacgcatgtctacctcgttataccggccacttcagcttcttgcaacagaaccaattatcatgatccactcaatctacgtcgccctcctcttcatgatactgtacaccttcattgcgggctttgtctccatctatgagatgacaagcggcttcagcccggccgctaccgacgtcgcattcctggccattgaggtcggggtccttctttctgtactggcagtccccatttcaatgtggctggtccgtagagacatataccacagccgtgcgaatggcgaacagcgcccggaccccgagattagtctgtacatgggcatgttcggtgcgcctgctgtcccaatatcgctattctggatgggctggacggccagacatggagtctcgtactggagcccgctcgtcgcttcgggattctttggatttgggtcgttgtgtatcttcgtctcggcgtaccagtacgtcgctgattcgtacgagtcgtattctgcaagtgcgcttgcctcccttcagatgctgaggctcgtcgctgctggcgctatggctatagtcgcggagattatgtataaggagcttggcattgaatggacgttgactctctggggtggagtttcgttgttgtttttgcctgtgccttacttgctctactggaaggggtataaaatccgtgcacagagtcgctatgcgcgcagaagtgaacggagttgaggaatgtgtacatggaagccctggagataggggggattttaagttgctataaatcaggataattcagtactactgtcattactaatagtagccaatgactagttaactacatggttatacctacaaaatgactccgatttgccagtctcctagacagtacaatcctcagtatcatcgtggccctataatatcgttaatgactagtcataacgagtagtatacggtaccactcacacaatgcatattaatatgctttctgattgccgatgctgaaggcctatagaccttcctaccgttaagtatattctccccctagccataacaattagtaccagcggttatattgagaaagaggtcgaaagcgcacggtgtgtaagcgcaaacatgataatgaacgtcctagccagtgggatctctctggcagtgatcgcgtcagttatgtgacgaaccgtgttgggcctcccgtagagtagggttcgactctagcttctcggggtttccgttcgcagtccgtgatggtcacacttcttcccgccagctgtcgtgtcacttcgattgaatataactccaccatccacagcttctttcgggtttccacgtgcttcgctcccgacctgtcggaagtaggtagggagcggagcgcctagttaataccgttaccaggctgaggaagaagtcctcgggcgggaagccggttggcttgaggactatccacttcccatccgtaaatctctggagaaccctatcgctgggtgttccccctttcgaagcctgcttcgcccgtttcgttggtaggggttttgctccggagtgggacgaggcgatgctgggcataggtgacatcgtacttggaagcaagccagatcgttgtcggttctcaaggcatcgttgtgctaggagactccgggctgttctcacgggaatttgagttggacatggtagctgtaaagtagagcggttaggcatatgctagtcttataggctggttaaatacgcaccaggtaaaaaccgactcaagttagatgaggaacaaaccactcgccagagaatgaactcctcgtcacaagtcttgaccctggttttgtcggctatatcacagagcccgtccactaagcaaccatcatcaagattcccgcgaggccaatcgcattgcttttgctgttgttctatgatcatgttcggctgtggtcttgggtactatacaacctgccatctggtgcatcctctatatagcgcatcccaaatcggacctcgtccttgtagatataggtatatggtggtgcatgagatctatatatgtctatatagcccgggtggcacagttggcaaggactcagacctctcctagcgttggcgagagttgaaagtgcaccaggagaagggaacatggaagactggtgtttgttcctagcttgagaattgacaataagaaagtaggcgatggattaaattttttgtgaataatctcagatagggaagagctctgtaatataactttgataggaggatgatggcttggataaagggcctttgtttagatttctcgcgtcagcatatctgtgcaaatgccctggttgttttctttctctgcatcaaccctaatcttatatgaatgaacggataaagaaaattggggtttgattctattatatgaacaaaagagaaatgcagcaaattcatctcatttgtgggtgcactaacgctggctcatcgtaaattgggcgccgaaaatggctgtcggcggctggttcaaggccaaagtctgagatttataccttgtccaagatacaccgagggaaaagactaaaacgactttcatttaaggtgcgggaggttaaaggacggacgaatagaataacgtgttaataatagcttagtccactttccgccccacccagtctatacaattgtataaaatgcaaaaggcaggtgggtgaaggagtgaatttgtatgcgttgggagatgacggtgttggctccttggagcatttataatacattaataaagtattattagataatgttaagacgttattaagacgttattgaagctttaagaatgaattgtgttatagctactcacatcgacccaccctttagagcacctatgaactgttatacctggcatcttcagccatcgtgatcgacatttcaattgaaattgaggtcggtctttcggctggaagtgcgattggaagtgcgattggaattcgtgaccgaggggaaggttgaggccggggcccgatcagggaccaaagcaaaaggataattgtaccaagctagatatttcgacgattagatacgtatttgcaaagtcacaattttacctcgaactttctcttgttcaatataactgatccgaccgataattccatcggccacttgcaaatcttcactgtggcaggtaacatgcttcttcaagtttccagtcaggaaagggtgctaagaacagtaagctaagcatcgctccgtaggtgataatctagaagcaagcatgtgttacgcatttagggtctggctctctcacattgctgaccctgcaccctggataacgacaatattgcgcgccaacttggataatcacacggtcatcctcatcctatgttgtatatcatattggtcagcctcttgtatacttcctctagataatcactcatcaagtatcacttgaatgcagttacctaccctttcatatttcggcatcacaagttccccagaagcaacttcacgaacgtaacggagataagcaggatgcttagctagaaatgttggacaggcattaaccatggtgtaatatgactgaggttaggagccaaagaaagcaagggaaatttctttaaaggttgcgagaatttgatggggtagaccaaaatgccgcttgcctaaaaacctgtggatctacaatggtctataagatagggtcacgtgcatgtatcaaaccagtcgcgcttcgactccaaccacgcgttcaacctcaacattcgatgtctgattttgggaaaacaccggccttcgccgtaatctaatccatggaaactgctagaaatctacactgcaatttatcactgaatccatgctagttctggccatggttccgttccgtgatgtccatcatccttgaagacgatcacccccctgcggtgctccgtttcggtcccacatggtaccatgagattccttttttaccctatggattggagacaaccaatgatcaaggatctggatcacttaaacatgcagcaatgaaagctctgctacgggaccagtcggcgctgaagcctgagctgtttgaatacgttcactggtatttggcaaaatacctgtgggatgctctcaaaaagtagtaagtcatcattggagagttttttaaactacttccgcagattcttgagtctgcttgttcagatctgacgatctacgcagcaacaagcagacaatgcacatgtggaaaataatggccagcaattatcctgtacaattttatgagattagtccttactactgcctcaatgctggctgtcccaaaaagccactgagagactacatgggtattctcaatagcgatgaccttcgctggcgtgcaatcctgacgattgcaaccacgtactgtaccgcctcagacttcaccactataccaaatatcaagaatttggttgctctggacatttaccgtgagaaatatgcgtcgaattcccccccgctggatccagtgggcgttagcaacgacttgcaagatggatttgtgcgtggttggattgagtccgaagcactgcagcacctccgaattctcaggctctaccatcaatgtgaaataaccgttgcggcagtgggagctctacgtgagctaccggagctccaacttattgtggcgtacgagtgtaagaatatcacagagacgattcaaaaatacgataggcccgcgaataacatcattcccataaagggatggtcggcctgcagactcgattggtattgggaaactcacggaacgtcaaaaaccatcgacgataatctcttggccttgtttcatgtgtaccaggctagtctccagacacccggagacgagcattcgaaaagaccatcatccttaccaacgaatctcccgattttggaattcaaactaccaactgtggaccacagcagaagagacaagattgttgtccgctctcgctataatgccaagtcaatcgtattgttcactcgagatcctgtgaagcaaaagtttgatatcgagaagcgacgtgcaagagacaagaagaggactgaaccacccgaagggggagatcgtcctgccaagcgagcagtcatgaaagagcggggaccgatggacatttccaagactttaacccagttcttctgatggattgtctacgtaaataggcagagaacatgggttgaatcgcgcagtggaataacacctctgcgtcattttgaagcgatactccaacattatttcgaattttgtcatttggttagcggccataaagcatactacactgaccacagacatgttaaaaactagatgtggctggttcgtgggacttgctcatttcaatctgtatttcatgatgtcctatttaggttatgatatagtctgtttccaaggttcgaaagtgttgtaccttggaaggccaccccacatcacatgaggcgtatgtgagtcagtgctctacagacaatcgaataccctgatcgaattcattgctgcagcgtatggctttgctttgctttgcactcgctgaattttacggtctgcgctagaggaggctgtaaacagcatcttccaaggtcttcatgcgttgattatgccatatgttataatagatctttgtattctgaatggcccgtttagtcaccagtttattctgcatccgagtcaagatctggctcaataacagggaatgtcaaaagcgcagcgatgccacccagcccctcgagacgctttccgctttcatgatctgaactgagaattcgcacatcaccaccctctacatcgcggacgcggtccacaagcgccacccaacgtttacgctcagcgatatcctgtgatcggaacaagcgattcgaaacaatgagcacgccgccacctcggccgacagcaccttgttcaacagcgtagtcaacctcacgggggccataggtcgctttgttggtctccttgcgcagttgttctaggaagtcgtccatcaattttgtttcacgggcatacttcgtatcagccagcagactcttaacggcgggtgactggagaacctccgataaggaattcgtgtaccccgatgtggagtgcacaaccacaagactaggaaggagtcgcttgagcccaggagtcgttgttgatgcctcggattggatgtatttttggaagccagcggcgacgaacccgggggatgcgaggagcacgggccgtacagcttcgttgttggcgcctgaagtaagactggtattgaactccatttgtcgaagaagggtctcgagtgtaactttaaagaacttgttcattccctggcagtatgcgtcgttaatttcgagcccagacaatgacatgacagcagaaactcactttatcatgatcccctcctccctgccgtttccgcggcacagacatctcgatcttttgcttcaatattgtctggaattggccaataaagcagatatgagccagtccttcctgcatcactaccgcgacagcctctgcacggcgtttcccgccctcatccacagcgtccttgagtgactcaattgcaatactgtcccacccgacaccctctccatctgcgccaacctctttctctaacgtaaagttgcgattcaactctagatcgagggtatggaattgtccgattttcgtgtgcggtgtttcgttgataatttgtcctgatacatggagctgagagctctgcgggtcgaagtcgagattcttcacgcgaattacaaggttgagatgaacgcgcgccgagctcgtggacccggtatcctgaactgtggtaactcgacgaattgcgctggcgcgaaggatatcgcctggtcggatcaggttgtaggcgtgccactagatatagcgaattgtatatcagatgactgcggggtgctgagactgaaaatgagggattcaataccatgtcttctggctcatctgggcacaatgtcaccgttccagagccattgtgctcaattttgttcttgatgcaacgcatttttgcggtgatactgcacggttataggctgagggcttgggatggtaaatggcgtgttgttattgcgatgtcgtcatatgttgcctgaagatgcgcagattggagggataacagggttgtatgaaaatgggtcaaatcgtcgagcgctttagaatgctcctgtaaacatggatatatcgaacaaatcaacctaatatgagggcattgccgatgttgaacttgccaaactcaccccactatagaataatgccgtccattaccgcccggtcatcctccaagaatcccacctgttctgcagacgcactcattctgggcgattattttggattttcaatgggccatcagagaataaggaattgcggaatattctaatcctccagcgcatatattaaatcaccctgcgctgccagagtcacgagtcatgccttatcgataaagcctaaccctaatcagatcagattggggcatggaaagttgacgtcaaagcttgcagatgttattattggcagttccatgtggaatatgtaataacctcaatatgtaagccgtcaattactcatctgagccccacgtagcattcgtcagccattgatatagccgcatctagtccccttcatcgtccatccccacttcgatggcgtcaaagctccaagaaacgggcggaaatgactgagccgaggtggtccgtggatatcgaaacctttatctatcaagctaatcccctcatttgccttcttttacctttcaactatcaattcgcacatcatggctcccatttcgctgcagtctacctataagttggtctcgggttacgagatccccgtcgttgggttcggagtgagtatattggccccttagagttctgatatgtatgactgacacttatctacaaattaggtttaccaaacgtatgattatcgctgtataaaacccccgcgacagattatattgacttattcttgaatagtccctccgatgtcactgagaaggtgacccgcaaggccattgaaatcggataccgccatgtaagcaactgcaggacccatgcggcaatcgcttccagatttgaccatcctattacaggtcgactgcgccaaagtctacggaaacgaactagaaagtgcagccgctatccgcgggtctggagttgatcgctctaagatcttctatactagcaaggtgccctcgaaatgcatgggatacgagaaggccaagaaggccatcgaggaaagcatcgccgcggcaaaccttggttacattgacctgtatggatctccttgttctcctgaaataaaacatattagcgaactaacactgtgatattagtatgctggttcacgcgccctatggtggcaaggaagaccgccttggcacatggcgcgcacttgtggaggcccaaaaggcaggccacgtccgttcgttgggtgtgtccaactttgctatccagcacctcgaggagttggaagagtacatcaagagcggagcgggcggacaaatcaccgtcggccagtacgagatccacccatggtgcccacgcgaggatattgcggagtggctgcagaagcgcaacatcattgtcgaggcatactctcccctcgtgcaagcgactcgcatgaaggaaccagttctgcagaacctggccaagaagcacggtaagagcgaggctcagattttggtccgctggagtctgcaaaagggatacgtgcccttgcctaagtcagtgaccgagtctcgcattctggagaactcgcaggtcttcgacttcacgctatcggatcaggacatggccagtctgaagctcaactcgtacgcgcctgtgtgctgggatcccgtccgtgactgcaaaatctagatgacgtcactaaaataatcaaaagcctagcgtatggattggattagggaatcaaattctaagcatctcaaaacacactgaatatagatcaaaatatatagttagatcattgaaaaggtgcagcccaattaggtaatttgttgacttacgcgaccggcacaacgtatcaccgccgcgaaccaaaaacagcatcgacactcccaacgcgttcgggtaagattcaccacagctctctatccccatgatagtacacgcaggaggcagtcgctgccacggttgccctcactatgccggataaaccgcgtcgcgtcatattggagacatccaaagaagttaaacgccggtggcagcgcagcaaccaacgattccagttcaccgcatcccagatcgcacagctagatcgccgggaggagcgagaaaagaaagcgaagaagctacgcgagaaggaaaagaaacgcattgccaacaagaaacggaaagccgagcaggaggcgcaggcccgtgaggagcggaagcgtcgcggcatcccggatcccaatgcccgcgtctcctcgagtcagcctatgctatcaatgttcctaggggctgggaagcgacaatcacctgctgcaccggagcctgcgcctacagttacggagctcgaagcacatgatgacaattcggggagcgcgggtggagatacggaagctgaatcagatgacttggatgaagtattggaaaatgaactatctgagcttcaagatgcagatggcccgaaagagcctgaaggccaggatatcgcaaccgagacccgggcttcatccttggaagaagatgagttctcggactgctcggcgttcgacgacgaagagattttgaaaaaagccgacacggctgctattacacgagcaactgacgaagaaacgaagagcccccctatacccaaggaatcatcctacatacgaccttccccggctgtactcacgctagaatcatctttcgactctttccagtacgaccccgccgatttccttgaagccgaggcggctattatcacacaaacgaaaagtcctggaacgagagaccattccccacccaaggacacctcctctttacaacctcctttgtctgatcgaccgtgcagtagacccaccttggcgtcttcttttggagattcctttcgagacgagactgcggattggattgaagaagtgtttgcacgcggaagcggtgacccttttgacgaactcaataaagaagcctctgcatgattttacttgtacttggtaattcgctacattttgtctcgggtcttgcagctttggagtacctacaatgtatggcgtacatttccctgaagtcttggcattatggagatcgggtccggtccgacagtcgggtgatatccgcgcagttcggatacatcacaaggcccttcggttcgggagactcgaatattttggattagaagagatgaattgttccgtcgggatgaccagaaacagtctagaggattcagaacattgtgtacatttgtcttattattgtagtcagaatcttaccgggaatgacgttacatacctatcattctatagatccccagggctgcccgcttctttattcctttattccttcattactttatttcttcatctctgatcttggatcgatcccattcccaccggactcctaatccacaatgccgttcgtccaagcaaacagccatcgtctttactatgccgactctcaccccgccggccctccccaaaacggcctaacttttatcttcatccacggcctgggttcctcacaaaactactactacccagtaatcccgcaccttacgaagctccaccgctgcatcacactcgacacatacggcgccgcccgctccccgtacaccaatgacacaatcacgatccccagtatcgcagaagatgtcatcggcgcgctggactcgctgcatatcgccaaggccgtcgtagtcggccattcaatgggcgggctcgtagtactagagctaggtgcgcggatccccgatcgcgtactgggcgttgtcgccattgggccgacgcacccgtcagatatgttggtgggggtcatgaatagaagatcggatactgtgcttgagtgtaagtttttcccattcgaagcctgccgtgttgttttatttcatcatgtactaaattgtctgcagctggaatggagccaatggcagataccatcccgtctggagctgtcggctcgcgcagcaccccgcttcagaaggctttcatccgggagttggtcctaggccaggacccgaaaggctatgccgtgatgtgccgcgctattgctgccgcgaagccacctaactatgctgcggtcaaggagcctttcctgcttattgcgggcgaagaggacaagtctgcttctatggaggggtgccggtacatctttgagcatgtctcgagtgagaaaaagtccctcgaggtattgaagggagttgggcactggcattgtattgaggctgctgacgaggtgggtgagttaatcgccaagtttgcggattctgtgaatgcttgaatgcttgaaatagtctctatttagaacggaatgatgaatatgccagtaatcatgtttggctttttggttatcttcaatgctatcccgctatcgtaaagtacatcagaaatcacagaaatgctacttgaatgctgctgctcgctcatgcgccattggtactggtctcgaacttcaccaacttgacatcatattcaagctcagtggcagcttgaggatcgccctcacgcggcacaaagtccacgacaagcgagtccttgacagcaaataccgagtcgttgtcaaggtacttatccttgctgtcgaagatctgcgttgtcaaaggacggtaattatcataggtagcctaggcaagatattagcttctgtctcaacctgatatcgaataccacgccaaacttacaataatgtgaatgtgagcagggcggaaagggtgacgatccatcagctcaagaagcttgccagcaggaccatcgttgggaacggggtacggcgtcggacgcatgcagtagaacgagtatctgccatccgcatccgtcttgaacttgccgcgcaggttgaactcaacctgctcggggtcctgctgctcgtacagcccgttggtggaagcctgccacacctcgaccgtcgcaccgaccagaggctgcttggtctggaagtctacgacgcgaccgtgcatgaacgccatctcggcatcagcaggttttgtcttgacgatattctcgccgttctcgcggtatggggtatcggcgcggaagaacggacccaggatggccgtggcggtgggtgcatcctgggcttcctcggcgagagtgaaggtgatttcgtcgacgagactgttgtgcaacgaatacatgttagctggtgactttgtttcactctcgaacaacacttcggcttacgattccagtcccagtacatcgcacaccagctgtccctcgttccgcttgtcgtcgctcatctgtcctgcccaattgagcatctgcacgccggccatccactcgtcgacggtgagctcctcctcacgcgcaaagtcgtgcatgtgcctgattagaccggccatgagcttccgcatgcgcggagtggtcttaggacccatcgcgttgatgacattgtccgtgaagttgggatcgaagcggtgcgtcgccattgttgcgcgtaaatgaatatgttttgctatgcgtatgagtgcggcttcaaatacagaaagcaggagagagcggtttaacaaggggagagtatgcgattatcgaaaccccttgagaccgttatataccacacatggtgatccgacgggattcccagtccgtggacctgaccaaatacatgacgcctattcgaggacaaccccgcaaccccacgccaatggcatgattggggtatggagtcgtcggatgtgcataaaagtacggtgtcagtcggtcagggacttcggaagaggttgcacttccgatttccccgcagtcgggtagctgcagagcttggcagggagcttggcgataaattatttagagggttggattttgatgggatgaaatgccaaagattcaatatgaatatcgtacaaatagaatgagttgtagggtgttttatatatcagaaagctacaagcagcttccgaaatcccaacgcaatacgatgtatatataagtgtcatggtatgttacacagctttagccgtcggaattaccgttatagtaagataacacgctgttagaccccagggcctttcggctgggtgaaacctcagccctataatcgaagtggggacaacttgagatggaaaggattccatactgtaatggtagatcattaggaggattatttgtattccccgtggtcgtctgtgtcgagctgaacaagtatatgatactccctacagttggggtggcatatctccatatcacactcatcgccgggccttgggattcctcttcgtaagagtctccggaagttcctgtagagcgcccccgttcgcccagagcttacccaacccgaccttacgctccactaccacatcgaaaaagtccagcgagacgaacttgtccgcctcgcccttttctgcctgcccactcgccacgagaggtatgccctcactaagaatgacgccattctcactgcgccataacggtacccctgcttgaagtgctttgcgcacatcgatataaatcaaaacctgtgcatctcgccgcataccggagatgacgcgcgagtcatcaagcttcggtttaccccccgcagcatcagcgtgaatagcaagcactgattctaaggaaggtccagtagcgaagtgaatgtggttccggcccatacagcgtagtccgccggattgtagaatcaaaggccaagtcgcgtggaacgtgccgtggacgacggtatcgggtagtttcgattcatcggacaaagaaagcggctcgaggaaagaggcagcatctacggccttgatgctgtggccttgggtcgcgcgaattaaaaaattcgacgggtcggtatcttcgacggctaatgcttggtcggtggctgtttgttgcgcttcgctcagtgcagactccaggacggatgttgtagcctggtcttcgcctaggatagcgccggcttcgtgctctgcatcgggggttgtcactagtgttgttgatgcttgggttctggatttggtggctcgcgcggatggaatgtgaagaagggcgaagcgctttttatcggacgagctcacggcatatagaatctcggggaatgtgacttttagcgatttgagcttcctccaattcaactggagtcagatatagtcagtatatcgtaggtcattcaaacaacaaagctgcataccacgtctggcacgctcgcataaccttgtgcgttcattttcagcccctccttctcagcggcatgtcgcagaagcaagctcaatgctttggagacttgaacatcgcgactttggccttgaccatggccacggccccgcttatctttgttgtctttgggatgagccatatttatcgagagattcaaggagttgttaagaataatattgtagtggggcactccaaatgttataagatgcggctctacaagacctcgtgtacctgattatctttgtaaatagtatctttcttctcattaaaataactttcaaggttaaaaacgataattagcggctggaaaaaagcccaaggtgttttggcgagatgtttaagtcagtcgccctctacacagttatttaggcggacttctgatgtcgaaatgacgcacatctattatctacatatcaggctaaatcctctttaatcattcttcttgtcaattgggtatagaatatcgcggaaacacaagctcatgacttagaacggccatgaaaatcatcaccgatcacagatgcagttacactctgctacgggacagatcttgtgtcgtttgaaccagtcattggcatgacttgcatggaacccatggttacaatggatgcaaaacaccacaaaccgccgcataacttcagtctcagtgggctcgcgagaacccgcctcggcatctgctgcgctactggcgcgtgacattggatctggcgaacccagccacaaagtgcagatgccgcaacgcggcatatgtcgaccacaccgcggacacacagtcccagacatgactgtaggtgctagagggttcccggcggtgggatgcacagtttcagcacccttggtagtggagacctgggaggaagcgtcgtgctgggtgagcggactcgtgcagtagttacaggtgagactgacttgctgcggcggtggtggcatgagtttgcgaccgtctgcagtcacggcgaaacgacgagagccaacgtcgaatcgggcacgctcgagttggagtttccaggagttcatttgccgccggtaggtctcacgccaggcctcaaactggacaatgtgtttttggttgctaacaagccgcggcacggtatggctcattgctagcacgggagtttggacatcattgaactttccaatataagattggaaaagacccatggccaaatgacccaagccagtgaggacgattccttcaatatcgccttgacgaattgcttggcttgtagcatccttcagatactcagttaattcgtcatctggaagccagcgtagcgcgacctctacgcgatacttcagaggtagtgtggtttccttgataactgcattccagtcgcctttgctcacaagggctaggatcgcccgggcgtatggatccgtgagctccttcgcgatttccgcacaagtatcctcccagtctgtgtcagtgtcccccttggaggcacccgcaatcgccatggctagcaatttatgtgcttgagtggggttgttgcttcgaagcccgaggtaggctagcttgggctcatcttggaagacagccaacgcagcggctttagtatgctggttttcgccagataaagctttcactgactcctctagttcacggtaggattgcgttgcaccacagatacgaaggcagagttggcgatggtcggggtaagccgtgtcacaaccttttgtctcaggaagattcaactgagttaccaagattgccactgtatccgcaaatgttttagcaccatccttcttattactaatacggcgttgttcgagaccattgcctgtgctctcgtcagttttgagaaagacttcaaacttaagcgaagacaaacctaggtcattattccaaacactgctcacacctagataattcaggtccaagccattgacgaccattgacgtcccggaagactcttttcgagcacctaggaaatgtattagatgtttgtttgtgtccccacggaaaaatgaaaaactcacgttcaatccagtcccataagtcttgtagagcttggtcatcagatgccacctttcggttttgatcctcatcaaacaaataaccctctttgcaccggaactggttgattgtgcatagagtgagcgcttcttcggcagtaagagggacccccattaccccgatagccatggcgcgttccctattctcgtggcttgggacaggctcgaaatcaagattctttggcacaaacagttcatcatttgcattttcctcctgctcttgcgaggctgagtagactcgtgatctgatttcttcgatcaggccggatatgggcgcaatgtgttcagaaagtgggtgaatcgatcgcacatctgagtcattcgatgagatcccataggccaatacactccgtgaagatagatcaattggtgcgcacgggggccgcgcggtgatgatctgaggttgtccattgccgtcgagtgcgatagaacttggttgaggggacaagctaatattcagggaatcgaatgaaacaatccggtccttttctctgtagccgcgagtcgggttatcaaagggtatgcatacgtcccgtacgtgcttggtgtatacggattctggataatttctggaagatccctgaccaagagtctcgtctatcgaagagcgatactcttccggcaggtagtctttggaaatgtcgtaattcttgaaatgaccgctgctggacagcgcagcgagactgcctcggttcgtccgcgaaaagcgcaagctccagatggaggatttcggatggaaaacattcttgagttccaaagcaggtgtcgtttgacccgagtctgtggcactggcagaagaaccaattgctggggatgttagtcgggttccaacgcggcggtcccatacgcagatggtgctttcatttgttggaatgcaagacgcaatgtagttctcatcaagccagtcaatagccagattatgtacacatcgagtggggaattgcaatgatggattgccgggtccctctgttacgaaatcagctccaccttcgtgaatgtgaaaccaggaaagacgaacctcttagatcatagatccgaacaaactggcctttgaccccagttacgattgtatcaggctggtcccggaaaaacttgatactggtaataggctctgagctggcgagcttccgtaaaggctcagtaaatcctttacttccgccagcaggactgagtcgttgattcacgtcccaaatgttcaagcaaaagtcgttccgaacgcgatcgaggcccgatgccacaagaccatgtgtactaaacgccacagcattgcagtaccgttggttgcggactggaaatgaaagagattccttggcatccccatcgaggcgtaggatagtagcctccccagacgactggcccacggcgatcaggttctcatttgaagtagaccagtcgaatgcgcgaaaaccgggtacattggtcagagtggagagcacttcatggcgtatatactttccgtcaaacccattcaccctacacagacgaaatgatttccccgtgacgtcgacggacaggaagcgttgttccgtggccgacgaggtcggggaccagcgaatggcagactccatgctggtccttttagcaagcttggttcagatataacctcagtagcatgggtatgtgcaaattgccaggtacaaaaattcaagcgaccaattggagtaaatcaaatcaatgcgacgagagagggccgttggtgatggtgatcaacggagacgctcattggttggcgccaatctggggggcgggccgataaatccgccgatatctttttttcttatcgtttttgctgtagcttcaacctctttttttcctttccttttctgtcagaccaacaaacatgtctacagacactcgagacccccgtgatcgggcagctcccccaaagaggaagtcccgggatgggtcagaggatgttcccccggcccgcaaaaaggtgcaccgcaaggccgacaaagcagatggccaagtccaattcgaggaatacagcagcaaaggcgatgcatcgaagcccaaagtgacccggaaatacaaggacaaatttgctcccaaacctgaaaaggaatacccgtcgatcaacgatctgaaaaagcgaattcgtgacgtgaagcgactactcaacaaaattgatttgtctgccgatgctcgcatcttgcaggaacgtgccctcgctggatatgagcaagatcttgcggatgaaactacacgcagagaacggtcatcattgatcaagaaatatcactttgtccgattccttggtatgtggccgatatgtctgaatgatcttgtgattcccgctaacgtactgtgttcttatggaatagaccgcaaaactgctaccaaggaactcggccgattgactcgccgcgagaaggaagagggtctggattcgaaacaaaaagctcgtcttgcagcaaagatccaccaatgccgtgtgaacctcaactacacgatctactatcctctcacagagaaatatatttcaatctaccccaatggaaaaccagacgcaacggacccaaagacagaattgcaaacgcaagaaaccaaatcggacgatgccaagcccccgttgtggtccgttgttgagaagtgtatggaagaaaagacactggaccttcttcgtgaaggaaagttgcgcatcaacgccaatggagagaagattcaagctccgtcgtctggcacagctacagctacggatacccacaaggagaagagcaagaagaaagatcaacagaaagataccgatgctacccaaaaggacaagcatgtttccaaagacaagaatagcagcaagaaggagaagcctgtacacaacgagcgggctgctaagaaacacgaggcaccacagcaagccaatgcagaggatgaggatgatagcgatggtggcttctttgagtaaccgattcataagtttgatcattggtttgtgtcttatttgtcttgatatccacactagcattctatacattctattgcaatataaccaagcgacctgttcaaaaagttcaccgtgtaataaccgggttctccacctgcatacatcagtgcctgtgatgtatgcccatagacgtatagttgttagccggaacacgaataaccgattttactttataaggaataccatctgttgcatgtacgaacggccgtccaaacgttgtaatagctattttgaactcacaccagtctacttagcgatccgccacccagtgcgtattgtagagttatagttcgtaacgcgattaacgcaataagtatgtataagttggcttattcgtttactttcaacctttcaccttcccatgttcctaatcaatcctcatttttgcaattagctctgctatcccaaccttcgttgcattgagctagcttcagagtcaatgcttcaagtagcttagggctacataaccacatcaacctctcacgagttcacaggctgcgaccactggatcaatacctgtgacctcattactgagatctgaattcgcgtctatctcgcatatctggcttttctacacatctactttgcgttgttgtgtctctcaattcgactttcatacttgtcgccatctcattgtgacctcgctgtccactacaggtaagatatcttgcaagattaccccctttatacttcgatctatatccttatgctctattcatgttcaccttacgatgtatcttgctgcatatggcgacttccatattcattgacctcctggctaacaaagcgcagatcttccaatccattctgaattctttcaagtcaagtcaagatgcctccagagaaagaggccagaatggcctgcgacatgccaggtagagcagacttcctcaaacaacaggaaatccttcgggatcattgcgcaagcgccctcaaggagcacctcgaagacaatcccgatgttatttggacacccgaagatggcgaaggacagccccccaccacgaaggaagaagaaactcagctcaaactgatcgtgaacatcgagttcgacccaaaaaccgacaagccaatcttgcctccgatcaacaaccgactatcagatgagttggtctatcttgtgagcaaattcacgaacgccctcgaactgtcacgtcgatacccatacgacttcgacaaaatgggccatatcaaacccgaacgtgtgtcttcaggaccttcccctatcatctgggctcacggcctccctttcttcccaatctacaaagggtattacatcctctgtggacgcgaacacgctaaatgcattggctggttgctccatgagcgaaccagggagatcatgcaagccaaccccagctggtctgttggggcggtcatcgcacctgaaactgccgtgagtgctcagcatactatcactcgtcagatgacacagcacaagccttatggcccggagagagagtcgcgttacaagggcaaagcctcggctcgcgatttcgtggctgcggagcaccatctctgcgctgttctgccggacctgatcacccgtgagattgaggtcggcccgttgtggcaagcctggggttacaacgttcgttgtggacctgtgatgcgtggcgtgagaacaattatcgtcccgaaggagtttttcgatagccatggtctcgaagatatcgactatgaacactttgctagaccgtacgggaaccacctgttagacgaggatgaagagaccgatgatgaaatgaacgcaggtggtggcaatcatcctggagatctcgctggacagagtgatgaagttgctagcagtaggaaccggtctgcttcccaaatggacttcggcatggacggcgaaagctcgatggatctttcaaagcaggccacagatgggatccacaaagaggtctcggaagaggacccagaagagttcacagaagaggctatggaagtccgcatgaaacaagtcaccggggaaatactgaaagacctcgaatccacgccctcgggccttgaggaggaacaacatgctgtttctagcagaattatgaacactgagctcagcttgggtatctgggattcaattaaggagttcattgatgagcgcggccacgatcagaccagcactgctgctctcgcttttacggatgctgtgattcaaatcgctgcacgtgctcaccaaacccaggtgcaactgatgagcaaacaacctgaaaccaagcaggcagtgactgatgccaccactaaaaatactctccctattgacctgccaaatgcggagcaaagcgcatgcgaacagcccggtactcagcggttggatcacggtgcagctcgggacttgtctgaagttgacgacgagactggtctcgactagagccaagtaccagcggaggctgtgcaggatgagggaaatttaaaactaaaaaagggaaattgaggtcggagatgggatcagaaatgagattgactctatctttaagagagatagtatcttccaagtgttgccttcttttctagggcttcatggtattgggggattgtgcctttctctttttgatgtacttctttgctttttctttctttccagtgacacgcagttcgtcactgtaattgcaattatttctacattacattattcttaatgccggcatgtacgccgcactacttgctttctttgaaaagtcaaagtacctgtctatcacccgtaatatcatctcaggccaaatagttcagagtctacaaaaagcccactatcagcatcgcgtagatctatggctacaggataatttggaagtgacgtgtcataaaagcagccaggaaggcggcataaatgtcaaattgaaaagctcaggaaagacagactaaaggaaaaaagaaaccaaaaaccaaaaacaccaatcatctcgccggtaacccctctagatacgtatgctggagctgaaatctcgatatggcaaaagatgtcaacgtataaaaagctcatataacatgcaggaaagaaagtccgaagttggcgccagagctaaaagcagggaggtgaatgtggtaagatgtgaggatagatggtaaacagatatgaaaagagagagataaatggccaaaaaacaagtcaaacgcaaaagaaagtgtgttgcgttgggaaagatgttgtcccgaaaaagaaaatcatatcgtgcgtaattcatagtaacttgacaatgaccattggatatgatcttcagtttcaaatggggtgtcgtccgggaaatactagcgatcctgcgctagcagagtcgagcagcgtcttgagtctagctcgaaaaacaggtgttcccaaaacacacatcaagaggcgtttacctcacatgacaatacagctaccgccactctgggctcgtctgcgtctcccgccaggagcagagacagagcctacgccggaagcatcgttctcgtcttcgtcttcgttgtacagacgctcggcttcacgggcacggcgtcggcgtcggcgagcaccagcaccagtggcgccggcctcctcggtggctaccatgtattcggcccatttccggtccagccgggatgcagcggtgagatcgccgcgcagaacacgtttcgtgtgttcatcaacggtcatctgccagccgtagaaacatttcagctggatgatttcgttgggataggttggtgctggcgagggcgagggcgaggaggctggagtgacgaaggtacttgtcgatggggaggaggcgtctgatgtttgtgtcaccgtcaccactgttgcaacggctttgcgggaggcacgcgggatgtatgcgttgctggagaggacttccctgacccctgcccaggtgacattggcgcagtcgaatatcataaggcgcatcccgatttgggggaggtcgtcgctgtatccgcggcggcggacgcggaagctggcttccatcagggtcagatctgagactctggtgttgtccatttcgacggatcggagtctcgggcagttcttcattacgcgaagcattcccgtgtcgctgagactctcgcagtagctgatgttcaagtgttccaactcttgggcacatggagattcagccagctgcaccagggtggcgtttgtcaaattctccaaatcctccagttccaaatgcgacagttttggcgtcgtgcgaatgacatcaatgacggattcatcggtcagctcggagcactgagaaacctgcaggccttccaaatctggaacgttatgggccaggcttttaaatccatcgtcggtcacttcagggcaattgtggaggtccaaatgacggagttttcgaggtggaacgatagggcgatcggttagaatatccatctctgggttctcgccatggatcagcatcttgaggctttgatcggttaggtcggtacgactcatgatcaagcgatccaaagtattgcgctcgaataaagccaaagtgaatttctcatccttgaacccgcgaatttcgctggcccgaagatccctcaaccgccaacaggactggacaatccgaataagaccggaggtatcaatatttctacaccaggaaacattcaacgttgcaagctgcggacaagaccgtgcaatgagcttcatggccgagtttgtaacattcgacagacccgagagattaatatattccaagcggggattacgaagaaggaaagtgtagatggattccttttcgatgcgacaaccctcaagcgagagattgacaacattccggcatagatccgaaatacgatctccgtccgaggaccatttctcacgcatctgaacgcagcctctgagattgaggtctcgaacaaacggaccaccgcaggtgataagcttaagcaaaacatcacccgggatcttagagtagtactcggtcgtatcaaccttggaccataattgtccgttgtagcacatctcattccacgccttggatacaggggcacagcatacaatttcctgcggggtgaggtattggaagatcttcaccttaagctcctgtggcatatcgccccaaaagtcaaaagatctggccggctgggactctggaaggatgacctcagtctccaccttcacatccaccggcgtcgcgctgcgtggtgacccacgcgatgctggcctcatatcggagggcataggcacggtgcgaggtacagggaaaccagggccatcggtctccatcaaacggatgcgagcgtttgcgccctgggactcaccgggagaaccagaacagccgggagtagcagatcggggattgaggccgccatagagctgggaggaacttccattgcctagacagggcgagtaggaggtcgacgatagcgaaacacaagagagggaagccttattgtctcggcggtagccagtggttgacgaggagcgtccgcgtctggtcagcgtcgggctggacgacatgcgttggagactctgcagtaacttctgacgacccttgagtttcggaggctgctctaatgggatctggccggtcgaattggtcggaatgttcggagagatactccccggcgagggtagggccccgtcggatacttgggaggccattttgccaacttgatcccggctgtagcacctgtgatctggcccacgaatatcttgtcgcgtcttccggggggcgtcggcacggtacggaggatcacacgagcgaggatagtaacggagggacggtggaaacgatagagcgacgggcgcgcagtcaccgggctcttaaatgggcatagtgttcgatctcaaggatgaccggtcttttggatattagcgatctgaaggtcagagagacatagagaggaagtgatcagaatgtcggtggggaaaaatcacattgaccgttattgtttgttgtagggccacggcgaaggaaccgtggaacaggtttcggcaaagataccgtacagaaaaccgagagaaccgaaagagccgagtagaagatacaaagggcgggggaagttgcgaaaggaggagagaaagagaggtgcaaagaggaacaagaaatggcggaatgcagagcggagggaatgcgatacctctgctaaacctggcactggccttttctcacatagcccgacgttgtactgcgcaagtacctcgcccctctacgttatctgcttatcgcttctcgtctgttagtactaggcaccggtatatacaggcatgtgcttgaaccatttcttaatattctatatcccggtgactttggagtatatcctagagtatatcctactttcatttctacgctacagaatgtcttgacacagatcgtctaatgtgaaaccaagtgcacacctcggctgacgacgccttgaacagaagatacaccgaattcgacgccacccaagcgggaatccactcgaggcaccgatccagggacaccccgaaggcgaagtcgttcctgaatcctgcgaggcaacccgttaaattcattttcgcctctttcggactattttcgctggtggggcgcgtgcggggaagacgactaacccgtggtacgatggcagggaacccatggaatcaaacatgccatatgtatgtcttccgaggttcgacttcgtattttacggtaagtttcctgtttgtctcgtttgagggttttgttttggaagtcaaggcaccaagtgtcagtgtagcaacatattcccgaggtccttagctcaaattgctggtatcaactccttaaggttgcatatgaagtggagaggtgatagtcatagcctaggctatcgtagactatttgccagaaagagacgtacgctaaatgttccccgcaatctaatcaaagccgtactccgtacgttgtatgtaagtctgccctcttaggtctctaggtcacataaagagatatgcaaaaggtatcgcaaattcaaatgccatgaaaagggggtgaaaaaagctcgataaaaataaaccccgataaaagaagtaagacaaatcatgcgttgatgttcatcatcatcatcaacgtggtcctagggaagttagaagaacagacactcgctccacaccggccccgaaatgatacccagtttcccggaaaatttggcatccatcatcaaaacgtaactttgtggggtatcgcgttatttgtgtttttttgtcaataagtaaaaggcggagggagaagggagagtagagtcgtatgagaagggattcaagtcaccaccatccaaggatgttcaagcacttcggtaatggtgagtcggttgtcaacgtcacgatcgagcatcgtgcggatgaggtcaatgcagtcttctgagaaaggaaggaaaggaattcggagggggtggtcaaggatctcatcgacgttgtagaacgggttctctttgtagacgatggtgtaaaggagaatccctagagcccagatgtcctgttccttgcctcgatacgaccggccctgtaaggcctcgggcgcggcataatctaacaaacatagtcagcactgaatcctccccggtcaaagagaaggaaacttaccaatggttcccacaaagacatcaaatggcccgtttttgatatacgccgcactcccaaagtcgatcaacttgatccgtccctctccatcgagaatcacattctcatccttgatgtcacgatgtaccaccagggctttggtgtggagatgattaatggcgctcgcaacctgtcggaagatgttctggcactccagctcgtccatgttggccttgagctcgatataatcgaacagatccattcccggaagcccgtgaggagtcatttcaatgtaataattgatatcgtcctcgaagaagccttccatctccacaatgttagggtgcctgagcccatcccgccgtaggaagtccagaacatggatctccaatggcacagtcccgagtcgccgatcccgagtccacgtatccaccaggatccgcttcttcgtgacgaatttcaacaccatcttcttgctaggctgcttctttaaacgggccagtttgacttggccgtaggctccttgtcccatctcttcgagaatcacgtagtcgttgatcgttcgtttcgccggagggtcgttcttcgcattggcagccgagaccggaggaacgggctgcgggggacgggtggtcagaggctcagaggcagcctcactgagttgttgactaagtgctgacgtcggagcttcaatctccacagaaatcttggggttttccgtctgggcagcaacaccggcgtctaaagggcgatctgaatcagggtcatgtgtgggtgaggtaggcttagaacttgggacagatgatggcgacaggccagcagcgggtccagcagcgtggagctgtctcgagtaggttatccacaaagcatagaccaactctgtgactgcaacggtatcatcactctcatcagagtcactggtgcgatcactgcttttgctgcttttgctgcttttctctgtcttgtcctttgagaagcaggtgccactctgaaccacgcgcagttgaatgtccacgacaatggtcgagccatcccgatgcttggcaagcaagccacttggctctgtaaacacagaggcggcatttgcttttccgtcgcggagaatagaaagtgtccgtgcacgccggaagctgtgttccggtatgacaataccatcaactagtggtacgttgtcctcctcggtcaaaacgtctagcatctcatcgaaatcgggtacaagctgagtgatgtgaagtccttccggtctctcttgaccgaagagaaccgaagagaacacagagttggagctgatcacgttcaatgacgaggacgagagcaccatcatgcctgcgacatgaggaaagctggagacttgcatagtgtaatctccttctcccttgccgaccgcgacgggaatacaaacgccagccgcagtgcgggcggcaaagtgcctcagctccacgattttagccaatcccttctcgagggatgtctcaagagattccgatggcaaacaaggtaaaaggtcggtgatcgactggcctttttgaacgacagatgggccccagattttttcgacttcacctttggcactcacgactttccatgaatcatcacactcgatgaaggcaatattctctgttatttcttccaggacccagatcaggccaccacgcttttccataacccagacgctagcggatccccgtgacccattgcgcttctgaatcgggaccacatcaccgcacagcaagacaccgcgtgacttattggccgggtggttgttgtttcgggcgtttcttgtgctggagccatatccgtcatcagtctgcgctctccgggactgttctcgtgaagatggtttgctgaggagttgtgctgtcactccgttcccaagacctcggtacttgggattgacggcggaaatgttagctctttcgggctgaagtggcatgcgggcagcgacgtcagtgctaggatctcgaagtttagccttgagccattcctggtgttctttctgtacaacctccaggatgctgagatggcgaacttcggactgaagaacaccaaagatgagacacgacaaatcattagcggccagaatggtccatggttccttggcttcggtcctaaacacggcctgggaagccggggtccatttgctgctatgggcgtggagggcggggatctgaaatcctaatccagcagacgagggattgagcgaggcgaaaggatccgcggaagaggtgtatggttgtgctagagtttccatcagcttgctcctgatagagacagagcataggtccgtgtatgtacgttttaagcttacgcgcctggatgtaggtgcagagaccaggtccctcctttggttggagatacgatcgctgggcaccgggctcaacaattgggagctgtcagaaggatgtgatcccaaaggaatggaatcctgggcaccctctcgggtgctgaccggggaggaattgccgtctgcgaaggccttctcgaagatattgtcgctattaatctctgcgggtcctgtgctgggtccacggccatggagttggttatcctgggtttcgagaatattcgctcgggccaaaaggtccatcataccttgcatctccgtgtccccactggcgtttgcttgtgcgctggcgatcgcggcattggtggcggcccatcccatccggtcgcgcatgaaatcaacagaccttttgagaatgttctgacggctgtggagaaactcctcggactgctgggcaaaggaaaaggagtgtagcgactccagtggaaaccggtgtaggtccgctagatccgtgaaacttcggctcgacaaaagattggtgtgagctcgagaagatgagcgagaacggggagagggagaggggcgctggccagtcataggtgctagtgatagcgacgaggaagacatgtttggaagggtcagtactctcgagggttgattttggcgtatacgatccagtccagatgggccaattccatggtcgctgtcgaataacggggatctgttggagtatagaaggtgtcaacgttatgttaaggagtcgaaagaatataatcggctgacctggagagaggttcgtatcccgaagaaacactgcccgccgagctcctgagttggtctgtctgtaaagaaaggttgtatccggactcggattcgggcgactcagagagaggtcctaacggcgacgaaagaggactcggctcgcctaagtcttgatcagcgtgattcactagcttatgatcaagtcaatcggcgcgtctcggagtttccattccatgggcctttcaggaaacgtgacggtttggaatgatcagacgcttcatctccacggtcagatgcatatctgagcatgtgccagcgggtgaccgtgatcggctggggaaaaagcgattcgcgccctttcctttccggtgctcgatgagtcgtaagcccaatccgagtaccacggtaacccgttcttctcgccctcacctccactagttccccaaggcccatgaaatgagaaacaaagactaaacgatcaacatgaagaaaaagcatgtgcgcgtcactgaccatcagggttgtaagccgaccccatccccgaggtctctcttctctctcttctgtctctctttttgtagtttttggttatgctcggctttaaattcagatgatcagatgggagacaaagagaaataggctcaatggaggcgagcaatcgagaatgtatcgagggtatgcgacatgtatccggtcattcgcaactgtgacggggattgggcgggcagctgcctcgtagggtctcaggcggcatatgtggcgtcgcggctgggcacgcagaaaggtaggaacaagcagaggaggtcgaggtgaatctttcaagggggaggaaaaagaaaaagagcagcggggaagagagggtggggagaggaaaatgccagatgcgagaaaaagggaaatgggccccctccgtgatgtaataactcatttttcctatgttttctatgtttctatgttgctacagccatttctccttcgaaataaaattatatagaagacaaaatgaacattttatcttgcattgacggtttgtcttatccagatcggctgatcgacatttctatcccatgtggcggaggaatttgagaatcagcccttgagatctatacaagatagaaatcatggctgatatatcttaaatagaaccaagtacaaagctaccaccctaatacgtgagtccacttccctcgctccgccaatgagatatgccatggataagttatttcccatcgaaaagactcgagatgatgcaaagtggctttcttaatagatccgagcgtcttaatgtgggactttgacccctttggttactagctttctatgaagttgaaagactgtctcacatggtagatcgaggcagagatgggattgaaaaaactagattctgccaaataaatgtctccgttaatggcgtggtctgtaacccattttctgtgcgggaattgagtgataatgcagcctggcaggagataagaagtgggactagccttgacccatatgtccacgggtacttccagtgcatacgcaagcagtgaccttggcctaatccggagatatcatggtgggccagtccctgacagagggtcccgagagccccgaaggctgtacagcgccaactcactatgctcggagtcggaccccagattgtcatctccgctcattccgaacaaggcattgggtttgggtttgcctcgagtttggtctagatgccgcgtctgctcaggtggcggcgatgtcgagctaacaaacccggacaggttccgaccaccgcccagcatccacgagaatcccgaatcggtcatagaggttcgcacagttgatcgcgagggtattgtccgcgcactctccttcttcctgtgtgtccgacttgctgtgtctaggatagaattggttccactctcggccttcggcccggtcatatccgctttgacagaatttattgttggggattgaccctcgttggccacaattttgccttcggctttacccgttgtggatgtgattgtctcttgtaactcggttggttggctcaattcaccgtctacacgggggtcaagagggggatctactggtatcgaagagtctccaaggcagatctggacactctcaactttgaccagagcctgcttcactgcgttggtcgtatcagaatccaggtccttgatatttgccagctgcgatccaaggtcatccagcgcctcgcgcagaatcgttgccaacgcctggttccttttctcaaatagattgatcttcgtttccagtctgcccaaggccgccgtagccgccatatccgaggctgatgtcgcggaaacaggcctcgaactaggacgcatattggcttcaaaatgcattgtatgcatatttttcctggcttctgtcacggcgcctcggacagctttggctacgccccaggtctctgtccgacgttggattccctgggagacgtcttggaaaagagattcgagacttttgggactgtttcgggctggtgatccagcaggtgggctgctttcactgcgtttcttaaagtcttcccaaaggaaggccttcctcgtgggccgcgtactaggctggttgggaaatttggaatcgggcggtctacctgaatatttcgatatgatgaaactgcctcgatcggcggtagggttctgttccaaatataatgcatcctgcacaaaagtctgagctgtgtgtggttggggcgaagggtagcgaagcaataatgtcaaggcagttgtatagtcggccgtaagcactaaatgatacatgtcagcgaaacaagatacgatgaggtattaaggtcgaccaacattgccaacgaattctaagtagcattgcaatgcacgtgaaatcgacaagatcagaccgtagtccatgagcaaacagtaaatcccacatcatcaggacatcatcaaatggaaattctcgcccaaacagaaggcgcatccagcggcttctcagtagttagtacagaagaaagtagataggtgactgaaagctgcttacgttaggaaaatttgcggtaatatgtccacagcttcaaggtgctcggcgagctcatgatctataatcgccaaagcttccttatggagataatgacaccgatcaacaatcggaatgacatccatctggccattggctgaccgtgtctcgccgtgctcatagtataaacgggccgtctgcattacagatagaaacaacgtaaatgaatcatgctccacgaattgtgcatcaagcatctccagcatcaaaccctcacttgtgtccttgttcgcatcaagtccttcggggtgtggcttcaccgagtctcgatctactgcccagagaataggggcgagtaattcgtgcattccttgcctataaccgacatctggattgagcttcgagtagacgaacagaatatcagtcaacttggctttcgtgtcgggctcttgaaaaaagaagttttcctgcaagcatcggtcgacatcttgtaggatctcggtacgcagcgtctcatcgtgtcggagtgtttgccaaggggactgattgttccaacaaaaaataattagatcggagagttcttcgagttgggcggagcacagcgagagggtaattatatacctgctcatcatccgccagaggatcaacagtcgactccaaatcgtctggatgttcgatgtatttcaagaaatgatctcgcagtgcacgataggcaccccgagattcgtccagcttaggcgcccattcagtcttctccaacccgtcgaagagtagaaatgcctgcacgaagaatgagcatatatctccacctcacgttgtcaaatctccagaaccttccagcaaactgatctcagtccgtcattgcacaggtttcctccttgctcggattgcaacgccgctcggaggtcggaagtcgtggtgttgtcggagaacaaaatgtcccatctctttctgtgagggtcagtaaaagtaaaaattgacagacagcgtgagagaaatacctggtctcctcaatggttctcattgctgaggatgagggagagaacaatagaaggtgagggggatgcgggcgatagtagaccgcccgtgccttatctcgcgctactgccctgactcggcccttgcgatgttccaccgctatactccggtttagttcggattgggaagtttgcatatctaaaatgatatagagtgcggctgacattggcatattcgatcctgtgtcgttctccctgcagaaacccgctgcatcgctgcacttttatgtcacctctcacagcttcatgacactagtgtacattcaagatgtccgctgatctactagcagagtttggtcaggcgcctgctccggacaataggccggaacagcagccatcgcaataccacaaaaactcatccttcgacgacgagaacatcgatttcttcgggtcatcgggaagtgtgcagcacaacaaacgtcccaatccgactcctggagcagccagtcaacttgcaactccagcagcttcgtggcagggacctggtcgtcaggaatttgacattcccttgaatccacatagtgatgtattattcgatgcagcatttgacacaccaacaagtgatgcagacgatgactggggcgaattcgaggtccctgattcagacacgctacatgcacaatccactcttgtacattcatcaacagctatatctccaaaaccagagcctcggcaagatggtccgcaagcttctaaaacaattgacttgctcgattcactctcattgcaagactttgcaccggctgtgaaacttcactcgaatattactaaaaagaagtatcctctcgaacctgataatagccaaaatcaggcgacatgggaggatgattcgtttggtgactggggtgatttcgccgatgtgcctgctagccaacctccccccaaggtcgccgagaagaaaacacgaccacctacaaaaccgcctgtcaaagccactaagccgcttgcatcaacctgggatgacgacaccttcgacgactgggatgatttttcagatggacctagtgtcaagcctgtgcctaaatccaaacccaccacccctagcccagctcctactagctctgtttctgggaccacagcccctgcagcaaccgtgcgtccaacaaacatcccaccaccatcaatccttctcgagttattcttggatgtgtttgagaatcttcagaaggatgctacactcgcaaaatcccaactgcgatcttcggccccactgtcatcctcatcttcaagcaccgtttcaacaacagccttaaatattcacaatgtacttcaatcggccgcccgcgtaattgcagggcgaagtctccggtggaaacgtgacacaattcttagtcaaagcatgcgaatcggtcctgcccgttccggcaaagccggtggtatgaaacttaacagcgtgaacaagcaagagaacatcaaagaggaacaagacgctgttgacgtgctgactacttggcgtgaacgggtggcgattttcaatgctattctacaagcggcgggccagcggccaatccctacgatcccagatcctagtgcgctcaaggttattacggcacgggcggaccagggcgcactaaaggcatctcatccatgtgcactctgttcgcttaagagagacgagcgggtgttacgggtggatgaacaaggtgttcaagatagcttcggagagtggtggacggagcattggggccacacagcatgcaggcaattttgggagacaaatcgaaatctgcttgggcagcgttgaaagctagatatgtatatagaagaaaaagttgtacatgaatgggtagaataaagggaaatgtcaaatgactcgaatcatttggatcatcgggagggaacccgacgacatccctatctcttccctcctttcaccctctcatacttccctgctccctcgagataagattttgtatccacatccctgcgaaaccgtctgattcgtctttcgccttctgataacaacacattcccctcacggccctcatgggcctcacgggcccccgcattccggccacgctgattcctaacatatcacaatacagatggcgggtaatggaagactcgcaaaacgatcgtcgaatgcgtgagtggcattttaaattaatagaaatgcataccgctgactatttagttgtgtgcgatgccggagacagaagatcaaatgttccggggcgcagccctgcgaaaagtgtagcaggcgaaagctcacttgcgtctttgataaccatgaccagaaaatcctggtaacaagagggcaagttaaatggagtgttaagaagaatcgatatctcacatttatcgcagttacattctagacctgcagcagaagattgcgcgtatagagcagagccagaagggccaagtgagccctttcagcccgaatttcgatactcagacatttggtttgtcttactttctatttaatctatttaaatggatgcctactaacctgttgcagatcccaaagatcgcgaagatgtacctcctttgcagaggactagtcctccagaggatcttgatgaagcccaagacctggaggatctggactctgggctagctaaccctttgtcgtccggtcctcctgcatttatgtctgcagcaaatggtcgtacatgtaggttatgccggtttcttggaatgcgcgactctaacatccacagtctatcttggaacatcatccaactggtcgttcacccggcgagtcctcagcttggcacatcagcacctctatcagaatgtattacctacagaaactctgatatttgatgaaacgacctatgagctgggatgggatgggttacgaacaagcccgggcccagatgttccagttgttccgactcgcgatcacaccatgtatctgatcaacgccgttcaatttcggtgcgggcaattgtatcacctttttgaggaaggagagttcatgagttctctgcatcagtactacttgggagatgggcaatctatgacaaatagcttgtggtacatccattttctcctcatcctggcctttgggaaaggatttgttcaacccaaggctcaaggtagaaaaccaccaggggtgtgctatttcgtcaaagctttgcagcttctgcctgatccgactgctctgtaccgtgatcctatgctgggaacggaaatcctatgctgcatcgccttatactaccagtgtgttgactttcgaacttcggcacataactacgtaaggtttctaaaagaaacgtctcatttgaaaaacccagctgaccaatgctttagatcggacaagccatgcggatggctatggcacaaggaatgcacactagtatgccagtcgaggatttaggacatgacatggttcaaagatccagcaaaatctggtggactatttacattctggacagagaaatgacatcgttaatgggtctgcctcagtcgatcaatgaccgatatgtgcaaacccagctccccacctttgcagacccatcagagacaatgtcattgggcatgcacatcaaattgtccaagatcattgccgaggtgaacagcagtaagagttcctgagcttccatcgttgattatcacctctaacaaaaccaacagcaatatatgttatcaatgggcgctttaatcggacttttctacttagcacaaaaacagcattggcgaacatcgcagggcttgccgatgagcttcgcgagtcatttccgctacacttggacccaggcagcggggtttctcgaatatcagcatacttacatcttcaataccaccaggtatgtgtcttatcatctgcgggaagagctgcatccgctaggttctcacatcatatgcagtgtattatcctggccacccgacctctcctattctgctttcttaagatccgcttcgagtccccagaaagctgtttggaatccctcaatgcatcccaaaatgtccgaaacctgatgcaaatgtgtcttgaatccgcccagaacatcatcagcattctctccagtttgcagagtcaaggcctcttaggtacaacaaactttcgctacagatacgcccttgtgactaacacccaaatcctagaaaccttcctcccctttgatctagaatcagtcttcgtatccactgtcatcctcctcatgggaccagcgatcgacccgcgagtattagagagtcaccccaactggctagagaaagcctatgccatcttcggcgaaatgatcagagacggaaaccaagttgctaaatttcggcgatccgagctccagcagctacacgagacattactaggctgtatctctagtgatcggcctcgacacttagcagtccctgacttcttccagcaggctgagatcatctctgacccagcttctccttcttcaacgccgattcctggggctatggctcaatctattcgatataatgatgcgcttctgaggccggatcctggtttggatgtggagtgtgattttactacgatgctgacttcggctgaggttatggctgttgcgaactcgattgagagttatgatactgagtgggtgtctaatgcgatgatagaacatagtatatggtaaattgaatgtctgatgaatgacgaattgcaaatataaattccgtgatatttttatctgttccgaaagaaaaagcaagacggtctatgccttgaatggttaactatacgttgaactcgccgacattaaatattcaaatcatctaaagcttggacagtatcgtaggccggatctcagagaactccttcgactctcccaggcgccagctcacatcaccaccccaatcccccttgccctcattgggatcagtatgcttccatttccaccgtgcttcatgctgctgaccagcctgcaggaaatccgaaacccacgatccaaagatagggaacatcttgaacccatgcccagaatcaccagacaacacaacaaccgacgacgacgtctccggaacaaaatcaataataaagtccgagtcatcagtatctgcaaaccagcaaagcgacttcttaaccagcgggcgattcgcaagcgccggaagagtctgcgccagcaacttcctcatcttcctctcgtcatgctccggcacaaacgcactttcctccaaagtcccaggcgcatgagaaactccagtctcaggatccgtattgatatatcctccacccatgggacagatcttcaacaagtttgtctgaggatcgggctcgaagaggaaacccaagtcacgagcataggtgacaggaataccacgcagcgcagaagtctcttcatcggtaagatggacatgcgccacagaccacgatttggccacgaccttcttcccaatctccgggacaagacgactcaccgcaccgccagctgcgacaatcaccaacgaagacgggtggaacttcccatccttcgttcggatcccggaactcttcttgccttgcagcgagctgacatagacgatttcatcgactgcgccgcgctctccgaggtagaagcgtacgccggctgcctgcatagcgcggtagacacctgccagtgcgttcccggagtgtgcatacccgtcgaagcggttcaggtatccattccacccagtcaatgggccgtcgagctgccagcaggcttgacgaatgtcgtcttcgccctttatgggcacgacatgtgatttgagttgatcgttcccttctgcggaagcgcggaatctattgagggtgtcgatagccttttggggtgcttcgccagacacgcagtggaggaatccagtctggtggaaatgaggtgcgaaaagaggagttttccatgcggcgatggctttctagttaatagataaaatgagacatcggtcagtaaccaactcggttatagcatcggaaatcgtgggcttacgattgtcaaatcggtgtagaatggatcctcgtattctgcgcgcacaatcttgttcaggtcattggcggctgaatagcgcggaggaatctgctcgtctctttcgaagacagagatattcgtaaagcccgagcgagtcaaatgaagagcgctggagagcccgaaggctccgccaccaacaatgatgatcgggtcgcacttggagatacccattgtgaaatttgatgaggaacttctaacagatggcctaatagttcgatatctatagctccaggccaatacaccttcatgagtcgacggcgtcaatgccgactctccgggagtagtgcggggagcgcggagaaatggaccatcgggaggccttccgatgtgcccaaatggggttttggatgtttttgataagaaaatgcaagccacgtaagaggtcagatgtggaaatgataattagaataacgtatgatatggtgagggagtacatttagtcagagtcactttattggtacaagcaaagtatacgaaacatagtagcataacagaaatggataaatcagattattgaagtcctacgacgttaaggacagaggctggctcctattgtgtcttatactaatcttaaaagaggaactgatgaaaataaatgaaagtatgcttagattgcgaaagtgcatatatgttaacaaaaaacctataaactattcattttatatctcaactttagtggttgctagggtacataaacccctcatcctgatcaaagaattcctccttaatcaaccgtgggctaacaaagcgacgcagagtatcagagctaccagccttgtcgttagttccgctagcacgcgcaccaccgaaagactgttgtccgataagggcagcggttgtcttgcaatctgtaagaggtagacgattagatatagcaacaattcacgttggtactgtgcgacttactgatatagaagttgccggcagagtatcggagcttatcttcagcctggcggatagcaccacggtccttagcaaagacagcaccagtcaaagcaaatccgcctccattctgatcaacagacttcaaaatagaagcccattcggcatccttgtaaacatacagggtaagcaccgggccgaagatctcctcgttgaagagacggtggtctggtgaatcggcttggtacacggtagggtgcacgtagtatccaacagattcatcataagtaccaccagcaataagcttcagcgaggggtccttgttgctagcatcaatgacggacttgatcttctcgaatgatgcacggtggatcacggggcccatgaaagcctccaaatccttgtccgggtttccaatggtaatctccttgataccagccttcaacttagtaaggaactcctccgcgcgagactcaggcaagtagagacgagatgtggcggagcatttctgaccctgatactcgaatgagccgcgaatggtgtggttgactgcactggtgatatcggccgacgggtgaacaaggtggaagttctttccgctggtctcggcaacgaagcgagggaattcgcggtatctcttcgcagcaacaccttgtccaatcttgccatacagagagcggaagacatcggaagaaccaatgaaattcaggccggcgaagtcgcggtgtgcgagcacagtctcagtaatggcttcagggtcaccggtcacgaattggatcacattgggagggagaccagcctccaaaagaatcttgtagagcaaagagctggcgtagacattagatgccgaaggcttccatagtaccacattacccatcagcgcgggcccgcaaatcagattgccgccaatggctgtgaaattgaacggggagacagcgtaaacgaagccctctagaggacggtagtcgatacggctgtgactagttagcaaatgatctgcgacaactcaaaccagtcatactaacctccacatgccatcagtgccacgagttggctgcttctccaagatttcagctgcccagttgcagttcaggcggaagaaatccgccaattcagccgcggcatcaatctctccctgccaaatgttcttcccttgtccgagcatcgtagctgcaataatctcgtatcggtacttggtgcatagcaactccgcagccttgaggaagattgaagctcgatcaacaaatggggtatcctgccagctttgctttgcctccagagctagttcaatagctgaccgggtctgctcatcggtggcaagtgggtagtttgtaaaggtgacggcatgttcggcaggcaatggttgatcccaagacttggagcttgcctggaactttccatcatagaagagctcactccgcacgggcagctgagagcggagcttcgtcagtgctttttcaagcttggcgcgctccggggagccttttttgtatgaaggctatagtgtgattagcattgaggtgggttaagtagttgtcgcactcacgtttggttcgtttcgagcatcggggagacggaatggcatagtagtcttagcccgagtctgaacagagagtcctgcaggaacagagcgcaggcgagagccaataggccgtgccgagcggagtctcatgagtgtagtagacatgatggatcgcaaggttgagtttagtgaatgacaatgtaaactcaagaaatcagtttgagacaacagactagtttaaacgtcaacgacccctcttagaaatgtcggaggcttccccgtttaccccacagaactattgcagtgagcttgagctccggacaagataaagctaaattcatagctgctgttcgaaatctgcagcatcgggatgccatccggtgatcgtatcaggcttgattgggtattgtaatcatatatttcaagtagataagcatgagaaatcatgactatgtgattcaaattatcattatgcaacaagaagctcaatcaaatgaagctcgctggggcaatcctttgctaggacagctagcaggcgatctcgccgcggcagcagcctcggcgtccttagtgacacccgcggtcgcaattatcgataggttcgtctggatgtttccaagcgcgatgatttcgcgctaatacataccctcagagcgcttgtcgagcaagctgccttcaaacaacccattctccgcggacttcatcggcatgcgctcgcggccctccgacggccgggtctgtttgttttccaacggccattcggtattgtctgggccctctatgcggcaacctattccgtcgcaaatgtgaccgacacaatcagtcacaagcttgagataaccgccgcggggacgatcacatttgccacgacgatgatggccaatgtgccgctagcgctgtggaaggacatccgatttgcgcaggaatacggaaccggcaggggtcccgatgccaagacattgacaacaaacactccaatctctgtactccagaacaaatctttggcacgaactgcagctgctatcttcctcgcacgagacggtgtgactatctttgggtcatttactttggccccgtggttgtcggatgccatccccgaccgcttgatgactcatcccaacgcaaagccgatcatcacccagttgaccgtgcccgtcttaactcagctggttgctactccgttacatttattggcattagatatgtacacacggcaatatactatgcccttcctaaaaagggtaaagcactcgcagcgatatctgccctcgtcaactttgttgcgttgtgtccgtatcattcctgcgtttggaattgggtgcttgacgaatatagagttgcgatctgctcttcatgccaaagtctcgggttgaattaattatttatctcattatcagtccatgtcctacatgaatggctggggcattctacctgtgtggcgttcagtccacctttctcgatatcactgacgtgcgccagaatctccgtctggtagggcgtctctcgtgcaatttgcacagtatcgaagacagacttcgactgaacaaaaatatcatcgatctcctcgagtgtacggcccttagtctcaggacagaacaagtagaagaacacacaagcaaaggcgctaatacatgcgtagacaatgtaataccgccagtggatagtagcgaacccgactgggctcacctctgccaatacgaagttgaagagccagtttgctgcagctgccatagcagtaacttgagcacgagtttttagcggtgcgatctctgcggcgtacatgaatgggacaaggaaaagtccaatggggaagcagaaaagcgctacgaagtagaacaagagtgaggcgccagccatggatgtgtttttaagatcactcgatagcccagccaaacaggcctgggcaatggtcataccggcagccgcagcaatgagcaatggacgacgtccgacgcgatcgatgagtagaacggccacgcctgtagccaaaaattgccagatttgcagacacccagtgataattcccgagagtgtacctgagtatcccagatcgcactggaagataatatcagaataaaaagtgatgatgttgatgccggtcatctgcgctagaatatttacaccaacagcaataactgtacggtgcaggtggcggttcttcgtgagcgcgaatggcgacgaggaacctgctggttcggcgttctcgtcaatttcaagtgactgtcggataatttccagctcctgtaagacatgctcagagtcgacagccacattttccatgcgagctagaacttcagatgcctcctcgagacgtccgacacgtgcgagccaccgaggagactcgggtagcagcatgatacaccccacaacaatgagaccaaagaggccttgagaggcgatgggcaaacgccagctgaccgagctatcactaacataggagagtccgaatcccaaccatgctgcgaaaacaacgccgccaattgcaaaccatccctccagtagcaccattcgtccacgttcctctgctccagatgactcggagacgtacattgggattgtagcggtaaagccaccgacaccaagacctgttcagttactggttaacttattgcaatctgttcaatgataaggggctttaccagtaatgactctgccagcaataagttgaccgagtgagaaagaacttgcttggatagctataccaacgaaagctatgcaaccggcaagaaagatggtcttgcgacgaccgagtctgtcacctaaaaaggcgcaggaacctgcccctattgcgcatccaacttcatagatagcgaccgttgtaccttttaatgatcaacattgctctcttgaacatctgccagctgattcatccgagtagataccttgaattttagagttgtgagatttctcacgaccagtagtttgaacggtatcgacttgagggaatacggcgatgaaagagtctagtatcaacaggccattggcaattgcctgatcgtagccctgcagtatgaatccgacagccccaataagactgatggcgaggctcaatgacttgcctttgagcttaggggccatagcgtccactctacctaaagtctcttgtcggatgagttccaaatcttcagctcgcgattccaacacaggggagaacaccagaaataaaaaatacggtactcgatacagcaccccacttagtagatcctgaagcggagggtcccagactaaaggagacggactacctgggacttctagaagaaagacaaatctgccaagcttcggatgttcaccgaatgggccaaccagcttcgcgcatttgacggtaagtggatctcgagtttcttcaagtttggtgaagtacagcgctaataagtggctggccaatcaagttccggattatcagcatccgtggccccggccgcccgtagtttctccgcattctcatccatatattattgcctatagtcaatatttcatgttgatctttcctcgttccctactaatacctcaaatccacttctccctagttcgtaggctgcatgtcataatttaggacctttgtgtccagacgagagggctgtgagcctgaaactttaggtagcagtgagctcctagcacttgtcatgttcatcctccatcacatgacttttggcgcgatctgcacgattgcccatcacgtgactatatagatcgttgacaccttcgttccttcctctttggtatttggctctttcctttgttttttcctttttagggctgtctacaaccttatttaagcgagacattcgagttttgcaccgtttgcaggaaagccaggtatataaacaggctgattcccacttttgaacttacttcttctttctctcttcatcattttgaatcaaccacatcacagagcaacccctccgacatgttatcgtgtccataatccatcacatgacttgtctgctcttactgtctctttttcatctacttgcattcatccttcatgcaaccaccacatcacaggcatcccttcatggcacctgtcatgttcatcatccatcaatggcttgtatgttcttgctgtctctttttttctcatatacttacattcatcattcagacatcccaaccacattctccttccacattcaatcttccacttcatgaagtttgtttcttcttgtctgtgttgtgacctattcttcatcttccctcatcatattctatgacttggtaaacacctgatgacatgaggctgactgtactagatatgtatgctcaaccacatctgctcaaccatatccagccttgccgagacagattccgccttcaggactggcagcatgcttgcaacaacagcaaacacaaaaacagaaacagaagagaaaccccccccccccccccccccccccacgcaccaccactactgcgatgcttcgaccttaaaagaggaggaatgaaaagaaacggtcttgaacgacagagtctccgcaggagtgtctctgaaggagacttctcgtcgggaagaggttacagcgtgtacccatttaaaggagactctcaagaccgtttgctgtggtggtataaaaaaatggtcgcctcgacaagcatgcatcgacatccaagaaccacatccaagaaccacttcaatccatccacttcaatccatccacttcatccatccacttcatccatccacttcatccatccacttcaatcaaccatcgacattcggcattcgactactgcgatgcttcgaccttaaaagaggaggaatgaaaagaaacggtcttgaacgacagagtctccgcaggagtgtctctgaaggagacttctcgtcgggaagaggttacagcgtgtacccatttaaaggagactctcaagaccgtttgctatggtggtaaaaaaaaaaaggtcccctcgacaagcaagtatcgatatccaagcatcgacatccaagaaccacatccacattctactcattcacttcaatcatccaccaatcacccacttcaatccactttaatcaaccttcaatacacaatccacaatcaacaaaattcagattcaatcacccatgatgcttcgaccttaaagaggaggaatgaaaagaaacggtcttgaacgacagagtctccgcaggagtgtctctgaaggagacttctcgtcgggaagaggttacagcgtgtacccatttaaaggagactctcaaggccgtttgctgtggtggtaaaagaaaatggtcacctcgacaagcaagcatcaatattcaagcatcgacatccaagctcaaccgcattcaacaaccatatccaagctacacttcaatcaatcttcactcaactatccatattcaagcatctactccaagcaatcatatcaagcaaccccttcaaggcaaccacttcaaggcaactacttcaatcaagtttctacatccaagcatctatatcaagcatccacgtcaaccatccactcaatcaaccatccactcaatcaaccatccactcaatcaaccatccactcaatcaaccatccactcaatcaaccatccactcaatcaaccatccactcaatcaaccatccactcaatcaaccatccactcaatcaaccatccactcaatcaaccatccactcaatcaaccatccactcaatcaaccatccactcaatcaaccatccacttcaagcatcgacattcaaacaaccatatccaatttccacttcagtcaccatctatattcgactactaccatgcttcaacctttaacagcaggaattaaaagaaatggtctcaaactacagagtctccgcaggctctaaaagagacttctcgtcgggaagaagttacatcgtgtacccaatcaaaggagactctcaagaccgtctactgttcaggtaaaaaaacactatcgcatggacaagcaagcatcgacattcgaacttccacattcaagcttccacttcgagcttccacttcgagcttccacttcgagcttccacttcgagcccacaaattcgagcttccacttcgagcttccacattactcaactatccatttgaccacccacaatgcgcttccttttaagaggaggaatagatagactcaaacaacaagtgtctctgcagcagattctgtctgtcatatactacatctcgttacaaacccttgctccattcgtaacattccttgtagcatacatacatagtcgtttctatagaggcataaaccacagctaaaaattaaactcaggtaaatcagtaaattaattaattgaaagcaaatcaatgcaaaatcttacgttaagcctcattcacatagtggtcaggtgaccacccggacaccctcagatctagatacgaatagtaactccctcttcgcacccattaacactttgtactttatacgcaaaccccacgattttaccccagaaaaccacacacaatcgtggccttcccgcctgacttatacatatcgcttaaatgatgtttggtggtttagcgctcgtgcctgagctctctgacagcatgcagatctttacctaaccttcctctctatacactatacaggcctaatttagagaaactcgaggtataagccagtgcaatacattgatcataaactcatatactaccggatacgctatgaagatggcgaaagagaaaacgtcaacttggctctgcggaaaacctccgccttcaacgcccgatactcattatctgtccgcagaacagcatcacgattctcaattgctcgacgcagaagataggccagacattcacccatatctccccaagtcgagcatttgtaaacctccggtgtcccatcgccgtcattcatctggagcagcgtgaagctaacttcatccgacataccatggagttgggcgaagcgcacaggcacggtgggcaagcccgacgtgacacgatgcttatagagtttctgggcagcgaccacactctccttgttatgacttgccaggaagagatttaccgaggggaattcgcggctgcccttgtctccaaattctccaatgttctttctcagcgccccctgagcaatcatattataagcgttgtcggtgtcttctttcgtgtcgtggatcagggaccgttcatcggtggccatgtatgcgcccctcacgagcttgaggccgagagtgaatccatcttcacttgccacggttagatggttggccagtgtcgctggtgtgcttttgaggtaggcctggtaggtactgtagatagttgcataaccgtcgcggttgtatttgcgcataagttcaacagcgacccgtgcaatgcccttttggaaatgctgagactcggcatcgacgaggatgcgaacttttcggtctttggccttggtgcagatctcatccagtgcgtccatcatttgctgcggaggcaaatctccagcggcgaaggcctcggtggctttgatgccagcacctgtcaatcttgtaaatggtcagtcggtaccccatgaatgggtggtgtgagagtaacttacttgactgcgaggtaatcttctgcatctgacatgtcgatggtctcgactgttcccttccgccaagcttcgatgctgggacattgggagaccggagcattaatcgacacgttcccatcctcgcttttcaaagcagcaacgccctgtccgtgctgagcctgagtactatgatcaaacacagtctcagcagcgtaagtcaaaatcacaccgcggaagcccatatctttcatttcccggatggtagatctgcattccgccgcattctctccggcgcagaattggttgtagaacgttttctttaaaattccatgcaggatcggattccgatccacatcaaagagccagatcctgttaggtttggagaggaaggacataaaggaaagcgcgggtatgaggaggaatctcttcgacgatatcgtagagaccagcagagatctgagcaagacatgcgcgggtaagatagagagaggtggtaatgaggggcttggatcagtcttgacttgtgcctgtgcttgcaatgttgaactaaagcgcagtctcgtggaggcaggcacgttgctcgttcgaatgcatcgcgcaagaccggttacaggctttccgggaaataaggtacgcatctctgttatgatgttatgaatttcaactgctcattccaaattagacgaagggaccagcttctttatccttcaacattattccccgcgtatagtaccagatagtatatcggacaggcctccggtgcttttgatagctgaaacccaccatgcggggtgattatcgctggtgctggtcagtctctccacaagcagtaatggaacccgcaaagcgtattcggaagaccgttttcattggtggtccagatcattccttcgtggaatgtctgtacggaagactcgccggtggcggggttgcttgtccatgttatcaacggtatgcctaccgacagtacctatttttatcaagtgacacaaagatagactggattgaagtaatcgttgtcaagttactaacggctcatttcatgtagttgtacggaatattgatatcttatacaactcatgttttccgatgtagatttgctatataggctaagggcgaagagagaatactaaccacagctacaatgatgcacttatcggaggaaaatatcattcattcctagatataagtatgtaacccttagtccattcttccttatccgctagcttccaatttccatttccagtctaacaaatgagagcagcctacgcatggcgcacgagacagaacatcagaccactttttattatctcttttctataaaacccactcgttgccagcattagaaatcctcctcgaggaagcctacaacaacccggtatacctccgactctccctcgagctcgccgagccaggctcaacaatgccgttcatggttctcagcgcgcagtaggtattcttcggcggattctccctcgcatatctcatcccgcctcagatctgttatcgcttcgtgggatatatagaaggagaaggagctgtgatcacagactgacaggcaatccatgacctcgagaatggtcatatgcctgaatgggagagctggctcccgagatggcaactgagtactggcagatgccgggctaacgctgtatacattcattgctgatgtatatgtatggtgaagaagcgaaatattgtgatttcaatcatactttagtgaatttagatcagaatcaagatccgaatccttttgcggcggaagttagggttctggttcaattttcttgctcgtccagggagctgtagggaaataggtgcttgattgaggaatcagtatctattctctttagtaaatcttcatcactctaccattgagtgtgtttgtttatggaaaagaaatcactagagctctatctaccatggaagtggatgttgaacatgccgataactacgtgagtcgctagatataactaataagtaaagcttttgttatctacacaggtgtaaaccaagcccaaatttgagaatcgtgccagataccaagttctgcatgtggaaaaaggcgatgttggacgaaggcgggtgagatgccgaggctcgtcgggaggtggtcccgactgaggcctagacatacaactggtcagcgacgactgtatagagttctgactgataattgcaacccatttcggtctgtttaactggcttctggtcaagttaggaggcatttattatgtagcggtgtgggtttgatttgagtctaaccgaatatgcaatttcgctagccgatcaagggcgactatcaaagaaacttgagattctacgcattttaaacatactaggagatacggtgctagacatgtagaagagaaatccgaatgatgcccaagtaataccatttttgggataaaagagtagagatattgtaagtacatgcaggagaatgccacaccagaaatgagaggcctgataaccaaagcatgtagatatacatagctatgagtttgagggggccgaggaaaaatgccgtgggtctggacgcgtctgcgttgtgagctggaaccgaattaggcgacaatgaagtggcctctctagagattccacgtgcctttggccaagcatatctttcaattgagtctgcaaatttgggatctgcgggtccacgcatgctacgggtgcattaagggctccgatgcgcggaccggtcagagaaatccggttcacttctgcgccaagcgtcattttgggcatccataccgggggggttgggtccggagttggtgcgagagcggtggtggcagagcgttttcagtgatcagccattatcaaacaagggataggctaccacgctgctagtttggtgaaagtcgtgtgcattgccggtcaatgactgtcgtaatcgaggccatgacaggaatgacacatcgcaggagatgatatcaatttcgaatgtaaaacaatcggtgcctaataactttgcgccgataccgccgcgggctggaataggttagcgattcgttcaataaggtacgggatgcaccagcgattccatgggcgataatccaaagaggggttccttacagggctgttcaacatgctgttgcgcttgtttcggcccttcttgatgtggtttttcagggcggttgagtccaagggcttgagaagttcgaagctgcaaagaagttcgccagagactgacatgatagcgccccaattatcgaattcgccgcaatactgtgaaaagtcaataagagtcatagtaaaacacgagagaagagaacctacgttgggagcagaaaacacagtcaccagaatacgatcctggtagaactcatatccgtcctccaccaccatgtgggcacggcagaccaggtcgaagtcgtgacgctgcaaaaagtccatgatcaccttctttccgaagcagtagctgacgccacgctcattaggttcccaatcttcctccatatctgccgggtcactccacacaaggtcgttcaacagaccatagtccggcacgtcggtagggcgagcgatgccgcgaatgtcgtccatgtgcgaaagactaggagagagaccaccatgaacacagaagatttttccggccacaatcgcagcaatcggaagacaattaaacgtatcgatgaaggtcttccagaccttgatgttgcagcgacgcttgcactcatcatagaacccatacacacgggtaacgttggcacactcatggtttccgcgaagcaggaagaagttctcggggtatttgagcttatagcacatcagcagaaggatcgtctccagactctgcttgcctcggtcgacgtagtcgcccaggaaaaggtagttagcagcgggagggaatccacacatctcgaaaagtcgaataaggtcggtatattggccgtgaacgtcgccgacaatcttcacgggagcagacagttccaacagagcaggctgcgacaggaagagctcgcgagcggcggtacagatggcggtaatctccgcattcttcaggcagactgttttggtaaccttgctagaataaccggcgtccaggagtcgcgaaatcatgtcgtccaaatcaatggatttcaaagcacccatacccattccgggagatccagaagtctccagaggagcgttcaagatgaagtccaaaatgggattcagctggttctctcgcttcatcagaattgattcaccagcaaccgcggaggacccggttggggggccaccagtgggagggttatctgacacaaggtcgacctcgccgctctgcttcatcacatttacatccttgtgacctcgttgcagactggtggaaagcgagggagacggtgggggttggggggtgccgggtcgcgacgcgtcctcggaacccggcgaggggaggccggcattagagccagggcggcttccgacggacttgagggagcccgcatcggatttatcggtctggctctcagtacgggagagagcagtggtggagccccgagggctatcggagctgcgggccccggggattttggatcggatcgagccgcggaacgagcggagagactctttggtgtcggacttggaaaaggaagggtaggactgcagagtgtcgcccgaggcgttgcccttggaatgcgactgacccatcactacaaggcttaactgccaagcttgagtttgcgatggccgcaggaacgatggaagtccgaactgttatgccaagaaacccctgttgtgttgctggaatgtcttggcccgagcttctgcaatgatacaaaaagcttggagcgactctgcaagtgtacagcgggttgtgtgcggactgtttatcactaatccaactctgatcggaactctgatcggaactctgaggaacgctgaggaacacgcggaaggcaagtgcgagacgtgaacacagttacaagacgaatgaaacggacgagatggcgatgtcaaactgcagatccaggtagcggaccagagctttgatcactgatgcaggtcgatcggttttcggaatggtgacaagctaaaagataaaggcggaaggaggctgaggaagctctaccgaaagttagtctcttgcacgagacaatgcaggtgcgggattgcagggctgactccgcagaaacccagatggcatgtggaggtattagtgagatggaaaagaagagaaaaggcaagggaggtccttgaaaggagcagaactaggaatggtaggttcgcgggtagaggaatgcgtcattatgtacgggggggttgaaagggtggtcgtccacgtaataggccacagacacacccggggatataatttacctccaagagaatccaatgggatgagatgtcacagaacagggcagaagctccctgccagagtgaaaacaagaaaagtaagagggggaggaaagttgcaagtcaagaaagtcaagggaaagtcgtagagaggtagggaaaaagtactccgccaccgctagcacagcgaaaaggtactttccgggtacaacgttggctgtttctgtggtttccgtttcttgggccggtctcgatcgggctggggggattaggtcagccggagtatctgccgggccgggatatataaagaactcggacagctgcctgattgaggaagcgagtcggagagagtctggactgggagagtcggcgctctgatatatatactgaagatctatggattcgggggtagtcaatgatcagctttaatcaaaaggttatttatccttttgggttattaaactaaaactagtgtctggagcccccaaggtctgtacggagtatgttgtatatctatccctttaccgcttcacaccgcacaaatggaaatatcttctttgtcttgtttcttcgatcttgtgacccctgactctgaatatctttttaatgtatcatagtctaggtcaatattcttgtgttttttggctgtcgttatgtctttgggatcacccacttattagcgctcgataagcgacaattctcctacaacgtacatgcatttacatttgcatttgggccactgaaaatagccgtcacagatgcattggtagagccactcaaacaccaagaatctttttccgaatctacccggccactcgcaagagaatgtatccggagcttggaccccaccaccctagggcgagtcttcctatcagaagtgatggagataaaaagtggaacacccactgactcaaggactcaaacaccgttcaaaaacaaaatgatacatcacaaaatattatacgttgctgcgtggtagggcataagctccctgcaaatacttccaacagtggaaggcggctagagaacaacagacaacaccctgtctcatgatcagattgcagcggaagcacacacgagccacatatactcttggttctgcaggaaaacaaccacgctgtatgccaagggatctatctctgtggcgaagacaccgctatttcgcccctccattaccccttgttcactgaaagcgcctaccacaaacaatctccctatccgataacttcaatgtcgactgcagattgcctgtcaagccaccttgaatgcagctgctgtgatcccggtgccacgttggcggagaagcagcgagcgccgctgcaagaaatcctcttggcagccccacgtccaagtctagtcctggcggaaagcagggaccggggtgattgtgggcgcagggcagaaaccgggcctttcctgcggcatatcgcgtgggatgcaatagatggttgtcatgctgcttgatagtggggcagtagagctaggtttatcattcgagaataggatagagaacgatccccagatgggaaaacaaaggtctcgtggatacgagcccgggtcggaacgaaaattaacgcttactccagctctattttcgtaatgtgtcgtcctgggatcacaatgaggcctatcaaccggtgtgtcatgtccaatttgaaagtcgcgctctttgcttccggcccttcttctagctctttctcgtgtgcagcggcttgtacggcagatgtggagggcatacgatattcaaaagaattggcgagaatgatgtttcggtcctgtcaagcagttttcgattagtgccattcgcggtgtgctatttcaaaccctatagcacgtaggttcatacgtgactgcttactgcatccgtacacttgaaaagcccaagaaacatccggttatccgtggtatggatccgcagtgtgcgacccaacagcccctccaagtatttaacagactgatcgtgatccattgtggttggtgcgtggttcgtgtcagcagcccaaggacctccaatgtgcgggggagttgaagtctgagggtagagctgaaaaggactccgatgcaggaggaaggacagtgtcgaattattcggggggttggcaaagttaagtaattgctcttgcagtttgggattcccctggcctggttcaattgaagaggggacgacgtcgggtggacgagatcactcgggtggacaaacaacgttgttggtgcctaaggccatttaggctaattggccatcacgctagaatctacaatgttcaaaaagctacggagtatagtgtttaaataatgaaaagtcagtatacttgaaagtagcagctactagttttattctatacgtatgtaacgttgcattaagccagatatttggcgatgtatgttcattaaaagtcaaagccgtcttcaaactatccccaggcttccactgctaaagaaaaaaagtctctcgagaaaggatgaaaaacaatagattgtaagtagccaataacaccgtgccaaaataacccaataggtatcacaaaatagatagaaaggtaatgataacctctcctgatttaaacaccagcgcgcaatgttgaaaaaggacccgtgaatggaattacatccaggtcattccttctagccagttcttgggcgcttgacccaatccatcactagcgcttcagtccatatccatgtccacatcaacactctcctgattggatccaggactattgctctcgctcgggctgtctcccgagattatttgattaaacgcctggcgacgcaggagatcttcatgggcctgcgcagtctcattggcacgaggtgcaagtgcttgacgggatggtcggaaagccgatgatggctgaggttttggttggaagaatcggtgtaatgtttgctgtcgggggtcaaggacttctggtgtttcgggggttggctctaagtccattgtatccatatcggtagcctgtgtagactcctgctgcttttgggcggagaagatccatcgtagtgtgttttctgccagctgtcagcgattgaacgttgacgcgatcaagggagagtactcgggggcatttacgataaatcacttggtcactaggacgatcgtctctgaagcgttttcgcgttcgactgtggagatgtgggctcccatcgatcaccatgccccattcactaggggctggagctgacggactggtcgggagagctatgaaggaggctttccgcttgagggacattttcggagcttggtgtatatagtaaggtggaccggtaggggtttgtagaggtaattgcatatataaagtcttacagaggaggtaatgaaagagaagagaagaggaattgagacgaggactggacgcaaacacaactagctgagcgcgtcattcgcgggattcgcgttgcattctgtcgggctaagccaaaacgggtaatataggtagcaggttggatgctcataacaacattgacaacattggcaacacgctttgatatttgtaaagaaacagactatttttactcttaatagatatcgccaacctagagtatcaatgccattacttcatcatgctatgcgtagtcgcaatcattctttcggtctccaggactacaagcataacatatgtatcccaggatatacaatgaacttttgataacactttcttttaaaagttttttctattcagctattcgacccgtaacttggtttgccagtgcatatcttggtataggtacatatctaaatgatactcaaatataaattcatatgagttgactaaaatgaccaataccgcctataaaatacatgttcactacaaatcttctctatatctgccaatataaaatccaataccgatatcctccaatatcccgacgtcttccaatgacgcgctggctgttccgtgggatcccccgctccccccacttcttcaattgaagagtagagcaccacttcacatttgaccttgaccttgacctattaacacaaatcataccatgccatctcgacacgcctctcactctggatcatggtactcagatagtgcccgcaccctagcccgtcagctggatggctggctggcgcaggtgccagacacgatggagaaggtcggctcactgccaaccccaggagccagagtgatcatcgcaccgtatgtctggacctttatcatacatatggtattatgcagaacaaacatactaatcaaccaggcatgcgggctattcatactcggggccctgcgcagcctacgcatacaaggcgctggatctctccaaagcgtgagcttatctcccgcttcttctatgaaagtctctaacctcacaataggaagcgaatctttatcctgggaccgtcacaccatgtttcgctcgcaacactggctctcccgacgctaacttcctaccgtacccctctatccgatgaacccctcccactagacaccgagctgattacccagcttctcgaaacccaggcaaccagaccaaatggggcgaagattagcttcacaaccatgtcgcgctcggtcgatgaagacgagcacagcatcgagatgcatctgccctacatccaccgcttgctccagctccaatatccagattctccagcctcggaatatccacctctagtcccaatcatggtcggaaatacctcggccgcgacagagcaagcattcggagcccttctagccccttacctggcggacccgacaaacgcttttgtgataagttcagatttctgccactggggtctccgattccgctacacatactatgttccacaggcccccacgccagggccacaactcccattgtctgatgatatacttccgcaacctgacatggatgcaagcagcgtcgatcaggccgtcaagatggcctcagccggtcactccttgcgccaacgcgatcgcatctcaagcagtcaaccggctattcacgagagtatctcagcgtttgacatggctactatggctgccatcacgacgggatctgcaaagtctttcctcgacattattgaacgcacgggtaacacagtatgcgggcgccatccgatcggggtaatcatggcggccctggaaatcgtcacagcaagtcaagcagccgagcaggaaggacgcttctacttcctgcgatacgagcgtagctcggatgtagaagatattgatgatagctcggtgagctatgtctctgcatttgctgtgctttaatagtgcatcacatggccttgatggcagggcttgtctccttgcttttagttcggatattgggcattagcgctagcgccaaagtaagattgcaatcaatgacttatgagtatccgagtatccgaaacagaaattacatgggtttgacttgtccaatataacatccatgatggcatgttcacccggagccgtgaatgggatggactgtacggagtagcattcacctaaatcaccagtttcaatctatgacaggctcttcgcagcactaatcactcggctttatattcctggcttccacatattgccataagctggcactcggtagaagcacatcgacaaacgaggtcctcatctatcgtgggatagagcggataactccgagtattccgagtattccggctttgtgctcagcagattaggagatcctgtattgataatgaagggtcgcgacaaacgcctcttgacttttaggccagggtctgaaacatattaaggctgagcaccccactgtcgatggctacacttgtggatacacaccgtgcacctagtgcgttgtgaatggatccctgatctcttatactgtataagaagtttcagaatgagatctatcaaatgcctcattaccctaatcaaggaattcaccgttatcaaggggggtcaacctggaacacttaagtccctgaaattagccgctgggctgttggaggcgttattcggccaatccgacagccctaaagtcagataactctgcccctgagtccgttccagttcgactaatcagatcgcagaaaagcttctttcggtttgtttgtccagtgggaatctacgggttagagaacccccgcctggcaaagtggcactatggcagtcggggcgccagcaggattgatttttccccttgaaggcagcagcccactttagggcttgtctaattcatctattgtccgcatattccgtacaaggagtggatcttatagagaatgtggcattgtgaaacaaagcgccaaaagcatataagacttctttaagtcaagtcctatgtccgacctttgatatgtttcttttctcacttctcactccagtcgctccttaagctggatacgtctttcattcctttttatctttcacgtattccagcttcatagagtggagatattccttggctggttcttggaaatcttcaccgcttaaacagccatgttcttcttattcgtggccctggttggcctcttgcctttctttacattcgcttccccgattgcagtcaacactaccaacatgacgtcttccgatcaaaacataggaaataaactagtcttctgtcattttatggtgggttatttattgcattattaaaacctgaataaaatactaacgctatctagatgggcatcgtcggcaaccgcgaaggcgccagcgactatgacgatgatatgaagcgtgccaaagacgcaggtattgatgcatttgcgttgaatattggcaccgactcttacggcgacacccagctggactatgcctatgaatctgccgccaacaacggcatgaaagtgtttatctccttcgattttaactggtggcaggccagccagggaagcgaagtcggcgtgaaaatcgcgcagtatgccgctcatcccgggcagctcctggtcgatgggaaagtatttgtttcgtcttttatcggcgacggtgtcgatatcgacgcaatcagatccgctgctggcagcgatatcttctttgcgccgaattaccacccaggccagggcgatttcgataatatcgacggcgccctgaactggatgggctgggatagtgatggaaataacaaggctccgactgctgggcagaatgtcactgttgcggatggcgataaggcttatgcggatgctctccaagggaaaccatacattgcgcgtgagtatgagtatgtctgttcttctatgcatatttgctaattgaaaaatagccatctcgccttggttctcgacccattacggcaccgaagtctcttatagcaagaactgggtgttcccttccgatctcctctggtatgagcggtggagagagatcctacgtctcagccctcgctttgtggagatccttacctggaatgactatggtgaatcgcattatatcggcccgctgtcgtcgccgcacacagacgacggtgcttcgaagtgggtgatggacatgtaagtagagatatcccagtaaattaacaaagcaactgacaaggaagcaggccgcataatggctggctcgacatggcaaagcccttcatcgccgcctacaaagccggctcgagactgcctatcagattcttagaggaagaaaagctggtctactggtaccggcccactttgaaagacgtcgactgcgacgcaaccgacaacacaatgcaaggcagcgccaacaacgccagcggcaacttcttccgcggccggcccgacggcgccgacacaatgaaagacgaggtgttcatcgtcacgatgctgaagtttccggcgaaggtgcgggtgcggtcaggcaataatactgagacctacatcgcgcctccgggagtctggtcacactcggtgccgatgggcgtgggcgcacagagtttcaaagtcacccgtggcttccagacggttcaggctttgtcggggacgagtttgaaggatgttgtcgacacgtgtgcctgcggcatctacaacttcaatgcttatgtgggcactctgccggcagcggacactgttgacaagctgcagccggctgggttgactatgttgatggacgggttgaaggtgacgcccgagatcaacgctctgggttaatactttggttgggccgttggattccttatgattgggtataagacctatgtacagactggtccgctcacttgatcggaggtgagggttatatgtacaacatcaatagaatacaacagctggtataaccaatgttcgtcctcatttaaatgccgtgtcatcgttgaacatctactttaggccagataccgagtaccggctataaatcagcgaaatccggagtattctttgatgcagacattgctagatacaattccgtcattctataaaccgacctttcgaatgcgagtttgctattgatcgtggaatatcttcaagtcgtagtataacatgttgtagtataagtataagtaacgatctacaaatgcccgaattattttcttccgcatttccttatcttgtttagtcccagatctaccagatacaacggccataaataatccatcgcattccctttatcttcaccgactctttgcccacgttaggcacttggcgctgcccggagtgacgggaacattgcgcccgagtcagcaggtgcaggtgcaggcctcgtgaaactatttaggaacccgatctcgccgttgtctctttgtttttggtcttaagagttatcaacaatggcccgtataaaacagggagtcttctcctgggaggatgtactgcatcagcggttccagagtaagcaacgagctcctattcctattcctacgcttttacatctgaatccccaaatctaacagatctaaaaacaaaacaggcaacaaaccccctcccctcccccgccgccaaacaatagcgttctccgcaccccaactccaaagccgactcctcacccggctatcaccggagcttcggctaatgatctggggattcgtcctcgccggccaacgaatccacatagtccaatgcagcaagcagcgactcgggcacgtggtgtgtccctgtgcgctcgagcccagatcttcaccaccgaaacgccacacgcgccagaacagaaacttattctgcgagatctgccatggcacgggcatctctcagccggcgaaagaggccgatctcgtgcgctgggataaggttaagctactgggtctggccttgacttgtcggcagatgtacggttgagatattacccttcctttccttccttatcctacctaccctaccctaccctaccctacatctacctatatgatgtatccatgacctctcctctcctctcctccccatctcacccagagaaaaggacctcccccactcccaatactaatccaaaaaccagataccacgaatccatccccctcctctacaccctcccaaccctagaattcagtaacccctggaccctcccatacctcctccccacgatcccgcccgaacaccgcgaacgcatccgcgccatcgagctccgctggtccttcccgggccactggctcccgagcaaggactccgtgcgcgcggtctacgtgtccgccggacggacgcagtggacggagacgtgtcgggcggtctcgcagctggaatcgctgcggtcgttcgtgctcgtgctggagagtaactggttcagcgagccggtcgagaaactggctgcgtttttggagccgctgagcggggtggttgttcggtcgagggctgtttcgaggcggaggtgggattgggggtgtattgggagggatgggggggatgtggatagagatgtgcatatggatcttgatagggttggggctcggtttgcggtgaaggatggcttcggtgatgggttcagttcggacgaggactcttgtaagagtcttggatcggattctagctcgttttcttctggcactggggattcgacggtttctacggggagctgggagctccggcttcagggtcagtgttattatacgcatgaactggatcgcgtaggggtggatcttcggcggagaggtgtagattgctggatatcggcggtgtgagaatgctcgatttgcaaatcgcgtgattaatgttctatgatgcaatgatcgtctgttatctagacgatgtcttcttgtttttggcacattgcatgtctcggtatcacttcggagtatgttcaagacaccgttgcagatctacatattataatcggagtatcatcgatgcatactcggcatttctgaacgttattggtaatggatacatcctttagctcaacatacaacacaatacatatgtaacaaatgctaccatgttgctgtttacatattagaattccaattctcggctttctgatcttcccctatactccaccgcatggagattcaagtgagaccctgtacccaccgagaggagtcggcctataaatacatccaataaacaaaacacgtgtttgaccttataagaatggcgtggaatcaagatggtatccagttggattgctccgttacaggtacatgtatgtatttgtgttcatttcattacagaccctacggtgaacagaattatgcgtgagcatgatgatataatgtcgccaggggcaaaaatcgaactcgtctccaccggggacgctaggcgcggggaagatcgcatcataatcaaactatgtagtctcgtatttatggtgggatacagtgggagaataaaatgctagtattgaatggtacaagcccatatagagtaaaggaaatcgacccttgaaaaaggtggtcaggtatataagaaagaaaattgaaccagcgatcctgccaggacatgcaaaagtaaagacaaaatggccgcatccgtgactcgtaatgtgtcgtcgggcagttcacagatattagaaataagaaaggagaaaggaaaaggataggaagatatcgtcgtcaccatgggcgccgggcaaaatctatgaagtgaaaccccggttgtgacccatattaagtgcagaacggtcaaaatggtcgggaaaatcaggctcggatgtagtatctcagagagaaagaaaatggaaaatcgcgtagataaacgtcgtgattcgggcgtaggagagaaattgtatgatcaatgatcaggaggacaattggtcaacatcgccagccattgtggacggacaggcccgggagtctgctcgttaaatctgcggtcgcatatgcttgaatctttgtcaagatagcaatggtcgtccttctgatgctgacgtccaaaaggaatgctagcgcgaccgcagtggctttggtcaatagtcggaactaatgttgcctagggttcatcgaatgtcgctgtgcccggccagtcctccgatgcgagataggaggctgtggaatattgaatatccaggtcgcacaatcgttcgatgagtggtgtggctgatatgaaatttcagaagccgaggggttgttgtgatgccaggttaccagcaccaattttaccgtccttcatgggaacggtcgggtcccgagttaccatggcctcgtgcggcgagccactcggtcgaggcctcctggcgagcacctgggtgtttctggtcctcgcggcgactggtgaggccctgagggagcatgttgttaatctctgctgccagcgcagatgccatataacaccggagttccttctcttcacgctcatcctccttgatcaggcggcgttggtcggtcttggacatgttttcgcgacgcttgcgtcggatctcatggattgaccacagaacgacctcttcgggggcgcgattgcgagggcttccgtgtcgggagaaattgcggacgtagcggcgggtgacatcggtcgcaccgtcgatggagaaagccacacagtaagagatcttgcgttgccatccttcggtatacaggcgaggctgatcccaggcgccctcgcaggcatcgacgtgaacccatcgccgttggtgttccgagtacacttcggtccagacgtagtcctccgaattccaaacccaacggactcgggctccgactgcgcggcagaacatgctaaagcagttggcccattcaccaactcggcctcgtcgagattgcagtaattgccacacatcggaataccgtgggaatcgctcgtgggcggtgcagctggtatcggaacaacggtacagctcgactcgggttgcgccccgggcggtctcgtcgggagtgggaggagtcatgccttgggctatcgtaggcatgtgacatttcgagcacggagggttattaacaaattggaagaatgaccccttgaaccatctggaagatagatatgttagcaagggcgcaatggctctagatcatagggaatccacataccttaacaatgctcggatgacacaatcttggtagccccattccggtttccctgccacgctggcagcctgggcctgcataatttgagattcctcctcggcctcggaatacaggcgatcgagcggaatcacggacagggcctcatccaatagacccggattttcgtacttggtcggtgtcacggatagccccttcaataaattataaaatttcagtgaagctgcatcttggggcggtgatggcatgatgggaagaccgcgtagtgctgatgaggtcgtcggctttggagagggagcggcggtaggactccctagcgagggaggtggtggcggagcccgcgttggcggcggaggaattgatgaattggacattggagatggtgatgctgagtgagtacgcgagcgagagggttcatgaagtcggttaagtcgtttggtgcgcattagctgctcgaattcgtgtgttaaagaggcggcgtcgtagccattcgagacaggctgggtagcccggtgcctgccgtccgccatagtcgatgaggaagtcacggcagacttccaagacgatgactgttgagatccagaattcctcggaattggcgaacaattcgactttgggcgaaagagatccaatttgaccctacgttcggagaagggaagaggaagtgtaaaaagggatgtcggagacgagtagtaaagaagggactacctcgctcgagttgacgtagcacacttgaagatcagggaatcaagaagggaaagaaagaaagacaggcccttggagagagagagagagggagggagacgggattcacgtacgcagtattacgagcgtcgtcagcatctggccccaatcacgggccccgcggccaagccgcgtgtgcgaaaacgaaaggaaaaagccaagggaaaagaccctttttccccgtaatttccgtaatttacgtatttttgcctcccgtgaacacgtaacgtcgacatccagattttcaatggatcgttgctagtttcttggcgttgtctatactttgatggctgaggcttctatagacatttgggacggactcatcacacacagatgattccaagactattgagggatattgtacttctgtatttacggagtacaacgagtcagagccgaaccccatccactgacgtggctcagttactaagcctttcaaggttccagccctggtcaatataatcatcacggttgggtacaatgacgatcagtaccctgagtagttcataaggcgataataatcaaagctcgtggccgatactccataaaagcacataactttgtgatatcaagctccagtccagaaaaaaaaaaaaagagaaatatcgaggagatgttgtagggtcaacgcgcggccaaggtacgaaagctctcctgtaccgtccgctcgtccactgagaggccggagacgcgcaagcgtccgtcttggcatttcacatcggggccaacagcctccgcctaagccgctttgaggcggtgctaccggcctaatcgggcttagcgtatctagctgaaggggcgcttccgaccctccttccaacctgggaaaggcatcttcatcttctctggtatgaatgtcccaatgcaatgtgagatcctaattcctgggatacctaatcgtccatattctttctatcggaatgtgaaggtgagatccatgatccgatctcccgtgctaaaatatacatcttatgatcgtgcggatcgctagggctagtccgttttccatacaacgataccatccactggaactcattctccatcgccaatcatcgttggaaccacccacgagaagaccctggaaaatatttgaggttccagcttgtggaggtatctttttccatttgcagtcgggcaagtgtcgatctacatgtacatcgtatcggccgaacccgcgctatgtatatacccaataagccggcttacatatgaatcaggggttctagttaagactgggaagaatatattcaagtactccggctctgtatatatctagctcaatatcattatcagtcatgttcgggtgcaactacagtatagaataaatatagttaggtcacgttgatttggtatgccaatcataatgctatttttaaaattcacacgctctaagatccagccctgaaatctattacatctcatgactcggaaatttatgtattgaccaggcgttttatctggggaagtcgatcagccaccgtcgtttcatcttctagccgcgtttgagcctagtgatattctgaggctatgctgggtggctgtgcgatcgaacgcctattattgttgcataagtagttgagcaatccgtcatatgtagcagaatcctggagtttttttttgactaccagatgtttctatagttctgatgccgagaaaggtgtctcgatgcttagctcggatggcgagcaatttcaaaaaaccgggtctgtcacgggaacttccaactagtcttttttttgtcaggtatgttatttttctcttctcatcggtattgacggtaatgacaacagctagagttactaccttaacccaagcaaaaggcgattcgtacgcgccacgcaaggctcatatcagcactgattctcgtcatgggatcagtgccaccaagggagaactgaaagcaattcgggcttaaccagccgagcgaatcaattatccccggacgccaagtgccaagacctcatgtgtctcttcactttattgcttggatgatattctaaaataagacacagcttattctgcaagactgttggcgtatgctatgagcttggctctgccttttttaaggtgccaagccgatatgcatgctctccctgtggatgcatattccgcgcatctagtttccacgcgtcgacacttattcaatacctgcgcgtccctccatcttttagagatctgtcaattttgtgaccgcgaaaacagcgctatcctcaaaccggccttatccccagccaagaagagaggacacgcacgcggcataggtggctcgcggtgcagctgacttcttaaggttagccttacgttggcatagttcgacgttttactccatgcggttttttgttcaactcgagagtgaccccgccggatatacgggaccatagcgttagctagggtgggccgaaacgtcatgcgctaatccacgctaactctatcgttgtcgcaagctctcttcgaggcaattttgaatcttgcattcttctacgtctaattcgttgatatggtggctcgggtcgtcaaattgcccgtgcagacctaaattttcagagtgacgtgtatgcgcctctttctatggactgttgaactactcttggttccgacgtcagaagctggtcacgtgtttatatcgttgccttatcgcatttgtcaacccttatgagctctgcatctgttaaacctttgcctatcaaccttccaccatgtcaagcagagatatgagcaggtggcacaatatccatttctacgacgcgtctaacggatagctcctaggaggtttctttcaagccggttccgtaacggacgctaacctaatctggattctcgaggatgtgttgctagatgcggcggggcattttacgataaagcatcgcatccgatggaatttttataacatcgaataagagcgttgtccctggcgactatgatatttcctgtgatggtaaggctgaccatgaagttgatggaagagtctttgacccgatctgccgggacccaaacgacccaaaccatgtcgcggacgagctcctaagatggcactttcggtaaagcgcactcgttaagaggggtccaggagctgatattcgagtcagactttccccccaggacagataaaatagcgatgctacgaaacgaaccgtatggcaaggagagatttgagattgaggtcgaactcagtcggacctagagccagagaagaagagtcgaaatattaataagaatgaagaccagaagaccatacaaactgctaactagcaagaaggtactctggaaaatcagtgggattatctgcagaggggtgtcattgtttttgcttatccacaaggggtagggctggattttactttggctactagatatcctgcgtatacagccaaacctttcactattccaggaatgtcaggtgcagcctcttcatttatttaacagaatttacccaaagaagaatagaaagatctcactgtatagtccctaggcccagcacaacagatagcagagtgagatacatatggcagtagcaatgagctgaatgtcccttcctcttcaaaagcccgagcccctccatcttcagtattcaactattgtttcgttacctgcatgcattgaactccttggctatttgcaacatagatatcgcatcaggtcataattcagtccaatgacggtcttcatcgcctctttgtgagtttcttcttcatctacaaaactccacagatctgacatagtatataccaggttcctcccgtacaccatcgatttccaagtgacggaacctaaacatggacatcgcgggtccttgtctagccatgcaaatgtcgatggtcctggatctatcgatgaacgccagccagatgcctattatcaaactcgccctgcgggctgtctcccactaacacccggagccacgacggaagacgagacggtgttcagaggatatacttggcgattagcagatgagattccgattgccaatgaccgattgtggcacggcccgagcgagccccgtgccatttcttggggacacagccggaggtttcatcagcccaaatccaaggccacagatcccccaacaccatctatcgtgagcagcagaagggagttgtctttggatggatcacaggatcgatcggacataaaatactacagtagcacacgaagctcgctctccaatgccgaatgggtcgtcaaagctgccgaacaaggtcatggaggtctacaaaatgccatccacgctgctgaaaagtcgagcttgctcaaggacaagacttgggtggggacgctaggcatgcctaccgactcattggcagattctaccagaacagacatcgctgagaccctccaggacgtgtatgattcgttgactgtctttgtgagtgacaacgagtttgagggccattacacccatttctgtcgcgcggtactttggccagccctccattatcagatgcaagaaagccctcggcatactgagtatgacggttactcttgggtccaatacctcaagctcaacaaggcatttgcagaaacaatcatcaaccactggaagccaggtgatagaatatgggttcatgactatcatcttctgcttcttcccggcctcctgagggaaagactaccccaggccgagattggatttttcttgcataccccgtttccttcttccgaaatcttccgttgtttgattcaccgcgaggaactgttgaatgggcttctgggtgccgatttgattggatttcaaacagaggagtactgcaatcactttcttcactcctgcagccggctaaggaggctagaggtctctgtcaatcaagtccacctcaaccatcggtacgttggtgttgtgaattctccattggggattgatccctcatcactttataaattacgccaatccaccgaggtcaagggttggatacacagcatccgccataaataccaaggacaatatctcattgtagcgcgggaccgattggatgcaccgggagggattaagcagaagcttctggcatatgagctttttctcaagacttatccagcatggagaggacgggtaagtcgagtaacatagcttactgcattttatactaatttgttttcttgtaggtggttttagtccaagtaatgtcatctgcatctgagatcccagagctggaggcgcagatctcaaagaccgcaatgaggatcaatgcaacatattcaaccatcactcaccagcccttggtgctggtcaagcaggatatcagccacttccaattcattgccctcttaagtgttgcacatatcttcatggccaccaatctgcgcgaggggatgaacctgacaagccatgatttcattcattgccaagatggacagcttagctcccacaaacatggatccctgatcctcagcgagtttgtgggtagtgcctctattttttgtggccataagcttctcgtcaatccgtgggattacaaacaatgtgccgatgtgatcaaatccgcactcgagatgtcagcgggagagcagaaactcaactggaatttcctgctcgattgcaaatctccctatactgccctcaaatggcacacggggctacaagatgctctcacaaaagcccacgagatacagcaaattcgtcagacaaaccacccctctccactttcacctactgacttgaaaaggtcatatctcgccgccagagcacggatgttctttttagaagacggcgcagtcttcggtctaaatttcggcataggagagtctgtctccctaaacaaagcctgttcaactctacaaacgctcataaacgaccccaagaacatcttatacatactcagcaaccagagtaccgagcagctccagcaagcactcgaaaaactcccctgcgagctcggttttatcgccgagaatgggtgcttcctacaagaacccgaatcagatttatggattccattcgtgcctcaaagcgccatgaaatggcgtcccggcatcaaaagaattatggagtatttccacgagcgaactgaaggcagcggaatcgagcatcgccgctgctccctaacattccactacgacggtgcgctcgaccgcgaagtagccgctcgccaggcctccgagttagcctatcaaatcaacggtgcccgcggacgtgcggatttccacgtcgtccgcgaggcaacatcggtgaaggttgaaccgccgcatgttgctttcggaaatgggagagccgccacctatatcctagaccatctccctaatatcaagtatccggagtttctgttcgcagctggtggttctcgcagtgttgaggcgctgtttcgctgggcaaatgagttgggtgttgcccccgttgcttctcggtttgataattccgagcttgggaaaacactccatgtcaccaccgtgacaactagcacacatgctaccgaggcgagatcggtgttgccgtctgattcctcgcttttggctgttttgggtgaactgtcgagtttcacgtctaatggggaggatactgaatgacttactcgcaccgggtttgttgtggctggttactattttcattatgggactgcttgacttattatatagttttgcttgatgttcaagggggggatacacacatgcaatgcagtatagctttcaataactgatacatgctaagtagtcttgattatttagaccgacttttatatttcgagagcgtcgtttcaaatgatcaccctaatcgtctactttaaaggtaaagatacatttttattccttattctctgccacaattcatgcatagatcaaggggatcagcaatcataaaacggtagattggctctcacaactccaccaaccatagacccgattgttgaaaaaaatcagaaacaaagagagtgcaaatacagaacacagaatacgggtaggatatagcataagcaatgattaaaagaaaaaaacatgaatcataagaagcagcagctagcaaagcaaattggtcatttcatgccttgcgtgtcggagctgagaaaggggttaagaggccggagactctagggcttgtcctcctttgaggatgaggctccatcagtcgctgctgagataagggtgggtgccacacggcgcctcttcggcggctgctgcaacgcattatttggttcttccttgctaccttctctttcagactcgcttgcacgctttcccagaacgctactaccagtcgtagtggtcccattttgtggagcgcctgagataggcgtttgtggcggagttgtcattggaagagtcggtggctgcgcagagtttgttgccgtcacggacggaacagtcccgagagtgggagtaggattattcacgactcccgcaggggctggctgcgtggaaagctgtgtcgcgactgagcaggccgagttggaccgtgcgggactggctggcggtatgggtcctgtgctatttggaggggcatggctcgtcttgattggagatggcacatgtgaagacgccgaatgcgttggtgtcagcagaggtgtgagatttgtcgcaggggtggttgggtttgaaacattatgagtcacagaagttggtcctgtgtacgtttggcccagctccccaggggcgaacgagagtgaagagcagaacccatcagaggaactcatgatcaatgttaatccatcggccgacctgttgtgcgttagaaattgacacgtgggtatcaatcatagaaacagtacttaccaggtcaagtcagtaaaagtagcaaaatgcaaattgctgacgatacatagcggggtttgttgttgtgtgtcatataccaagacagcatcttgagtggcaacagcatatacaatgcgataaggaagtgcaaagacgggcgccgagctgtggtttgcttcattgccgccgtgctcggcagcctttggggatggctgaagctttgatgaatccgccgtcgttgaggatggagggactatgtggggttggctggtgaagggtggatttcccgataccacgggctctgggagggacgagaacatctcctcgcctgaagatgtatcaagggtgatgtttttcgcaggctgggtgccctgcttcaacgtgtaaaagaccggggagcatttgacggctacagatggcttcttgtgtcctggaaggtgagagatcgggggcttgttgaaaccagcccgtgtgtagacgtaaactgtgttgatgacctcgtctgtcgtctttgtagaatccgtagctgatacgtgactggttttgaattgaccagctggtgtaaacagcaggcttccgtcaggagcaaaggtcagtcgcctgaagaaagaagtaaacgtctcgttggcatagatactggcgttcttgacccccaggccaccaagacttggggatgagacttccaacggcttaacagcgggcaacgggagagatggagcaggagacgcggatcgccggatcgaaggagacgagccgaacgaagaacgccggctgtgtgagactggaggaggatccatgggtagattggaagccattggtgtccccggagtcgagggagcaggcgaggcaatagcaatggaatttgcagtgcttggttgagaccggctcgtcacgtctggaggcgcaggactgctagatgcgatacgtttggcagggagatccatcttgagcactttcccatgcggtgtcaatgtgaattgtccatccttagtcttcaatgtataaatatgaacggatcggtcggacgactgagtcgcgacaaactcgttaagcggatcccatgctacaccctgaacatagtgagaatgctcggcaatctgccgtaccatttgccctgtattcgatcgttagcctatcgcgttgtatgagaaccgttcgagggtaactaaccagtctgggcattgtaaatccgtgcgatgttgtccatgctgccagtaatgataaagacaccatcaggagaccaggccaggtcgtagatctcagcgccggacgagcgacacatgtgcttcactcgccaagtctctttatcgtccgaatgatcttcacccagagcttgcgtttgtatctccgatggtacccagagtaggacatttccatcgtctccggcagatgccagcatctcacctacatccgtcagacttgcagtcatatgctaacctggagaaaaacacacctttcgggctgaagcggaccacattgacggcttgtgtatgcttcatcagagtactcagataagagacttttctttcctccccggtagactcgactttccagagctgtagaacatgtcagatcaaggtatgcgaagggcgacggagggcgggttcatactcggacgttattgtcactaaaaaaaagtagtcagtaaaccgttcaacactctgagagaacagatagaacgtactttccagccgtagctaaccggcccttgccattgggatcgaaatgcaccgagtagataggggcattgtcattgtgccatgagatgagcaacggggtggccttcatggcgagcgccgcagctcagtgtgttaagcaccaccggttttcaagtaaggtgatatgacctggagagaaaagagagaatagaggatttccgagtccaatgatcaatcaggtatctttttttgccaggtgatatccggggtggttttgaattggagaagatccagttgatctaggtcaggtaagaagacggaggaggaagtgcaattcaaatatcaatgggaggaaataaaaaagatgcgacaaggggttggggacaaggggagagaaggttaagggaagagagtcgtgattcttcgatgatgcttcgagttgtttgcggagaacgcgaccgacggcaactgacaccgggagagggttttgttgacattgtccttttgtatatgtttttgtacgtattatatagcattttatagctattgggttattatatctattagaaatgtttatgatttgaatcggagtacggagaagtagatatccagccctagaggtaagcactaggagcagcatttgaaacagatatcaaagttagaggaacgtgaacgtaatcagtctcaaagactatttattggtctatacggagtagaaaagagctaactatacaatgcaaagcaaccccaacgcctctccaagtcgccatttttcaaagcagaatagcaagtacaagcaccagactctacgacagccactttccgagtctctctccaaaccagcttacagctctctcctgtcgcttctgtcgagcatcctcttgagactttatgaagggcgcagcctcctccgcatacatcttgtgctgctcccgctgcgcgtagtgtgcccgaatttctaactctcgctcatggggtgtgagcttctctaatggcttggacggtttgagctctgctgggattggctctcctccaggaatctcaaggccgacttccggggtttgcgatggcttatctgggttgaaaagcgacgtgataggcggtggcgcgattccagcggccttcgcatcgtcaactcgcttttcatagtctagcatctggtggtagagtttgtcgccatgcatttgaatacgctcttctttttcggcgtcatattcgaaactagatgcgtaaccgagtgcttggaggagtttctgtttaaggaaacatattagaatcgacatgatggagaaagctatgagttccagcaccaactcacagtctgggtcatgaagcatcgcgaaaaggtggcattctccgccgagcacatggtcagccgggcttcaatttgcttgcgccaatttccggtctggaagcagtatgtcagggcttcatgctccaaggcacagttctccattgctgctcgttgcactgtgtcgccgcgctctttgtacttttcaatcactcgtgatgccacgccgactccgggttgttcttcaaggtccatcggcggcttgtaggttttccacagataagcgtaacggccatctgggtagagtgatgctgcaggaactttgggcttcgagggatcggacggttcgggcgattgcgcgggcgtggagggcggcttcacattaggaccaggcacatatttgtcgggcttctcctgttcgaggtagtcacgaagcccgggatcgagcttttggacagtatcatttttgtcaccccagagccaacccatttggaaatacttgtcgagaataaccaagaatgtgcaatagctgaagagttgaagattgagaacgcggagaagtcggcacaaaaaaggatcggccccgatagccttggctccgaccgtctttactcctcaactaccaacacgacgcgtcttttcgacgccgttcctctaaaatggaagcctgtatgtgctgcggtgaagtgcttatctttgtgtgaaattgctaacaattgacagcgcgagaggagcggcagctaatgcgccagcgcggagctgcgtacgcgccttgtctataccccgcggaaccataacagaaactgacttgctcgtttaggacgcgcaaagcaagagaggtcaattttgggttctcatttggtagcccatcgctcggattatcagcgactgcaccacttgcgactgtccctgaagctcagaatccaccgcgaacacagaccacgccggacacaacaccacgaccgtcaaaagtatcgcaaccaggatcgcaagccccggcaattgagcgcacaccgggaagtgcgcgcaacaagctcccagaaaggccctcggcatatgacgtaccctcctcggacgatagacctgaacaaacgcgaagtaacaagaggagaaagatcagtatgctaaggaccaggctggtgtgctatgctaggaatatgcgctaatgattactaaggttctgctaacggatcagaagatactccttctcgttcgaatggcgggcgatctaggaatggcaatgcacagtctgttgatcacaatgatagcacagagtctcaaacaagccacatccaggaacacccagatacagatacacctcctccatcggaaattcccaaggaggtctctccacagcctctcgtcttacccattccggagaccttagtcgaaactcaacccccgatagaagaggggacctatggcgcggaaccaacaacatcagccgctgaagagcacctagcccaaggcacaacttcagtgtctagccctacggcgcctgcagtagctgcagaaccacaagcgccactttcatcgcctacgggccaggccgagcagcctgaaaacacaaagcaactacgcgagaaacgacatagcacaccacgggtcgaggaacgaatcgaaataatcaagacgaatcaacaggctaccccagaaactgcttctccaattgttcagacagatcaatctgcaacaaaagccttatcaccgcgtggtagcgccgccgaagctcttgaagctagccatgcgccgactattgagggtgatgttgacatgactgagcatgtttcaccacccaaagataatgtaccagaggaagacagccagacgtctcaattgtcttctacggagatgaaacaggctcagcagcatcaatctaccgcgaataagactccagaactgcacgttgaagcctctgtgcaggagccagcaaccgagacccgggatgagcccgcggtagcccaatttgagggagccccaaaggctaaacggcctcgtggaagacccttgctcaacaagaagaccattgaagcggtcgagactgagaagatctcacctggacctatactagatgtcgcggagtcctcttcggggccgggtcgcaaaccaacatcacaaaagaatgaccaaccggaacctgtggtagaacctgctgtgcccaagccacagcgtggtagacctgggaagaaagcgaagcgcgcagctgaaactgaccctgaaaccgagcctgaacctgcggcagcagaccaggcagaagcagagataaattctgcagccccccctgggaagaaatcgaaacgcatagctgaagctgaccccgagcctgaacctgaacctgtggcagcagaccagccagaggcagggccagaatctgtggcacctaaatctcgtggccgacccgggaaaaagaccaaacacatagccgaacctgagcccgagcccgaagcggaatcagcagtatccaagccccaacgtggcaggcctggaaagaaggctaatcatgcaacggagctggagcttgaatctgccacagaagagcagcccgagcccgaaatggattctgcagtacctaagactcaatgtggtaggcccggaaagaaggccaatcgtgcgatggagcctgagcccgagcgtgtggcagaagaccagccggagcctgaggcggaatctgcagcacccaagccacagcgcggcagacctgcaaagaaggctaagcttgcactggagcccgaacctgaaccccagacagaataccaacccgagcctgagcctacacaagaacagcctcgtcgcaagactcgagcgcctcgtggagaaacagtcccggtcaccgtttaccgtctcgccaatgtcaattctctaggtggcgcaacatctacggccgacgggtctggagatgaagaagaatccgccgatgaactcaccacgcatcagaaggccaagatacccaaccgcggcggtgtcaacccggccgatgtattgagccagatctgccgtgagactctagagaaaacactaaatacactcaaggatgggattgcgaacgaacaaaataccacgcgacgtgcggagtggtcgcgcaagagaaaagccgtcgaagtatttggctcggagcttgagagccgcctcatggacctaagcgggatactcgatagcaattttgtgcttggtgtgcaattgaagaagactaagcgggagatgatggatctacggagtcatctataccgggtccgccgagaacgcgagaacatagctttgcagatggatgcggtgcgcagcagacacattgaacaggagaaggccaactcggtgagaacgttccctaacagtcctgacgatagcattactaacaatagttcctagtcacgatccacgatcagcaattcccttcacagccttgaattggccctcgaccgcaacaagcaacgtgctgcttctgctgcggattcttctacagatctcgaatacatgctccgcaccgtcgccgacgtgagttcccgggctcctggagcacaaggcggtctcttaaatcaaatccgagcattcaacgcacagctcgaagccaccgttgatcgcctggagcgatgatgtcatttttttgttgtctttttattcatccgttatgataccaggaatcattttttgtgcaatgaatatagtccatggctgcgccagaggatggcgtttggcgatattttcacctgtacaactcccgatgtgatcgagtgcataggtagctccttcttgttactttcagctaccattgaatgtcagagagacggcgagaatctccaattcttgatgatctgctattctacatgatacacataggtgggcaactctacagtgtattattaattgcacccctgtcgggcagtggtgccaccgggacaataacaaatcagacatgcccacttgctcctatcgcgactagtgagagtgagacttgctcgatctcatgttcaaagacgttatggtctcggacacttaaatttattgcttgttaatccaagtggagacccttggaagttctgcgaagcaagggaatactgatacttcgatcaaatgcaagatataaaaccacggccattcacccaaaatgtattctaacccccagttgaaatcaaatacaatatatacaatatatatcctaaaatgaccaaactcttcactcccctccacgtcggccgcatggagctcgccaaccgcatcgccatggcacccatgacccgctaccgtgcctccgacaaccacgtccccctccccatcatgaaagactactacgcccagcgcgcgtccgtcccaggcacgctattaataaccgaagccaccacgatctccgcccgggccggcgggtacgccaacgcacccggcatctacaacgacgcgcagatcgcagcctggaaagaagtcacggacgccgtgcacgccaaaggcagctacatctacgtccagctgtgggcggtaggccggccagccaacccgcagctcctacaagcggagggcggatacgatctcgtctcgagtagcgcgacggccgtgagcgcggacgcgcccacaccgcgcgcgctctcggagaccgaaatctacgcctggatcgcggactatgcgcaggcggcgcgcaatgccgttgcggcgggctttgacggtgtggagattcacgccgcgaacgggtatttgattgatcagtttacgcaggatatctgcaatacgcgcacggatgcgtggggaggtagtgtgcagggtcgggcgaggttcgcgcttgaggtctcgcgcgctgttgttgaggccgttggtgctgatcgcacggggattcggtttagtccgtggagtacgttccaggggatgcgcatgaaggatccgaagccgcagtttgagtatctggcggtgcagacggctaagctgggacttgcttatgtgcatttggtggagtcgagaattgcggggggtgctgatgttgatgctacggatcggttggatttcttcctgcgggcttatgggaaggcttcgcctgttatttttgctggtgggtatgacgctgagtcggcggttcgggcggttgatgttgagtatgcggattatgatgctattgttggcattgggcggccgtttatttcgaacccggacttgccgttccgggttcagaatggcattccgtttgtgccatatgatagggccactttctatgtgcctaaggaccctaagggatacactgattatgcgttcagtgctgagttccagaaggccattgaggcggcggcttgatgtcctgattgtttagcgatggttgtgtaaatcattggatgtatagagctagacttataacagccctagaggacctagcatatatatattagtgcttgaacataatcaaattcactccaggctgtgttggtgccgagataccagattcccatttcttagagtaggttggctcaacatgagtctcctaatcaaaagcaaattgaaccttgcacgagtaccaacacgtgactttgcaaaacatgcgaacctgagccctcataaaaaaaaagcgggggaaatgcagtatatacaggaagcgtatgcaccttgtaagcagagctcggtagttagttactccgtattccgtgattatgttaaacctaaaggatttccccacaagccggttttaccaaaacgtgtgttcctccgacttggcacggagacaaacaccactttggaaaagccgagaaaatgttccggtccgccgagccgaaaaatccaagccgagggtaaatcgacacgttggtagcccataaccgtggattctacacgtattggggtaggtatgtaatggtttttgtgggggatcagatcagatgaacgaaaatgtggggaaaaagacgaacgccattcgccaagcaacatcgtatgttctatgagtaatgtatatcctgcactatggaagctcgtatttcgatgtgcagcactatgctctttagtcacgccaagtccccggggcatttgtatctcgaattagggggaggtagctgggctgaaattggtccggagcatccccatatggccaattattgatctgtgcatgatgacatggggaaaggttaaacgaggtggctattattggtcaggaagaatataagatgcccaggtgtatggtgccacctttgatagcagagtttgcgctcggatcaggtctggatcagaggaatggatcaaattaccaggaaacaggaagaattagcaatgattgcacagtttccactcatgtctcataaacaaaaaggcacgatccaacatgaagataagctataaactctttaagggggggaagttaaagggccacttggccaagaggattaacgtcgcattgacttatggagtacatacatagcaccctgcaggtaatctgtggcgtgtgtgtgttgttgtttattattattacttggcgtacgccacaactccaggctgttgcccggtatgtattagtgaagctgaaaaaaaaagaatccaggtccttggcacgatagcaacatggaagcaataagaaaaagatggctattattgtatactccatttgtacggagcacattagtcctgaatccagcggaaatctctgacccgggccgaatctcaagttggtacggcgtacgccgtacggagcacagaacctccgtatggagcacggctgatacgtccaccataattagccgtaaatcagtgtggagctgaagcttaactcgcttgcactttctacggggtactttctggcacatgacaagcttacgaaagaaaagaaaaataaagaagaggctcgagcgtactaggtagtacgccgatctaggttccccccggacaagggaacacgggaagagggcagactggttcggctatatctttatttaataggtcaacctggatatggcatattgtctattaccctgagacttgagaagcacaattcttaaactgaatgtgaatgacagcatgcgatgtctggtacatcatccgtggctagtgggtatgatatgtgtatcatgcttcggtctcaaaaaaggggcaagagggggcatattatgcgagacccgcgctaagtggagaacaatggatagaagagaggacaataatattaagaaagatacagagtatggtgtataacgaccacagcttaccaaggtgactatatcttactatgaattcattagtgcgtaacccctaagggtctactccgtacatccacggcgaatgcagaataatgattgaatcatataatccgtcacatgggcaacaattggtatgaggcaaaatacattccacaattataccgaggtcatgacgcagtctcggctcggtgtactcgataccgggatttaccaccggctcagccactatcagcaagtatctgctacctgttgcttgctttgatttccatttgcactaaagtactgtacatatgcacgatgtacggagtaaatcaatactctccatccggaatagagtggactggactctacatgatagaaagattaatatctccagagtccagtaaatttccgtctatacaactgctaccatgggacctacagcataagaattactggaacgcactccggatgctaacgtccacggggtacataagcttatggaattatgcatcaggtaagccaagcattggagtcaggcaagtcagcaaaccctcgtttattctccctccaatgataacttcgttccccggatatcccatctccccactttcttccccgggctagttcttccattcatccatggatccttacctgccaattacctaacctgtgaacggtcctccccccattcctccgtgccgtccctgcatggctgatttgatatagttcgttttttacccctgtgaagcgattcaaaacaataggagttggatagttatattctgtataattatatgagacattcccctcccatctcatctttttttcctcttttctccactttagcacactcgaccagactcttatcaaccgtggaaccggtccataagtggagccttaaaaacgggtctgcaaatcattgtaatattaccgaaataccaaaatacctggtaagtttggttccaccatcgcttcccagtttttttcaaatctgctttttttgcattcactccaattggagagagtataatagttctcttccccttccccagcttccttccccggtttcctttttcttccccagcttcattgttctatatctctagcccagcagtgctgtgcttcaatctcatatacccctatacctataacgtgtgatacggctttacataacggtctacctcttttaccttcctctttttaacgaatcagattcattatgtctgccactcaaacaatggaccatgccgcattggagaaggatgcgggtccctctcctccctctccccagatcagctctggccagaacggcgcccccatgcagcctcagatgtccgtcgaagagcaccaggtagcacaagcggccgcgcgcttcggctacggacccctggcccaagtcaacaacaacgaacgatccctgcctcccttcggtggtgagttccagcccggtctgtacaagcccgtcgaaggccgcaaattcgccaatccggctcctctcggcctgtgcgctttcgcccttactactttcgtcctgagcgccatcaacatgggcaccctggatatctccagccccaacattgtggtcggtcttgcttttgcttacggtggtcttgttcagctgctctctggcatgtggtatgtagcttccgtggcctcggcctgaggttcccctgacatgagatctgcgactaatacgcgcttctttactagggaaatggctgtcggaaacacctttggtgccaccgctctgtcctcctacggtggtttctggatcgcgttcgctatcgtcttgacccctggtgggttcgagattggtgaggctctcggcgagtcaagcagtgacccttccaagttctatgactccatgggtctcttcctgctggtaagtgttccttcttcacaagacatgtgcaagaaatcatcccgctgacaatgtaacagggctggttcatcttcaccaccatcatgttgttctgcaccctcaagtccaccgtcgccttcttcatgctgttcttcaccctggacctgaccttcctcctgctcggcatcgcctacctgcagcgcagtcccgacggcagccccaacaccaacgtccagatggccggtggattcttcggcttcctggctgctttctcggcctggtacaacgccctggctggtcttgctgataacagcaacagtttcttcatcattcccgtcgctcacttcccctggtctcccactggccgtgttcgccgtggaaagaccgaccgcgagctcgcataagcgatttcctttttccttttttctcatcggaaaaacagccgggatgcgaagtgtccgctttggtgatttgtaatgttttttgatacccagcgttgtatgtgtaggcgatagactgagattccatccgccgcgttctcatcgagttgtcgattgtgttccggtttggaggcctgtctgttcgcctgtgactgttgtgtgcatggatgatcgatgattctgcactagtgcagttgcaaaaaaatcttttgtccgagtcgattgatgctgtttgtaatttttcgaggagcaccgaggtgatttcttgtgctttctgctttttttccttgctgtatttagtctcttttacctgcgagtttcttgtgactcagtaattaaatcatcgacattgttcacaataccttccttcatcttgtagattgttgtccttaggctactaggtgaagtcgaattcacaccagtgcttgctcttgtccgggttgtatcgcagacaggctgttgttgggcttgagacattgtatatcctcatcagatagtaacattctgcgcaagaaaacacctgccaccaatcatccaagcatgtctggctagtcaagcaccccgacctaggaaggccaagaggctgacaagccgtccatagcctagtataagattcatgtaaggatatacattgaaggtgaacgaggattgaagacaaaatcccaatatcctatagtatgggccaaaaaaaagtttgtttcaacagacgggagaatgaaacaggggaaaaaggtgccagggggacacgggagtatatagataccgccgaaatgagtcttttagggcctatttacctcggacctctccctctcatgcccagggatcaagccacccgagagtggagatgtctgatatcattcggaaatttctcggtctgcacgacttgccaccttgaagttgacaataagcataagccaagaatgtaggattctaattcacaccggttgacgcaactacatcagatcatgtatagatatgtcgcataacattctcctacatacctccttttcgcaggaagtatacgtacatctggttggaatcggttggaatcgcgagaaaaaaaaaaggtacgcaataaagcgggaaatgaaatgatatcgggaaaaaaaaaatcacgcaaccaaagccacaaagggccaagcaatctaggaagagctgcctttctatattgtatcgaaaatcgcgcatcgccgagtctaagccgatctttgcccggctgaagttcggtgcacgttcggcgggcggtttctacagcgtatcagcttcgtcgagcctagggagtgccggagatttttcggatttcgggatgccgaggttgggtttgtggactgatgggcggtttcaacgccgggaatggatgtagtatgtcgggtttgatcggaattgtgtgcttggcttggcttggtggcttggctgttttgaggttgggaggatatatgagctggagggattgggtaggaacaaacctggcatagcatgtacatttagttccagggttgaagaagtggtcaattaggtacggagtagtagatagatgggctgtagctgtttggagaggagtagtcgtgaatcattggaaatagaatatatacattatatcttcactcatgcgtagatagcgagaagtccggagcctggaatatactggatggaagcggttgtatataaccgacttggatgggttcgatctattacggcagagccatgtagccaggttcatactggcgattctaccagcagttgacactcatcccagatctgacgaagcataggcaggtgaatgcgatcgacatagaaaaagcccagcaagatagaacgggcctcctgccaagagtggattccctgcagccgtgcagcattggccagttcagatacaaaaaaggcccgctctgacggcagggttagactgcaagccgcgcccatgaaaagctgccagaggagcaggtcgcgacagagcgcgaataagcctgacgggatggtcgcctcgagggcaatgcgcagagcctggattggcttgggcagtaactggccgatcattggatagaagttccagatagcgctgttgtggaatagcagtaaagcgagacgggtgcagccctcgatggagttgtcgccctttacttggcctgtcatggtgtatcgatctgtgtgtagttggtattctacgtgcagcacttctgtgttgaaatagtcctcggtctcctcgttaaactctttgtagccggtgttgcctttgatccattctgcataccaggatagttcgaggagatcatatacgatctgtgccatgggttcgccgaagatgcctggtattttgagtagagggaaaaggcgggtggaaagtaatgctacgtcgtcgttgggtggaatgagagagagtcgcgctgggcgagtgtagcggacaaaggggaatataggcttggcgtgagccatgcaagcaactcggatatcagtcctaattgcgaggttagcaagccttgcagctaatcatgaaggaggatacgaaccatgagatctggaaccgcacgtctgaagggacatcgtcaaagttcttccgtagtgcgatcatctgtcgcaaacctgcaagatggattttgaggtaatcgggattccccgacgcgatctacaatcatgtataagctttagtaatcgcaagcttggtgcgcagaatatactcacttcaattgtcaacaaggtagaaactgcagcaatcagaacatcgctagaagccttgaccgggtctgacaggccctcgttgaccagccgaatagtctcgccacggtggtggaacgtgtcgatcaccaactgactccgcttttgattcggatctcggatgggtagctcgcctgcacgcatagcatcattggaagtagccatgcaaattgtcgcatgcagaatggccgggtcgcgttggatcaaggacgcccaatgagcctgcaacttgggtttataccgcgtttgcaatggatgcgcttcttgtgtcagatcccagaggactatacccgtgtcagtatacgagctcgaccatatcaggatcggggtgtaaacactcacagactcgcaaatgtcgcatcattctatctgtgagatgtgtatgtccagtatgaaaaggatcattagctccctgtcccaggtaagaccatgcagagggataggccaccgccccaccaaagccagagtcattccatgatgcggcttgcatagcagggtatcccacggctgttgatgtcacaagctcctcgacctgttctagctcttgttcatctgagatttgactgctagacaagttgacagacgaaccaatacacgaaccgacaggcccagcggtatccagtgccccggtgttcgtcgtcgtcgtcggctgacaaggcgagttcttccatttgcttttattggactgctccccgttccccattcgcttcttgcgattatgttcggacatgacatgggaccgaatccgcttcaaggtctcatccgttgtgcctgccgctgccgtttgttgatcactgttgacccagaacaaagtcgatttccccgtagatgcattgtcggctttgcggggtttgcgtactctggtggttgttttccgactagacgccttgggtgggggaggagctggtgcaggagctggtgtaggagctggtgttgaggccatggtctgtatagggtgtatattgggatcgaagtggatgggagctgcatagggggagtggatcggatcggccgcccaagccgcagccgatggccgagacagcacgggcaaggtctgctcgtaacccggtaaaaggtccttggcatccatcgagcttaattagacgttcgaggcattacctatgtaggaggagggagacctggaggttaagaggaggacaaacttcctttccggaccggcggggtagaaatcacaggaattttggattcttcacattgcagaacgaatcactggccccgctaagagttctagtggaaattgacaggtttgatttagatgatttaaggggtttagaggatttaaaggatttagggggatttacgattcgtttgtttgttcttttccgcccctttcgaggactacaagtctacaccagtcgcatgttccaatatccacttgaccttgagaatatgggggtatattcaccgagcttgttctttttaaggtcatgtggcgttgaaaaagagtaataacacatgtgtatgtaggtacagggggaacctcgatatcgtgatctactatgatcagcacaaattcatgaaacacgttgagatacacggagacaagccgacgaagtgtgtatagatctgcattttggcccctgaaaaacatccaacggtttagacgtcaagtcaagattttctgcccctgacagcactagccttacatttgttaaagtgggcatcgcatagcccgagatgaagttcaattgctttattggagtacagaatgcattaatattggatccgagggagctccccaaggtatgtagttacttgtaatagtatcgaagagctagctgtacaacggaaatatccgtggtctactcgatgtggaggcgatgtggggagcaagtgagatagaacgaatgagatagtcaagtgaagataatcatacaacggacgtcggtttcattccgacgccgtgcagatcgtgttgcgcccccaaatttaggtcataccggggcgcgggaagatcggcatcgtgtccagctgttctaacccacccattgtaccactctgcccactgttttgccaaccttgtccggtctgctgattgataaactggctctgtcggaaagggttggtgctgccagttgggttaggccgcaagggagctgctgctggaggctgcagaccttgctgcggagcaggagaggctcgcgcaaaaggattggttcccgtccgctgaggctggatcggctgcgcttgtggtggctgaagcggtacttgcgggggttgtacaggctgaaattgctcgtttgagggattatattgcgtgtttgctgtggatagtcgtctcgcgaaggggttcgtgttctgtcgcgatagaggagcggcgggtggctgagcacctgtatgagagttgagcatcattgactggcggaacgggttcgtgtgctggggttgcaagggctgaagtgcttgctgctgttgctgttgctgttgctgttgtgggaaggcggcaatgccttcctgcggaataggagctaattgcgactggaagccatatgaatgcggctgtggagagtaccctccaaatccagcgccagttggcatagcttgaagcggctgcggcggcggtggctgttgttgttgtagttgctgcggctgcccaaatggattatttgggccctgtgcttgataaggcactccatattgggtcggctggccatatccagttgccaagggctgctgctgaatcgcctgaggctgctgctggaagccagtctgctggggatagaaaggttgctgcggttgctgttggaaccctgtttgctggtattgcattgagttctgttgccccattggctgcgggtcaattgaatcaaaaaagtcgatcagatccacagctggcggcttcggttgttcggcctgcttgggtgtgtttgacgccggcgggtttgacactgggttcggcgcgggctttgatacatctgtggtcgcactggcttccatgctcggtggaacgcgaacgcctttcttggccagatactcccgccggcgaagatcgaaatcaggatcgttgagatcatcttcgagaaggcgcgccaaatctgtggaggcatgtttgagcttcggaatttccaagcgagtagcagactcgaaatgtcttgcgactcccaaaaactggaccacttcttccgtttgttttgtgaatgtcttgtagattgccaaggcgcgtacactatccggccgcgacatctcaaagtagtgttctatttcggggttaaaccaatgccgatcaatggaggagctgctgacttacctaaaacattaatcgtaccctcattcatgactgaatatagagtcaatagatcaagtgtgaggagacggaacgcggtcagactgatctcgttctcgggctcatccgtcaacaactgtacactgtcagtcaccaataaaaggcctgaattcggaattcacccacatcacatcgcagtaacgcacgaatttgcttctgtacgatttccgtctccctcaaaaggcctttatccacacctatcctcttcagccgtcccggtccgcttcgtacatggtccgtcttgcaggcttcgaacgccttggcacgcgtgataaggtattcggcatatcgtcggatattatgcccttgtgattgggctataagaacagtcagtagactgcaatcacatcaatatgagggaactactggtctaaccttcagagaaattgctgggcgtgatcttcttcgggttatcggacaggtatcccagcgcagcatcaagttgaccctctcggatcataagatggagcacgatgagtgccttgaaaacaatggtccatgccgagtctcgaagccgtatttggagggttcgaaatacctctgcgactcctgcctcgccggtatgagttgccacaagaatattctctatgtatttggatttaggggccgcaagctgttcacgtcagatatttaataattgtcgcatgtagaaaaaagaatgagctgagaattcggactgaccttgagcttcgtagccccctttactgacttctcaaatccccccggcatgttgttcttataagtcgcgaatcggcgcccactttggctcaggagaatagaagtctgttagaagacagtgggaaagactggagagcctgctccgagaatcaatgcccttatagtgtccgggtgagtcctcaatcatccgtatcgttcatgacgtggctcattgagccatgctgtgagcctggggcaagtgggcaattttctaggggatagggttcgaagtccgatcggaacggccgggttaaggattggcgagaatttgagatcactgagtgaatatgggctgagaagcaaattgagggataaggatagcaaataagataatcccaagggtgagggcaaagggagttcctgggggcggagtgcatgttcctcgaggcaacctaaattgggactagcgcatgttggcagttcctcgtgcagattagccctggagtatacgagtactatatcataacgaactggtatttagattatatatgaaagattataggctatataaactataattggatgaccatatcttggatatatccgttgatcgtaatatttgaatattgcgatttcgttcctatatctagagattatatatcacggtatccttgggtttatttgaaaacatttcgatgtagactgtggcatatcttgtattagacgatataatataatagatagctagtgaccgtaagccagccaaggagttatcattaacacagagggaacctgctttgcacaattggggaaaacaccacgaagcaacctttttgttggctttttaagatcgaattgaatgaagagaggaaagagtagatatataacatccatttcggaatacagcccactaggcaagtaaaagactactggtatttgacgtagatctagggcttcatacttgaactaaagaactatacaatactccacttatggatcatgctagaaccaagctagtcacaaaataagaatcaaggtctgaacgaccttgattctatcaattatctggccagagaagcagttatcttgtacgtagttgcctcaaacgtccgagatgggcaaaaatgtacctagaatagtgagatcttcaacttctaccttatcccaatatgttaaaggaccagatctacttttgggctgaagataggttctctatttgctagcatctttgaagaagatttagtcacatatgagaccgaagatatgtccattcccagaatgttcgagggacgggctggttattcaagtctgagccccaagagtaatttatcgtttgttatacccttctcttacttttcttcccctacccttctgactctcatccttcaaccacccctaaccccgcagacaccccaccctatgccattttcactgtcccagcgaatagcagatgaaatcaccatgatgagtctcagccgcagtcggaaacgaaccgaccagcttgaaaacaacgagtcggttgttaccagccatggaaagatctgcctctggtgtaaccgtgaattgattatcgacggaacagatggtcgtgatgaccagagccagcccactcgtcccaaccaagccataatctccaatcaaaaccaacagttccaacatagacaccaagagcaccaagaccaggaccagcaggaccatcaagaatgccaagagcctcaatatcaacatcaagatcagcaaggttgcggacagcagcatcatggcagacaaggccatcacattgaccatgagctggctatgcaaggagttccggccgataaaatgccaccattgctgtttcggtggtcaaaccgtgactcccaaggaatcaactcgaagaccatgtttgtagccgggcttttctgcaacggtgattggtttgactccgaagactgctccggggaccgtttcgagggcttctttcggagccatgtaagtaaacagaaagtcagaacccccttcatctctaccttccgatcaccattggcaccacttcaccgtgccattgctggccagaatggcgccatagtgaccgttattgacacgtccaagttggagaccaaagtcttctatgcccatccgctggctattcggaccgggacgcttgtgtacaatggctggcagggctacggggagtacctcatctggggtcgcgtcccagctgaggcaatcgctttcagcgtggatatcgtcagtcttgagggcatcacacagtcacaccgtgatttgaaccgcttggttcagatcccccttatccgcagctctctacgctgcagtgatactcttcgtgacatgctggcgttgaggagaaagtcgcccttccaatctggtagaacgctcggaaagtttttgacccttctccaagtgccaaggatccactgggcgaacttagcatctgagttcgccagggcatggggttggaggaatgcgagagagacaaaaatattttacagcggagtgaaaagtgcacctccttacctgcccgaggaattgacggactctgagagtgaggctccatggcccacacctcgaaagacgccttggcagaccccccaaaagatgcacttctcacccgactgtgttcccgacttagactacgaaccacccgagaccgacgaaaggtcggaagggacctctgagtcggaaggtgtgtccagttctcaaactatgtcaatgtgcgacaagacagagaccgcggatgatgggaacttttcaacacatgagacgctgtctagtggaatcttcccggagaacaatggttccgaagacttcttggcgcatatacatagtcaagaggcaattgacttaacctctgataatgaagatactagttcccagcgcgcattgcagcgggactggccgtcagatgacgatacatacatgtatcctgacacgcccaccaaaatccgagggaagatctcactgcactcggacaataaagccacctaccgccctgtactcaatggacagatggacatggacttttttgaaaagttccggctttggacttagcgtacaaactgacgatatgtgaaggtcacgaagaatccatgcttggcatggaagagaacattgaagaatctttgtttggcgcagctatctgaagacgagaaaaactagtaactagtcaatgtgtcaatttgcctttgtgatatagaataaacctcctggcaatgctgtctctaatatgtgcattgcgaacaaagtaaataattggcatattcatgatcctacctccttcgatatctaggcaagtaggtattatgcaactaactagtaatataaccatatatgcccgaaataatatcaaaactacgcatacagacagccaaacgacaacccatgccctagataggtatgtgatttgccattactagagaacacagattaaggtcctactggatcaatgtagacttggaagagcaaggagatgactcgagatgcgcattgagaggctttgtctagattgccatttatggtcaatcttgccctgtgccggagttggtgtacagtttccatcgcaggaggaccgaacaaatcattttgatttttgcgtggatacacgttcatgtgcgaggtatctgggacatggaaactcataaactatcccgacccccatccaagaacttcctgtatatccagtccataccgcttccttcgccttcaaaacacccggtttattaacctagaacttggagaaagacttgacagcgcgcgaggtcttggcgtgaaccttcaacacgttgaagcgaacctagagagaaattttagtcagtcgtcatgtccgtagcaaacaaagtaagctgtcaggttcgatgtcctgcagtaatgcaatagtgtgtggttttgccaacaatgacggaaattgacaaggatcactagatgaacgtacagtcttgctgagaggacggcactggccaacggtaacaaggtcaccctcctcaacacggaaagcgggggagacgtgggcagacaggttcttgtggcgacgctcgtaacggttgtacttggggacgtagtgcaggtattcgcggcggatgacgagggtacggtgcatcttggtggagactgtagataatcagttagcaagtccccctgcctggtgaaaaaaagacagttccaattcaacttaccgactttgccgacgaggacacggccgcggatggacacctgggaagtgaaggggcacttcttgtctgtaaaggttcaaaaatgagtaatctgacacggaaagattttggtgattgcggggatttttttttggcatgagtggtcttttcgtgattcgagagtttgagtgatgaatgcgaatattggcgagagagggaaacgacggagattccaggcccctcaattgctccatgcgatcctccattcgtcctttgtatccatgaaaagaccacccacccatatatatcccgccacaatatttcgaataaaaattcaacggaggtcgtgcataccgatgtagcttccctcaatggcggtcttgggggtacggaaaccgagaccgacatccttgtaccagcggcggccctgggcagtcttcttggacgaagccttagccttggtgttgaggaagatgtgaggctgcttctggaaagcgcgctccgactggacggtcaactcggtggccatttttgcggtgttgttcgacgaggaagcggtgtcgaggaaatgtcgggttggcggctgtcgaagatgaggaagattcgttgtccgttggaatctttggtaattcgtagtgtgcgacactagtcctaatcgggactaggctaattggggttagggctctgcgcttttgtttacatcacgtgattgcggaggcaacgcgctttgggcaggtgcgataggagtagattacaggctcacctgggcagtcctgtttgatctaaagatcccgacgctcagatttaccgagtatgcaaccttgaattgatctgtgaatgtgccgattcgctcgccgacaatgtcaactcgacccgactccgcggctttgcggccgccgcgatctcgtcggtctatcgctcatgtcccgcggtctaggatgacgtctagtttggacaaggagaatgcgacaactcagattggcgcagctcagccattcttgaataacacaaagcctgctatgaaagacaagaagtctcggagcaagagtttggggcctggtggactagatgccctccagaattctaacggcaatcgtcgccaggtagctatcaaacggaagaccacgggcgcatatgcagaacaattctgacttaaaatatctatagtctacagcttcttttccactaaagtctattctcaaacccacagtccctgtgtctccagtgcgaaccattccgtcattcgaggaaacgcgccgacgtacaccagctcgtagtaaacagcagacacacgacggcacgatggacggacagggccaaacagaccaaaagaaagagggtcttttgattgacttcgaaacaacaccaggacctcccacgacagataatgacaatgacgacacggcgaacccgtttgatacatttaatgcgacttctgccattcgcgaggagatggctgctactaaggagcgtgacgaacaggagcggaaagatcgagaacggcagaatatcttagagaaacgagccgcgcggaggaaatcaatgggtcagtgtgttccactttgtcatagaagtgaatattgacacagatttatacagcgaatcgccgagtatcctttgcccccgaggcaaccttacatacctggaacgtggtggaaattccggacgactcaacctcctcctctgccgcaaactcaacaagacgcgcatctgctgccgtaagctctcagaaccaacctgcccctgcctcgcccaccaaagacgctccatcttcgccagcagaatcggaattcgaattctcacctgtccgcacacaagatctaaaccagataagaggtcgcccatcatctggggatgatgacgttcaggatttgtcttctagtccgttcagcggaagctcagtaggaagcgaagacaccggcgcccaaagtctggccggagaagatgacgatggcgattcttcagactccgacgatggatttgatgctgagagcactgcaatgagcatggatgatatgaccgcgcgctcaggcatgagtgtccaatcagatgcaacttctagctcaagctctagtgccaggctcaacgaagcactacgtcaggccgcacaggaagcaggaaccgaacttgatgagggcggagagatgtcaatggaaattgtggatcaagaaataaccggtgcttttcagccgtggatcaaaaagggccaaaggcaaagctttgactggggagatattagcgcacgacatgatgaggagaacctcgatccatccaaggcggccactactcaaggttcaccagaatcagatgatatcgacgaggacgaagaccttagcatggacgtgacgaatgccgtaggacgcattcttggcaagtcccccggccgtcgccagagcacggctcgtcgccagtccgtggcagaagaatccaactatggagatcaaactatggagatgaccaatgtcgtcggtggcatcgcgcaggtggattcgccattcaacttttccgagattggcaacgaagatgaaggaatgacaatggaattcacatcagccgtcggcaaaatattgggcaaccagcctacttatgcctccaactctgatcacatgaacttcgatcaagagaatgagtctgacgatggtatggacatggagatgactggtgcaattggtggcatcctacagtcagggatcgaagccaatgacaaagtgcacgcgaagatgataatggagcttgaaaccgattcgggtcagcttgctagctcgccttttcaagacaatgttcgacagtctcctgccaaatcacccctggcttatcagattgctgctgttgcatctgaaaatgggagccccagttcggcaactatgcggcctaggcctcctcggcgtagctccaccccaggatcgtccagccggcaaagatcaccaaatacgaagccattgactccgcccaaacagtctaccccacaagctaaacctaccactccaagcaagacacccccctccagcaatgtcacatttagaagtgcttcgccaaagaagctcttccaacccgaactccagcaatcagcagataagcgcaagtctctacgccaaagcctgtttgagcataacatagcaacaggagagtcgaccccgctcttcaaattgcaaccacgcgagagtcgtcgctcttccggtctagggattgacaaagaaggtctcggatctcctcgcgtggcggccttactggacaagcgcccgtcgcttggggatagtacgccccagttcgttccgcaagaacagccccgatccggtgtacgcttcgaggatcctctgcaaatgcaggccgaggaagaacgtgatcgcgaagaagaggaactccgagaggatggctatatcaggggattgcagtcagatcgggacgtaaccccaagcttgaaggacttgatttcaaacctgagcccgaagaagactaggattggcaatcgtaagagtctccatgttggggctgctcgcggggttttgggcaagcgcccggtcgagctagacttggatgaagacgaagtggagaattcgcccaagcgactgcgtggccataatgtcagcccagtcaaaggtgtcaagttgccaacgccgatgttcagggaagccaatatccgtcggtcaattctgtcacccgtccgtagagctgctagctcatcaccccccaaaggcagcaccacgccttcccaacaaccacggagttcttcccaaacgtccacaactcctctcaatcatgggattgatgctcttcatattgcttctgatccccaacaaccagaagaagaagaggtcactcctaccgaagaagcccccgtggaaattgagtctattcagctgcaggacttcctgaaaatgaccaatattcatttcatggaactaactacgacaaagagaagacacacaactgcccccgggagtgccaccaagaagctgacacgaccttctggtgagagcatgcctaaaccaggctcgataacgtttgatgattgtgtggcagctggcttttgtaccgtgccaatgcttgaattataccagcatgtaagtgatactataccctgatactcttgttctcgctcacactgtctctagtcgtgtcgggagttgaagtcctatatttctgaaggtcggcaagtgattcgctctattgaggcagaaacatatgccgaaaatccagctctcttcaaagagtatatcaccgctcctccagatatccgagtgatcatggacaatcagttccgaaacgtcaaaacacatgcccgtctgctgagtaaggccacatggtacgaatggcggatgaagttgcttgaggggttgaaggaagggctcattcgccacgtggaggaaatgaaagcagatgacgatctgctatctgaacgagaagagttgcttaataggaacgtgccgtttctcgtggagaagcacgcctccctggaggaagaagcaaccaacctgaaacagttggtggaagagatggaaaactgtgatcaagatgagttgcgcaatacgcgcagcaagctgtccgaggtggactccgagattgcagtcaagagacgtgaacttgagcagttgcagaaggaagtccaggccaaggggactttcatcgaggctggagccgaaatgcgggatgagttcctggctcaaatccaggaggcagagcgtgtcaaagaagagtgccgtggctggagtgctcgggagatcaacgaactgaagggtgagctttccctatggagtttctttttttgtggctgcaatactgactgggaaaactagcctccgtccaacgaattcagcaacaaactggctggtcgatcgtttcggccgcaattccttcggatgatgcatcgaagggacctttattgaagatggcttatcgggataagctccaactagagttctatcccggggcttttgcctccaagaaaagtggccaggacgagggaaagaactacccgatggaactggcttcccagaagaatgccaacatttctcctattgcatccttggtcctccactcgttgcagcactacctggctactatccagcaatccactgtcgcacctaagcagcttttgcgcttcatctctagcgcatgggaccgcacagttgggctggaaaatgaggcgcgcatgctggaattctgtggtgttacccgcctcaccctgtccaagcctgatgtgggctctctttctctacgcacacgctgtacgctcctcggtaacgctaccgtatccacacctggccgtaaaggcattgcctcgaagaacaatggtgccaagagaatcgatgttgacttcactgtccgtacccgcatcgataaagccaatgcagagaacactatcggttccttggactttgatattgacgtcctggcgacgaaggtctatgggttcggaccaggcagcaagtctggtcttccagacaaggagttgcaaagcattctcggcaaaggccttagtcgggaaaaggacggtgatgttcagctcggaaacggcttgtggtgcaaagcagtgcgcatactcacgggatctgtgttttagttctcatttatgatttggttattggatgggttagctctggatttggaaaggaaggcgcagaatgagtctttttcatgcccttcttgggttcaatggcgcggggaaatgggatatcttgacttcgggatctggctgggcgttattttttatacctagtctttcttttcatatccactgattgatcatttgttttctattacactactagtagctacatcaacactcgtgaactcttgctaatgcatatacaaacaagagagtagagaggttgtgtttacaacgataacgataacaacaaatcaaaatatcacaccccgatcaatcgacccttagaacaaccccaagaacccattaggccagaccggatccgccccctgattcggatcctccaggccttgttgcggcatataaccataccccagactttgaggatcgaacccaccagcttgagccgtttggccgtcaatagcaggcgcgccatagataaacgactcagccgatagaatcggcatggaaggatatgcatcgacaggctgagtgcccgttgggatagagggcggaaaactgtagtcagtcgggtagagacctgcgaagatatttccgccgtgggtccagtcgccggccacagggtactggaagaaatcggggattgagttggcggtactgctgaaggagtctggggagtcggtgggattgggagtcatgcctgatgaccctgggggttgggttgcggttgtgggatagtcttgggatagttgccaggatgggattgacggtgcgaaggtgttctcatttgcttcgtgaaggaatgtggttgagggtgagtatatattaggtgggttggcgagatatggggattgtatttgagtgttgtcgcccgggtctggcattgggctcatgggaacgacgtagccggaggaattgaccggtggaaggccttctaaggtgtcgggaatactgctgtccatcgtggtggggctggcggtgcttgatgctggataccgcggagctgtggtgggggtcattgttttgcggagggttgttggtcggcggtgctgcctttggtggtgtggtgctggctgtgtccgagatgtatgcctcttgcctcctggtggtttataatcttggtcttcgtcgtctggggcgcgggctcttttctcgtctttgtcgatagctactctggcgatgcgttcgagggtcgcactcattcgggccatgaaaccggcgtaattatttgatccttcacctgggggggtgagagttgcgaagaaggccgagaccatgttgagggattgaaggtctgctcgcacacttgaatcgcgggtatcccgcagaatatttgagaataatgttgatgctgccaggaagacgtagtataataatgacctaagacttgagtgtgagaaatgaagctgataagaagactgttgtacttaccaggtccatgcgatatctccccatggcatgttattgacaaccttcagggtatctcgggcagcctgtgcaccaatggctgccgattttaaggcatgtgctttgctgattgacttgacctgctctgattcctttctggctgttatcatgtagttaagaaatataggtacccgatgaatcatgatcacagcattgtgatagacgaaatgcagaccaatagaggcaaagccaaacaggaagtcacgttcagtatgttttattttcggcccagtgagagttggggatttgcgtttccattcttcaagctctgcatatagttctttaatcgtcttgtagatttcagcgggtgatttttctaatgccttaacggagtacaatcgactgtagatgtggctcttgatgagcgacatcagacagagctcgcggaagaatggaatgttgcttgcggtttcaccatgcttatcgccctccagttcttctggaagggggacatcgaaatcatcttgatgctgtgatggggcatttccaattcttaggcatgtactggaacattgggttagtacttgatacggcgtctgaatggacttctcttacctttggtcaatgacaaatgcaacccaaaaaacgcgccgtctctcctcttgctcagccggactaagttccggtcttggaatatctcgatgaagtcccattcggtgaccggagcgcatggctgcagtaatgagcggcagtgctgattgggttcccgcatttccccgaaggaagaacgcctttgcaaaattgttagatgcttccataggtgccaaagaaggaggagacgtaccatgctaagcaatgcctgtatactcagcagatcggtgcgtttcaaggctaattcagtgaagaccgacatcgcgtttttgaagtataactcggatttctccttgtctttttctgacttggagctactcgaggatcgatattcatatgccaggcagattaccatgttgatgttagcccagcgcgcagcatcatcacaggtttgctgtgtatattgccattcgaccattttcatgaatgacgattcaagatagataggaaatagacggttggccgtccggaagaaatctttgataagagagaatacctctgacctcgagggcaaaggtttaaaaaccttcgaggcaaacaaatcctgaaacacgtccggtcgccattgattccatggattttcatgacgggattcaggagatatcattcgcaaaaagctcacatcgcctgctttgctcttgatccattctatccctgttcgcgatagaattgacattgagcacgacgttcctatccgtgagttagtctggacggttttttttatcacatgggcggtactgtctatcttaccgaaatatcgagaatcatctctttggtccgtcggaaagatgggtgtaccttcgatgaacccaccctgtgagcgaagagacgctccgaaatttgattttggactggaagcagatgatatgctctgactaattggtccatcatcatcatcttcgtcggaaaagtcgtcatgactcatatcgctttcttgcaagatgcctgccgtcctcaacaacgactcaaccctgacaaggcggtctttcaaagacttgacatattcatcagtactgtgaaataattagccatgatcgacaaaaagccgatcgggacatggcaatggacatcgccgtacctttgctgattatcccgcttctcatgctgggcggggaagacacattgcgtattacggcgcatgcattgcacgcaagtcgaattcgacccttcaagctcacacttggtctttttgcgatgacacatctcacaagcctagatagacattatatcgccgttagcaacgctggattcccccttaaccggagtccgccgggatagtagaactcggaacgacaaacaagaccaaccctcaggtgctgtcctctccaaagcgcagaatccatgggcaatgcgttctgggaaggtgactgcttcattgccttggtggcggacggttgtggatgggagtcatgaacgtgcgtgccaagacttttcgaaaaagtcgcccgagcggaaatggcgaggactagcgggagatctttgttccttatttcgatctctcctgtttgatgtctactcataggcaaatgttcagaatctgaagggaaagagaaaataaaaggagatgaataatcaaggaccacggatttcgggactctcggattccgttcactttgtgttccggccaagtttgtgggatgttcattttacggagcacggagtacgtgtcatttgatgtcttttttttttagatatcttgcatctcggtgttataactgaaaggagcataaatgtagttcaaggttcccttaattgtgttcgaggtattcctaggatagttggcatgtgtcaaatagatctcatgcttatcctgtgagatcatcggtatctataagcgctatatgtaagccttcaaatattattatctagcttactagccgaaaagacactgccggagtagaagtacatcggtcacagttgggatcctcattgtaagagctttcaggaggttcgtcggagacttgttaacgatttgttcgtcaattgttctgtaggatatggtccactctatgtcgcagctgtcagaattaactggtcagtgccgaactaatggtaagtggtgagatctgactgggcctagagctgacacctgctgcagtcatcctagaccgagggctaggataggggtgaagtcggaattggtttgtcgtaatattgaggatctgaagggtggtgggagagcataaagaatggtgaagttggagagacaggggagatattcatatgttgatgagaagacgaactcgccgaactacctgtttgctagctagagataatcccctttggtagatatctttttatttgtattttttcctctcagcgttatagccaaaaaataattatttactagagaagtgccaataggagaaagtcgtacccaattctgacccttcacaccgtctttgggagtaacttaccacttgtcacatcaccacatctggcactatcaacctttttaatccttctgagaaacggacgcaaaatttcctggcatggctcctcgcaagacatagatatgttgtgtatttatacatatctcaccctgcatctcgagaaccgtgactgccgaggctaatactaccgcaagaaacagccgttatttcttgagcgcatcttgcacgacaacaattttctccatacatcctctgcattgaccctatgcgaccagaagacggagacatcaacggccagcacacaaaacccaacccaatgccggacttgtaaaccgccagctcgggtaagcttctgtccgctgatggcaagtctcgctatgtcggcagtgttcttgatgatgaagagggcgacctatgtgaagtatccgattccgaccaggatgatattggagctatgcaaatacctcaaacgggcattttgggtgtcctcgcagtacacacaatatctggggccgtactcggaagcacgcatagcatcaccgggtaacaccctggccatgaggaggcgtccaagctctggaatgcgtacgcacaaaacgtggagcctctgtgtaaggttcttcatcttccagctgtcgcgaaaatggtcgataccattttagagtaaccttccgtggcctccaagagcaacgaatgcctgatttgtcatggccgtgcagaggtgggatatttgtgcgcttgcagcaagaatcttcgatacaaccaacgctatctacggcagccctagcatgcaaaagtattgatggcaaatataagcttcattcctgtgggatgctatcgcatgtgtctattcaaatcacgaggaacttgtcgaaggcagaaaacccctatattcacaatcggtaagctaccaaggcctggcttgtgaatcccctaagtcagtcgtccccaaagccgactttcatcactgcgtgtacgaaccgaaagtaagcgagcagcgggagagcatggatgtaataggtggaaccactaagcttgcggatgatgcatcggatgcagttttcggcgacatggatgggacaggcctgtctttaaatggcggtctcgactcttcagattgggttttctgggatcagccgttttgagagaccagcctgggctcagtctacatcccctgtacgtacgttagtaaggtttgtccggagcgtccaatgatctcctaaaccatagatcaagtagctcccagcaatactcatgattcggctttcaactctaaaacaggaactactgagacagcgaccattcaatcaaacccaccaaacccctggaaacccaccaaacccctggaagcccataaagcccataaagcccataaagcccataaagcccataaagcccataaagcccataaagcccataaagcccataaagcccataaagcccataaagcccataaagcccataaagcccataaagcccataaagcccataaagcccataaagcccataaagcccataaagcccataaagcccataaagcccataaagcccataaagcccataaagcccataaagcccataaagcccataaagcccataaagcccataaagcccataaagcccgtaaagcccgtatacaaattagggtgaagatattggaacaaccacatcggtctatgtagaattcatacctcggcaagtcaggagtgatgacatagttcccatcgggaccggattacggaaggaccgacgcaccgtccaatcggacgaaatcactcttcgggccggcccgacacactctagtactgggtagtagtatccttcagtgcctggcccatctggcctttcactattgcctgaggttgaaaagataaactattcaaaaaagctctcagtctcgtttaactttgatatattcagagatacaactgctcgaataggagctgtgatagattcaaaataacagaaacgggggcgaaggagagagaaccaatgcaaatcccgatatctcgaaaagtaggaaaggagcaaagaagcaaagaagcaaagaagcaaacgaaactatcaacgatctccagcgtcatccaacattcagatcgtgacaggagaaaggcagcacgcgattttgaactgtcgaagtcgggtatgcaaaccctctcaagagtgagttcagcgacattttcccttagacgaagacgcctctccctgtgatgaggacgcctttctcgctcgaaccttttccatctcatccgtcaattgaaggcagtagctcataatcaccatagcaaaatgacgcatattgcttttgctttcaatgacccacggtccataatcttgcatggtgagaaaaggcagtgcagttcccctcgaaggacagagatctccttgtaggtatgcggggtattctggcgggtactgggcaagtgtcaaataaatatcgtcttcgtcctgtgagatcagcaggcgcctataagttctcgttagcatataaacattcaacggcatattattatctagcttaccggtcaagaagacacttccggaagttcgcatcagtcacgatccatgtcaccatctgtgctgcttcctgccataggacctcaggacgtgcgctccagcctcgtcgcgccgctatcacttcgatgatggcgaaggtttcgcggatatgggaaccttcaagataaacattggtgcaggcagtcatctcttgaccaccgagacacacagtgttagggaggaagtctatcgacagtccacaccggaacgttgattgtaagagtcctgaggaggttcatcagtgactcatgagctacctgctcgtcaatcgttctggagagtatggacattctgcatcctctacagctgtcagaattgagggcatggtgagagacagaagagagctgtattatgtgacgtgccaagtcttgcaaggatagaagagtgtatcaattcaaaataactaagatagagagagagaaagaagaagcaagttgcaaagtgggaagcggcggcctgcttatatggttgaccttagcaatcataacatattagtatagaggagacaaacacctagaactatttgtttgctagttagctatcatagggtgtggctaaacctgctaggcaacccacacgtatctttcaacgcaccctgttgactgacttggagattcacaagccaggccctgggagtttcactggactaggttattagtattatatttatttaagttcattgatgccgccgatttcgcaagtgatcgaacacatccgtacggtctctccagcccaactagttggcttatattgtagcgaaggaagagctccaccggtgctgtatcatcgtcctcgaagctccacagttgagaatactgtagaatcaaactttctccatcaaatgaagcttgaatgatccttccgtgctgttcgcccatataggagagaaccaataactatagataggtagagacaggggattaggaagactttggctataatccatggatgcgatgtgggttgcttactgggtggataggatatttccggaagggcctgtgggatgtccgaatgagcaccatgttcactatagctcttacttcatggagagtgagacactggtcggcatgatttgctggaacgtgtgcaatattttccataatcgcatgtggcatagggaagttttcgtcaccgccttcgaggagatccattatgcaccagtatgccccaaagtggtccccggaaagcggggggtcgttcatctttcttttcgccctgcttgatattcagcatatagactcaaattcctgaaaataatcactgtttactatctctcgcagtgtaagagaaccaaggccaataagagaagtgcatggcggccgtcccttccggcgagcccaatgctggcagtacatatagaactgtaattcccgggcatgggtaagtcacttctgcggccccgccagtgacatgagttcgtcataataatcccttgccaatctgagagggtcttgtacatttggacattctgtgaggacatctctcagaattgaatcaaagtctgggcggttattcagctttggaaggcagcctccttcctttggatatatttggaggactcgctccgggtaaggccgaaaaaaacatgggtgaaattgcagattaccggcatctgttatccccacttgagatgcttagattccgataccttgaagatctctaggggagagaaagatgaattcacagtcgttgactcgtctatagaggatttgtatgatatcgtgccgcctggttagggtttgtgcattcatccctacggggaaatggtgagatcatgagagtggaaagacagaggatgagaaatcatcaacgtgagatggagtgatgtatacacaaggcggtcaatgctggggtgtattctgccacgacactttggagtcactctctaccaacagcgaccatagggaggcagaaggataaaacccacaacgagacctcaagaatatggggcgatgatatgaagtggtatgacggatagaaggtagtatagaggctattcataagaaggccacctaggcaatattcttaccaaaatagttgctgaaactacatatcctcatccagtgaatatattttgctctcgggccttcattgacacatagtaatccttctgtaacagtggggagcaagaaattggagccggaaatagtacacatgtagtaatgatcaccgaattccatgactaaaatcgacaggatgcttcaccatgcacctaactagtatgttgtacgtgacccctaaaaccttgtgccttatgattttgtgggttgacaggtggatgtacctgatatgtctcaagtatacaggacctggtcatcttgggatatgaatgtcagttgatgtaaacatgatgccacagttatcccgatccatttcccgatttttactccgtatgtgaattaggaatgaccccttttcagaaggacttccctacacagactgagaggtgaacataagcttaaatcctccagtcactcgccatgtgtatatgtactgggaatcggggcaatcacattatacagacttacaaccaaccaggttggaaggctgacaaatgaagcaaatgcacccccgcagtagaagtcaataagaactcggtgttttgctagtttgcctaaaaaaagtctactgtcatctaagacctgaaacaatttcttcaccatgagacccgttacagttggaattgtgtcgatcggagacatgggcctcggcatggccaggctcctaaaagcccacgattaccgagttgtcacggtcgcagaaggaagaaggtacgaacaccggaggcgaaaaccaaagccgagaaactaacggccgctgttcggccagtgaacacacactggcacggatccattcagccggcatcgagatcctcccctcggaccaagcgctagtaatccaagccgactacgtattgtcaatcgtacctccgcggaatgcagtggcgacggcgggacgaatcgcagctgcgtgcgcactgccgtcgacgggcagtctccgggaggcggtggaggacgtagagaacccgccgaaacggtccaagctatactacctcgagctcaacgcagtccccgcccgactggcgtcggagatggcggcgcaattcgacgagccaaccacaacggacgggggccgagggtgccacttcctcgatggcggaatcattggtgcgccgccgtcccaaagcacgcaagacgggagctggaagaaacctagcgtggtgctgtctggattggtggatctggcccctgggtttgcgacactagccggggtgttgaatataaggcttgtctcatctcggattggcgccgcatccacgctcaaactatccttcgcggcgctgaccaaaggtctgaccgcgttgtctatcctgtccttctccactgcgcagagggagtcgatgttgccggagttgctggcgctgctggaggaatactccccacgcactgcggcgctcgccacgaatggggtgattggcatgagtcccaaggcataccggtgggaggatgaaatgcgtgggatcggggagatgtttgatgcggaaggcggatggaatggagtcggagccgatgtttatggaggttttgctgagatctatcggaccattgcggaagataccgtattaggcgaggaaagagtggagcaccgagtgcgaggtataacgattgaggacgccgcccagatcatagctcagaggaaaggtgcttgagttgtgggagtcggcaacatatgtcatagggacgatcgaatgtttctagacgacgcgggaggggatttcgggcccggttgccaaggtgttgattaccagtccgcgtcatctgtgatgcgctgaattgaaaagtggacgaatgatgttgaatatagaatacacttacgcactctgatacgattacatactcccacactgcatgtacctggagactccatatattctactccgtacttcgcctcaggtactggttccgaggcaagtggagatatcagtcttgtttttctccagaagagcttgatatttcgaatccggagaagctggatatatatatagatttatatctgatatcgtataactatcccttctataccccgtaactaaccactgatcgatctatactccgtacatccaaagcggtgaatgtccccacgaaccacaactcgcgatcacgacatttctccattctatcagatcatcgactagcatcgtttttcctggtctttctctttgccccccccctttttttaaaccaacggccttttattcctcttctcattcgctcaggtggaactcccgcggcatgcgacgatgaagtgacctttctttttcgagatcgtgtggccgagagctcaaccttcccggtcttttttcctctggtctctgctttctttttcttttttggggccttttcgtcgatatttaattggcaattcctttttagggtgattctgatttgcttcaaaaaatatcccggatctggggtgtctctaaacatcagaaagcccctcttcttcttctcccataaccctaaaggtccaagggggctgaacttcctttttatttcttttccctcttcaaccatgccgggggaacaaccacctctaccaggcccgggtcccgtcttcgacaaacttgagaacttcaattttttgatgtcgcgtcacgatccagcagccaagacccgacagtactcatttgacgctgatactgggctggtcccgtttggcaacgcgaatatggattatgaccagaccgaaggcatgggcggtctatctgtcagttcttatgagagtatagaagacgatcgcagctctctcgatctccgaggctatccctatcatggtacgtgtcaagcttttgagacttttgttgcccaacgttgcatttgttacgccatcgcgcctctgcgtctgagctttagtttggggcttgaaattccaagtctgaaaattgaagttggatgtcttttttctttgatgattttgtccctgttggtttttttttaaagaaagaaaaaaaagtcctggataaccaggttgaaacctcttcttcccctacacaatcatgttcaccaatttcatttcgagggcttaaaaaagaaaaaaaagaaaaaaggctgcagagcccaggatgtgagctgtgacatgcatcttccatctccaatggtggaaggagatcaccgtcggtggtccttaaatgcacgagcacgcaatcccgcaatgaaatgacaacggccagttgccagcttacgctgaactgcacatccccttgagacccttcttgagcttatatccttccggaatatgatttacacttcccgatccatggggctcactccctcggggttatatcgacttcgatcgcttactccatccataggccctgccggcgagaagtccatcaactatactcttccagagcacatgatgccctactcagcccattccatttacccaccagtcccatacgcgcccgacgagctcggccacgcacagggggccctcacgccgtccgatgtgtcctcgtccatctccccgcccaacggccagatgggaaacaccaagtacagcaccaccatctccggcgatcgcatcgccgccgccctcgatcaagaggagggcgtgcgcggtgccgcagaggaagatcgccgtcgtcgaaataccgccgccagcgctcgcttccgtcagaagaagaagcagcgcgagcagatcctcgaacgcaccgtgcgtgaaaccaccgagaagaacgcttccctcgaggctcgcgtcgcacagctcgagatggagaaccgttggttgaagaacctcctcacggagaagcacgacgccggttcttctcgtctgcctgctccggctaaggatagctcgaccctcgagctaaaaggtcctggcgccaataccagacaaaaacatattcagcccaaaaagaagggcgtcggcaccgaggagtgatgatccaaaatggaagaatgtgcttttttgttgtttgtttgcgttgttgttcgccgttctttgtatcatctcctcagcctactccgtacggtctcctctacaaggcgtccgtaccaaatcagcattctgtcttgttttgtttttttttttcgtctacttgctttgctatggtgtctacactcatctaccccttcattctggcagggtagatgagcgcagacaaaatgacgacgtcacgacccttctcttcttctcgtttgcccggatctcccgaccgtggcttcttcgacttctagggatggtctttgtttttgcacttcagatctggcaactttcgtttgatatttgaatccgctatcctctctctacgctcgccttcctgccatcgggctttatctttacaactcctgcccaggctctataccttctatacatcctctcaacccttcctatcctctttccatcagatcgtgtgctgcgaaggcatgtttcatttttctctctttccccggggtttacgggaaaggagatgagttggcggtgttgtggtccagactcggggaagtcaattctagtttttgctttatatggtactggtttttttatatttgatatcttttctcttttgattgctctgggacttgctttttttcctgtttctttggtttcctccgtccttgctagctatctgtggactggaatacaatctaaatccccccggggtttatcttttgctatacgaattatctctactccggagtccgtactccgtaacaactgttcttctatcggattctgcacatacgtaatcgcaaagacgcaaaagcaatggcgggtgacgtgctccagctggcgtgctatatcagagcgattgcctcacggagatccaatgccattggagaatcggatgtgctgtgtcagttttccggggtaagggtctccccacagcctacagggctgcactattcaggcgaactgcacgaacagccacacagacagcacttttttaaattagcctagccgtacggagtatacggaggtatactggatggagtaatataaattcctgcaaacaatccattagaacacccttgattaccctggactatcctaatcctcaaaaacacaaaaaaaagaaccaaaacaagccaacataagatggtattacatcgattaagtagaaacagggaattgaaataaggaaaaaggaacaaaacaaagaaaaaaaaagactagacaattcccaatcgcacttggatctcagagtgacatctccaaactccgtggagaagggaaaggggaaattagacccacgtccgatcaaaagcttggagaggtggacttccccccgaagcacgattcatagccgttagatcacgacatttcatgtgaaaaaaaaagagaaaaggcgtcaaaacgtcccaaagctgcatgacgtgattgatgtgcgtctgcttcgagaatagcacggaatcaataaaacaaaaacatatatgaaagatcaaaagcacaagggatgggggatgggaattgatttttgacaaaaggaacgtggagatgaggaccgaccggacagacgaataaatcatcgtgtccatgcatctgccctagaaatttcagccgtcagattcgtgatggaaacaaggtaacagtctttctctcgcccatctcttatgcggcaatagactcgcggtcctcttcgcggccgcgctcctcgccctcaatggtgctcacaccatcatcggcgtcttcgtagctggggtgctggtcggctggaagccaagagtcgcgatccccggccaagggctggtcctgtgcagacaaatcgacgccctcgcggttcttgctgaggttggagcggtggcgctgggagagggtgcgggagcgctgcgagagactagacttgaccacggccttggaggagacccagttggtgagggcatcctcgcagtcctggatgatggccttggaggcatcgtagccgtcgtaggcgttgcgggtctcgccaggagtgacgggggtgtcgtcgatcaggtcgaggaggtgcttgccgtaaccagcgacgatggccaccttctcgcagtgctcgcggagcgcatcaaactggtactggaacgcggccttgaccttctcgcgggtgatgttggacagctgggcctcggcgactagggactcggcttcggcgcggacgagctcctgctccaggacgacgatgcggggcgagttggggtccttgtacttcagcttggcgatctcatcggtgatcttctgcttgcctggagatcgaatttagttaaagctgaggagttgttcaacactgctgggagagtcttacggtctcggctgggctgtacggaagcttcgatgttgcggatgctcttaatggtgacacggtactggtcgtagcggtcaacgaacatatcctctagctcaccgatctcgtagatcagcacgccgagcttgtccgtcacatccgacacatcctcatcgcatgcttcaccccaaatggagagttgttgctatggcgaccgagtcagtttccaattcgttataacgcggatcgcgaactcagggtcatcaacatacagcgacttccatgcgctcccgggcgacgagctccatgctgcgcatggcgttcttctccatcttgacgagctgcgacagcttcttggcgagctcgggtccgaaggcaccggcggcattcttacggaaagcatgacctgattgtagatgttagtttagttcagttttcgcagcgatatctcctctctctcttgcgactggtggtctccaattcggctgtcgtttctcggaggcgggggaaagtcgatagcggcccgatcttgggcagccctccaacgcgacgaacaccctcggagatttccatcgaagccaatcgcaacaatgtctcaatcgcactcaccgattccgcctttccctagccatctcccggtcttggttgtggacactggtggtagtgggctctcaatctgcgaggcggtcgggatgcgcgactggcgcatggaataggtgcgatgcatcatatggctcggagaggaaagtgaagtatgggaagatggttgtagagaggtagagatgtaagattcttgttcctgtagaaaaagaaataagaaaaaagaaagactttcccgttgcgcagtagtgacgtgagcttaaagaggggaattctttttttttcttgtacgtacttgagctggatgtgacgagaaatataaactgcaaacggacaggggaggtatagtccttttcaatgaaaactggagaaaggtgaagttctcctggaagctctcgggatgtgacgtcgactatttctgcccaaggggaatggactgatcggggacgctttgggggctcgggattggccagacgagcgcgaaaactcgacgacgctaggacaataaagagcattcactgcataaaatcagcctctgccaactccttccagctattaatcggccgatcgcatcgcgttgcaaatttttccatttttttcaagtcttcacgatcacccgacgtcattgacttccaccctgatgtcatggagttatgaaaaggttgcattatatacgctgatactgctatatgctacaatccgacagtagctacaagtgcctggattcccttttcacggctttgagatcgaggaactgaaactgcatactgtatagagctataccattggtgccccagttccactcgctgatcgcggagatcgtggaacgcctgttcgtggggaaaacccatgtggtctcggattttaattccacccggggcacggttgtaccttgcaagagtaactgatgataatgacagaggtttgattcatagagctatggaagttgagaactcatgagacatcggttagaaatggcttttggcttgaagggacgcagtcactaatcggccaaggcgttcattcaagcagctttgcccggtcatctcctgatggtgaaggtttctcggttcttgacttttctgaggaaaattgtttcatcgtagtgtccctgcgagagatagaatctgagtactacgggatgaaacgtaggtggtctggaaagtctcttgagttgcgtaagaaggaaaaggaaactatccaagtgctgggagagcggagaggtcatgtgatctcgagcagcccgtaactataaatattagtacattggtaagtcgtgaggatagtgtgtatcataccaagtggtcgacaaaatgagccctcatttccagcttcaaaaagctgcactcgagctagtgacagcacatcccatatcaagaaacgaacgatagtacggaaatttccgattatacgttcatgttgtcgacttatcaagtaaagggagaccgtaccgaattgtcttataggtacaatccatggatatgacccatgggttcatctcgagcatttgaacgcttgacttatgcgtgcagaataacgcagacacacgctgaagcgctgccggagccatggcgtatttgcttctcgatgaatgcaagatcagcactatgataaacgaccacgcgatatcactgatcggccaagggattcggcctttggacaccggtctcatctccaactaattggagaccgagtttccttcttttttctgcgtcataacctgggaccacttccttagagatttggtgagtgatcgcggatatcaaaaacccgaagagaagcatatctgcactctcgaagatgttaagatccgtggccaacaagcaaatactcgaaacagttcagattatataaccagcggcatttgtattagctctgtggcgagagagtgtaggttaggagaggtatttgaggcgcatggttgtgggactaagacgaagactatcagtgagtgtgttttcaagctagtcgtatctgatcgtcatattctcaccttgaatgtcattaaatagatggagaagatatggtatagagaggtagaggttgtgtggagacgtggtagaagagaaagaagagtgaggggcaaggaagagcattttatattggttaggtgaacacgcttctcatgtattggatcacttccagctctatcgcaaaccgagaagtcaagctacccttcgtttgcttaaatataatatatatgcatcctgattcatcggtatcgagaaagacataagctggataacaagacttagatgctaacgaaacaagaagggatcaacagaagatagttgctatgatgatataattattatgaagctccctaaatagcttcatggagagacaaaggcctaaaagccacaaagggtcacagtttgtcaacctgcgggcaggaagacaggaaaagccccaatgcatcagtaggcatttctaaccttcgtgaactacccgtcgaagaggctattaccgttgggcgttggtcctcccaagacgaccagaccatatagaatgcagtgatattctgctatagtaactcttattatgaaaaaaatgagattgacaatcttatggaacaagctaaaaaaaaggtatagacactttagtcatcatatttcacaagtttcttggattcaggcgccactcgaatgagctttttgttgatgaattctccaattcccaattcagacaactccctgccaaagccggagttcttgacacctccaaatggtaactcgggaactgtcacaaagaatgaattgatgaaaaccatgcccgcctcaatcttatttgccacggcgcgagcatgttcgtgattctcgctaataacagacgaaccaaggccgaacttagttgcgttggccagttcgatggcagcatcatctgtatctaccgagaacaccatggagactggaccgaataattcctcataaaaaatggggttctccggagtgacgtctgtgatcatcgtagactcgatatagaagcccggccggtcaatacgattacccccaaagagtaccgtggctccatggcttttggctttatctatctgatccaaaagcaccttcatagcactttccgaggacagcggagagacagcagtgtgaggatccatagggtcaccggccacccgagagctgaaccgatgtctcatgccttcgataaagcgctctgtacgctccttgccaaccacgataaagcgcttgggcgcggagcagacttggccaagacaccagatacgtccagcgcaggcctccgcgattgcgaaatctaaatccgcatcctcgagcacgataaacgggtccgacccgcctaactcaaggatgacctttttcaggtttcgtccagcacattcggcgacgatcgaacccgcgcgctcgctgccggtaagtgttacaccacgcacgcggaagtcgtcgatgatcgtttcaatctgtgatctggtgcaaaagagattcgtccacgcgccctcaggcgcaccggcatcctcgaagagctgagaaaatgcgagcgcgcattgcggcacgcgtgccgcatgtttcagcaacaccacgtttccagccatcaattggggccccgcaacacgtgccaattgataatatgggaagttccatggctcgatggcgagaatgatgccgaacggttcgcaaatgacttcagaactagctccgtgctcgtgaatcgtggtacctttcaagaactcctcggcgttcgttgcataatatgtcaagatatcgaccgagagtgagacctcggctaaggcttgggtgtataatttacccatctccttggtgatgagtgtggccatgtgctctgatcggtcactcatgagccgcgcaacacggtgaagaacctccgacctttcagcgatagtacgccgtcgccaatcgtcggtgaagcattcttgtgctctatccagtgcattggacacctcctggtcggtagtatccttatacgattggaacagttcaccggttgccgggttgatggatttgtaatgggctggcttggacattgtcgaatactgatgaaacgttcaatgttgaggacagtataagatgataaaatgagtttctcgacagttcttcctccggatatttataccgcaacacagctgtcactcgatatagttatgaccggattagggccatcccgcgagtggatagagtttcatcattaaaacgtcagccattcatataacgtcattgactacgataacagagcttagctcatgagaagtaaacatcgcccggacagaattcggcgttctatcggattgttttacagtttgcactaatgtgtggttttaagctagtcgtattagatcatcatgatttcaagacatggcataaagatctagaagttgtgtagagacgtggtagaagagttaggagcaaacaaagcattttatactggtcaggcgaactcatggtctttaccagagccagccaggagggataccaaatgccatgataatagtgatggaagaaagctggtcttttaacactttgcagcagggacgtaatctatattaatagttccggtggtagtattgcttactcacattgtctccaaattacatatgtatgtcttcatacacgatttctgtacgtagattgaaggtaaatggtggagacgaatacctgtaattgggcaaatcgaaagatgctgccataaggatggcgccgatgatacagccgaagttggttatgaaagccaccttacgtcggctctagagatcaccaaggtagatagatatatgaatgcggaacaaagtgaagcaattaaatcataagcctcgtgtgtgtttaacgtgagggtcttttcttatggacccaaaatccagaggttctaatgcggtaaaaatggacggtgagatgtggcagaatgacccagccggcagaacacatatgcactaggcccaatctagctagatgatcgtgatccacgtgactgactttctatctcacacccaaacaaagcaaataggcaagccaataagccaataagagagcggctttgtgtagccttagaacttagaaccagtcgcttcgctctgcaacgactatctggaggccttagaccaccgagatcactagtatgattggcttaggggcagggctatccgtaagtgcgttgtggcgtggttttgcttttgccaggtcgatccaactactatcgagcttccctctccaggacgtagctacattacaacatttaaggttaaagcaatatattccttccaataaccgagaatgacgaggtggcaagtctaaatatcaaccaacttccggtagcggacatatgttgccgtgcgggaatctccgagtcctgagctcaatccgaggtggcgtgacgggtctttcgcttcttattcgtgccggccttgcctttagtagttgagccacctcttttgcctttactttgcgaaataggggcttctttctctccgtccttgttagctggctcgccatcccgcgaggtttcgcccgtctgagcttcctgacgtagtcgactaaatgccttttccatgcggctgggtccacctgtacgaacgcgaggcgcaaatgcacccgcgccctgaggaccttgcatgaaatgcgtgatattagactgtgttccttcctgttctcgccggttcatgtcgcgaataaccggcaccaggacttcatccgtacgctcttggctccagccaattgtcgtcatgaggaaggttcgtaacgcattcaaatcaggaacaccccattggaactgggaagggtcgtcgtcaaccgcgggttccaggtatgcctcgtcaactttagcatcagggaatgaaggaggtaagaatatcttggatgccttctttcgaaatttcttccggaaggcaaggtgggcgtcttctgcattattcgtacccatttgcaattcggtccaccattcgcggaactcttcgagactggaaaactcggtgagtatctctagggctgtgacaggaccaatcccgggaatgccctctgtgtagtcactgcccaagagatgggcgaagctaataagcttccgtcgatggagggcgtactctttctccaagtcagacgtcaagtagcactcaacgaatttactttgattgaacatgtttttgtagactcgcgttcccccgaaaaggaagatatcactgtcatccgtgacaatcccgtccacaaggcctagcgagactaatttggcgcactgcgcttcagcttccataggcgcggtaatatagggcaatccgaagagcgtcaagagctgttgacactcattgatcataatagtagtcacctcgtctgcatcgcgacgctcattcctctgctgagaccgtagttgcttcaattcttgctcgtagtcaaaggcctcctggctaggagcagcagaattaagagtattggcaaatcgaacgtgctcctcaccctcagccgcaagctgcttgaacagctcttcatcttccgggtcactatagtcggcttggtcctgcacaaagtcttcaacctcttcgaagaactgaggctggggctgggccttttgatgggatacaacagtgatctcggggccttgggtgggcagctgagggacaacatcttcgaattctggtgagggagatttttcgctgcgtgaggacagctcttcaaccgcgggaacttgatcctggatttgtgtttcagggcgtccaagtgccgtttcatcgagatttctattgacctgcgctggagctggttcgctcaatggcttctcatggagatttgtaggaagctcattgtaaatcttttcaatgtcctccatctggaagatctgtttggaattctccttctcctcttccgcctcctcctcctccctcttctctagatcaacgacttctgtagtagcggaaatttcgtcaacatcgattatgtccggcgagcgacgattggagaggaacatatgatctggcaccgcagatcgctcatcatccttttcaggatcttcaatgggatcaacgatgaatcccacatctgagcgttcgccaacaaaccaaggaggaagtgggtcaggttgttttggtttctctgtaggtccctttaggaagccccccgcattttcaccaacctcgccagctttatcattatctttcgtgactttagtgagtttgatagattcaaaagggagaggaccaccgaatcgagttggcgcatgtgaggcttttttcgagacctttgttcttgctatggctgcagcaaagtccattccatcatcgctctcggaatcaagatctggcaccgtctcatagggtggagctgattctaccggtcgattgatgggcatatcaggcatatcttcgtcgtcgactttatctggttgtaatgaaagggcaatagcccgttcaaggtcatcgtcatcgccatcgccattaaagaattcatcagtgtcgttgttctgctgctgtgcggcaatatttccctcagcttcaacaaaaagcgagtcatcttcaacctcttgtacacggcggtcgttcaccgactgttgctgtgcagcatgacgcgattcttgtatagcccttctcatgtctaaaacctcattcgtttgaagttggagcgaccggtccaatacaccctcttggaggaaaggaagtttgggaagtcgattcagaccttcgattggaacatcctcgaactcatcttcgtccgatacctcatcctcatcggacagtatctcaggtcgatctagatcgatgggcttctcttcgtgaccttccctgtttcccacaacacctagtacccagccaccttcatgttcgctatccttgacaagcacatattccctgccacgttctcccgcaacgcgcttcccagagttatagaatgcttcgtctccgttcatgccgtttatattcattaatcgttgcgtaaggtcattacgttctgcgacacgctcgatttgaaacctcgagaatgccatgcggtcgggaaacatggtatctagctgctcttttgaataacccattcgaagtcggcttcttagcctcgctgcattcaagatgttgtagcgatcagtggcgggcagactaaggaaaaacaagctgtcgaagtcgattttggaaaaatcgtaaaggttgatatcttgaccctggtggaaatgtctagcatactcctccagttcttcctgggacataatgcgtggatcatttggcgctcccatatcttgaagagagacgtctaggttaggtaggtggtacgcatccttcttcttgaacctgcgattttgttgcttttccgtttctgtcataaaagcctcctctgcgtagaccggagcatctggcacttcttcttcctcttggatatgggtcttattgcgtcgacgagcgttctcctcctccgcactgcgttgcatttgtacggcaagcaactttcccgcggtcctcgcagcatcttccctgtgaccctcgcgtttcttctttcggccagcgattgtctgccttttcatgaccggggccccgccatcgaagacgaagacaggccggatcccgaaatacagcaacttacatatgcgacgaaagaatccgacgatgtgagaatttcgtagcgcattgccttctttgtctcgtaccgccttcagaaattgatagatccagatcgacgcgtcgacagctagtcgttttttgttcagtgtttcgagtttgatagggcgagcgcagggctgcacgaccgtccagaggccggtgacacccatggctagtcaaaggggtattgaatcatgggtgtgtattggggaggtctggcacttaagacaaaatccacatgtagtgagagagctgctcccaggtggttgattagcgatagaggctctgccgagaagtcgtcattccgctcccgcgctcgatcgcgagatcacgtgcgtaatcttgcctcttatggattagcgtttgaattatataagcatgccggggaaaccatcgaaaaagtagttggtgggctttttttggcgtttggtgggatacacttttatctgaggcaattgagacaatccgggtaatcgcttctctgattaatgtgcgtagaagttggcgatgtctttttcgctcgaggtcagtgttgttatactgtagtcaaatgctgtcccgctgactcaagatgcagcatattgatgcttttctcccgataacagcgttgaagacgtttgtattgggtgatagacgatttatctttcaaagtcaaggcacattcttccgggtggttgatgaaatcaccggtattgtcgctgctcaaatccaaatattcaaaagaaacaatattcatggtttcattcctttgaatcaacgaccacaggatcaagattcgaaccatgtccaaataatcgtctggggtggtcgctcagtgcgagcggttgacctcgttttgacctctgatcatgaagtcacgttgtcggcctctagtgccgagttcattgctccagattggatcatgagtgggtgcgcagctgttaccggtggccatcacggggctttttttatcaccgcgaataatgccctcctgagtctcgaagtgctcgacagcgggatgcctgggcgaaatataatatccatatatcaactggcgacaagtgtaaagtccatcctttactccgccgatgtgattgcactgtcttcctctcatgtcctcattgccgctggtaccgtcttcggagaaatcattgtgtggtcgtgtttcttgaataaaaatggattacacaaagctaatgcagttggctctatccaccatttcttcacgggtcatgacggatcaatattcggtgtccgcatctctcctcagatcccgtccttgaatggaggcaagtctggcaggatactcgccagctgcagtgatgatagaactgtgaggatctgggatatatcagattgtgaccacaagacagcccaagatccttccgcatactccacagacgggtttgaattgcgaagcacaggttttggtcctgttgaggcaggcgaggagagcgttggatctgaatcatgtgtggtccaggcctttgctcatgcggctcgtatttggagtgtttatttcagggccatcaaacataataaccaaactcatatgggattggtttctcgtggagaggattgcacatgcgttctgtgggacctaagctggcactcatcatccgctgagacgaatgactatcagctcagccagactacttcaatacaaacacatattggaaagcacatttggtctctagatctttgcagaattggctctgagactgtggtttataccggaggcgccgatggtgcactgaaaagcttccccatcaaagaaaacgacgacgaacatctgggcaatggctctggtgtttcttcccagcaattacctagcttgcaagtaaaggcgaagaacaagcatcccacagccgatggaacgaaagccttcgcatttgtcgcccaagactgccttcttcgcacctctacacaaggtcagatccaacttggatatcttacccaggcggaggagactgccattacttgggagacactatgcgaagcacctgaccttgcttcttttggcgtcatggctgctttaccccagataggtctagcattgatcggtaatttccgaggattcattcggctctataatcacgctacgaaatctgtcatcagcatcacggacgttggtaacagaccccttggaatattcttccttcagactcactcttccaaaatggatatgttgaatttctctcaaaacattgcattccttgtcttttaccctaccggagaagaaataacagttgtcaacgtctcagactggaacagcgatcatccaaatgccgaaataaccacctatagcctaccatcctcatttgtggtttgcagtgcggcttttatcttcgatggccaatatttgattataggatcaaaattcggcgcccttgcaatatacaacacctccgaggccgagcccgtattggtcaaccgtcgtgttcatggccgagagtttgtgaatcacatcagcgtcgtgacatccgttactacgagtgatatcacaaaatcagacttcgtcttgacctgtgggcgagatggaacttattgtctccatgaattgcagctttccgggaatggaaaaaatgttgtaacgatagagacagtgcaccgtacagcatctatcaccggtgggaatattgaaggtgcctacttcgataaaacaaccggcgatttcatgttgtacggattcagatctcaagatttcgtcctgcgcaacgagtcaaagctgacggatatcgtatccattgcttcgggcggctttcgccgaggctgggactttatgccaggagacaaagataacaatgcgctgttcacgtggaaggacggaacttctttgatgactactcgtgtacgagctggtgctagtactttgcttcgagccggaggtcacggacgggaaatcaaagcgatggatgtcttcaaccccaccgatggagatcggtctctttttgcgactggcgcagaggacactactgttcgtatttttacgccgacttcctcattggctgctagtccatggggtagctttgagtgtctgcgcgtcttggatacacacaagtctggcatccagcaggtgacctggtccaaggatggaagatacctattcactagtgctgcatacgaggagtttttcgtgtggagagttcgcaccattcctatattcggcgtttctacgaaattggtggctgcgagtccgaaggacgacccgaactcagatctccggatacctagtttcgatttgctggaagtagaggatgttgacggggagcaaggtttcctcctgtgccttgctctttccaactccattttcaaggtaagggtagttctttttttcaaatattacggccatactaacgtcattgcagatcttccacttttcaccatctaatgggggcaaatttactctcttggctcgtgggaaatacatgaccaactgtttgacacaagcccacttcttggtcacgagctcctccgtgagccttatcaccgctgcgactgatggctacttcacactatgggatctaacaagcacacttgaaccattttacactatcacacaatccattttgaaggccaagcaccccttcgaaggctcctccatctcaccggaaaatatcaaatgcgaaagtcggtatcagatccattccaacagtatcaaggggatggagctggttcctatctctgacacggccactgtcattgtggctggaggtgatgataactctctctccgtgtctctcctacgaacaaatccatccgacaccggcacaaatgcacaggtagctacggtttctatcccagatgcccacgctgcagcagttaccacagtcaaagttctcaaccagcaaatctctcgtgatattacatcaaatacagacaccattcaaatcactgtggcatcttctggcaacgatcaccgaatcaagatatggtcaatcgccgtggaccctacacagcctgacacgaaagggattatcgtgagattcttactggatacatatagctctgtggctgatatatcatcaatggggcttgtccgtgggcctatgaatggcctcttcacagagaaccatgcgtttagtcagttgcgattggttatctgcggtgtgggcatggagatgttcgctgccgaatcggatcgagtcctatctgcatgatgccgatttgatgttgaatatagataagatttcaatgtgacaatatgaacatagacgataccatgtgagattacagactcattgagagggatggcgatagcaaatcaaccgggcaagaggaaaactctagcgaactactcgggtaaccaataagcagattagggcatgcattctagctacaggacaaacctatattcaatattcagcggagccatacgattggacaacatagtgtcttcgtgaattcgtcaaaccacccagctcctcttaaaaaatgaaagcttgactattccaatactaatccatatataccgtgcagtttcggagagttcgccgtattttgcaccaatatggatgaggcggaacgaaccccttttgaggaaatgattcccaaaaggatttaatcaaagggtattgttataggcactccaattaaatggtttcaattatttgtctccgctctagactaagacgaaaacagcatttcctaagacgggatgactatataaggaaagaactatggacgtgtgaatattttctttacaacagactacaataggcatctattccacatcatgaagcatttcattactatgatcgccgtcgctgggctggctgctgctgctcccttgcaatctcgcgatacgaacagttatttcttcacattgtaagtgataaactgcgtcctttattcatcgccggttgggaaaggagctaagagcacccgcagtggggattcctacaccatgaccagtttcgatatcgatggcacgcagccaactgctagcaatccaatggggaatccagcactgggtaggttttgttcgcccatctggcaagcaggcttgactgattaaagacaataggtaccggaacaaccaccggcggtgtcaactgggtgggatacctgactaccgtgaacaatgcctcactagtccttagttataacctcgctgttgggggagcatctctcgataattcccttgtgaataccaacgtcgaagatatggtaacgcaagtcgccagcttcgagacaacatatagtcagaagcctgatattgcaccgtggacttcagacaacgcaatttttggattctggattggaattaatgagtacggtcccctggattcccgctaacagctaactaactccaatttacagcattggttgggcttggtcaagcaacgatgccagtgttctgattccaaagatcatggcccagtataagactcaagctgaaaatatctacgcaaatggaggacggaagttcatcttcctcaatgtcccgcctacaagccgatctccccaaatcgccgatcaagggacaaccgttgcagccggccacgctaagtggctcgcggctttcaacactgcccttcaaacaatggtcaatgaattcattgaagataacagtggcgtatgttcaagctgattatatacttttgcacaattaacctggctgcagactacaaccgttttctacaatacattcaccttcatgagcaaggtcctcgacgcccctacaacatatggattcaccaatgctagttgtgtcagtgacgatggtgctacctgtgtctggtggaattcctaccacccaggttatgcttaccacaagctgcaggcagcggatatgaaagagcacatgcactctttcggtgcttggtagactcttttggatgatctaggaaggattgtatgtcggactaagactggtaaggttcaaagctcaataaatatgtattcctgtctctttgcgagtgaatatcgatatttttgaccgcgatggttcctgttcagcttgcaatcaacttgccacgcttacttgactcacacatttggttttcttatgttcaaaacgaatgtattcttagttaataaatatggattattcacgcatattacactccactaccccctgcatgtcaggaatcatagttaaatgccgatcgatactggaagcaccacgggcttgaaagccacctgtgtctgaagaactatttcttggggattggagcggggtatgtacgatggatgtacagtgataattcttcttggttgaacatggatcaggcttcttctagtctaaagactcggggacattgccttcttggctatccgtttcgcatgaggtcgccaagaaggacttttctcagcatgacccatgatgttgtggatcctcattggcattgaagtattattaggcactgtaatatccgaagctgtttcacggggctactgcacggagtacagacaccactttagtatcagggactgaaaatccatgaaactccgtgtccttttctgtcatcgatttccaattttcatatggttgtacttattgggatatcctgcaggctattcgacgatatacattaatttagcaataggaaacacctgagatatccaagttgatccctgctgttggtgtcatttcgcattctctcacatcactcctcttcttttctggacttaaccattcatcccatacagcaaagagcttgactcggcaatatgagactcggtcaaattgccttcctcgccgttgtggctggacccgcagcagcagttcctacaaagaaccatgcaaagagagcttcgccctttcaatgtgcgagtccatgagttccaaagatatttctgacaatccattgaccaaatttctcgtatagggttcggaacaagcgagtccggagctgagtttggcgaggaccaaattcctggcgtctatgtgagttggccaaacatgtcttcggagaagctccactgataaaaatcggaatagggaaccgattatatcttcccggatgctagcaccattcaaattttgactggaaaaggaatgaacatcttccgggtggacttcctgatggaacggctggtaccggactccatgacaggcgggtttgacgatgcctaccttagcaatctgaccacggtatgttgtgccgtatctatccctaagggaacaagcgcatactgatctagtagcagacggtcaaagccatcaccgatgcaggatcccacgccgttcttgatccgcacaactatggaagattgtaaatattccatcgaaccaacgaatgaatcgaagctgatgagtgtacatagcaacggcgagatcatttcgagcacatccgactttcagacattctggaagaacgtcgcaggcgaattcgcttctaatgagctggtcattttcgacacaagttagtaccccagatcttgagtcgtatcacaaaaagtctgttaaccgcatcatgcatagacaacgagtaccacgacatggaccaagacctcgtcctacagctcaaccaggcagccattgacggcatccgcgaagcaggagcaacaagccaatatatcttcgtcgagggcaactcttggaccggcgcgtggacctgggtcgacgtgaacgataacctgaaggacctgaccgacccccaagacaagattgtctatgagatgcaccagtacctcgactcggacgggtcaggcacgagcgagatatgtgtttcgacgacgatcggagaagagcgtgtgacggacgcgacacagtggctgaaggataacggtaaggttggggttttaggcgagtttgccggtggtgtgaatgatgattgcaaggcggcgatcacaggcatgcttgattacctgggtgacaactcggatgtgtggctcggggcattgtggtgggctgccggaccttggtggggtgattatatctttagtatggaacctaccactggggcagcgtacacaggcatgttgtcgacgcttgagccatatctggagtaaaatctctggattgaggcaaatgcgaacatacacacatagtccatatgcagcatgtgagttatcgagttcggttgctgtaatatgcgaaagaaagaaagaaagcaactgcttttcgaaatgaacgtatctttttcttaaagtattagagaaaaagactcaaatttccgatggccatagcttatgtatcagatgtcttgtcgggcagcgcaaaaatgggtaggtttgtcagagcgggggggttcccaaattcagagaagtttatctggaaatcataaatatagaacaaggcatcaccattagtggaatttgccctgtgcagagacagcggagtgcgagtggaatggtatacaacataggacaggaaggtggggatacggagataatgccaagagagaaatagaggagcctggcatctatcccgtacatacggtactccatacccaggcttacgcagtcttgaggcggagagggaaaaatttgaaatgatccacaaggctgatcagagtcgaaagggtgacgaggctcggattggggaattgcctgttttggccacttggaatgaagatcctggggcggtcagaactagatatgacgaagtttgatagattggatctcgtgtgtacctacactgtctacgttttatttaggggtatttccgacagtgtaatctgcctacactatttagaaaaatataatctttacggatcaaaagcatatccaaaatatagttcttccatctgatctgactgtgtcgactgtggatgtagggataagcagatgaaggaccattccgctagacctaaataggactagtcaagcccagaaatagaagcaaacgtggccctggcgacgtgaccgctcagccctgattggcccgctgatcctgcgcctccttccctgggaggctggagtttctgtttagtgtgaggctgtgcgttcccagggttgaacgttgtttacgaggtctattgggggcggaggggcatttatattaaagtcttccctccatctcacctctccacttctcatccatctttcacctctttctctatattcccatcttccataaatacatcttcatcatgggaaaagctggtcgtgtcgcgtgtatcttcacgccctatgtcttgaccatcgcatcattgatctgcatcattttggtgggattgggctgcacaaaagccagttcttcgaccttgaataatctatacttcattcgtgtaagtgatcaaagattctacatggttactgcatccgctaatgccaataatctatagctcgacctctcgaacataagtgaaggatcggcacttacatcagaaatcacagatcgcctcagtgctgccggtatcactgatgtcactgcggatgaggtctcggagaccatcgaaacactgcaggctgatgccaatatttctgatttctacgacatcggtctctggggttactgcgagggaaatatcaccaacagcacggataccgtctccagctgcacagaccccaaggccgagttctacttcaacccgtctacaatcctaggagtgagcgagaccgagcttgagaaggagattggcagcgacctgaagaagaccatgaaaatttacaaggctgtctccaagtggatgttcattgcctacctagtcgcgtttattgccacttgcgcccaggtcctgcttggtatcttcgccatcttcagccgctggggcagctgcgtcaccacgattgtctcgattgtttcgttcctcttcacccttggcgcatcgcttacctcgactatcatgttctcgatcgcaaaaagctccctcggcacagtcctcgaggtctatggtatcgatgtaagcctgggtaagaacatatacgccgccacctggctcgcagtcgctttctctctgggagccaccttctggatgctcagcacctgctgttgctccggccgctcgccctacggccacagggaccgcagcccccgcggcatcaccgcagagaaggccccctacacttatgagcccatcggtgccgcccacccacccttcggttctcagcagccccttgttccccaacacggctacagcacctcttaccctgctgccacccacaacaacgatatccccatgacccacaacaaccagcagtcaagcgcctacgagccattccgccatgcttaaaagattgggctttcaatgactgtgcaccccttctgaagcgattttagattggcgataccaaggcgttctcgtgtttgttatttttttttttttgcatgcttttaatgtccatgtccttttcctgattcttgatgatcatcacgccattttgcatagcgagactacggtctctatgggagggaacatctgcatttttgtatatatttttatgatcctttacgaaggaatcattagtatctatttgcctgcaaattgtttcaactacaaaatccacttccaaataacatctggcttaatccctctaactttgtagaaccacttaaatgcctgatttgaccaatcacaaacagcttacaatcagaaatttcggagtccccaatcctactcgtattgacctagtttgtatgtatatacattgcagcatggaaatagctcctctagctcatgaggctcatttctttgtgggtccaaatatacatagctccaacaccatcgtgaaataagacagacagtgacccttgcgagggaggtggagagcgttaggggggcaaagctaggatctgcagcgaggctcgagccctgttttactattagtactgccgatctctacttcgctatttgcacccgtggaccgatgtttgatgctgtcagaggcgttgagttgggccccacggggaatttggcataagaatccgattgggggagttgtctgacttttcactttacatatgaaacatgcgcaagattactattccgtgaattgtcgggcttagtacgcagtactccctatggaatacaatataggtattatcactagtattacggagtaggaaagggggtttcagggcttaggtcttctggttcaatattcagagtagataaatgataacgtacaaaaaaaaataaaattatataagacggtataccatctcatattatgcttccttctgcttgaataaggatgaaacgaaatggtatttgttgttatgcttgccgttgcgctgagccagccgctggcccgtggaaaatggagatacttggtgaatattataatattcaggggccagggttcttgtcttgatctcggttgtaggtggggtaacgaatgacacccttctcatcggttagaaccctaactccaccgcgacggttgagttcctgaagaacgttctggtcttggcgagcccagcgcttgaacggtgtgtcggggtcatcggaccacacaggacctttgggccatatgttccgaagagaccggaaccagggtcttcgtcgccttggctgctcgggctcggaattattgagagcgcccagggccgcaggcggggcgggcggagcgggagagacagagatgcggcgatcgtcagtgtcatcgccgagttcaatactggcagtctcatggtgagtaccatctccttcctgtgtctcctcgatttcgtccatgtcggcttcggccatgtcaacgtcgttcggatcaggcgcgaagcgaacgctctctgcgtcggatcgcgttgcatcggttgtctcttcgtcatgactgaagaacacaggcttttgatcgtcgctgctggtgatattttgggagccaatttgtccattgaaagaatcatctgcttcaattttcacaaccactgaatccgagccggtgctaggataggaggatgacgatgactgcgttgctgttggcatgcagacatccggaacaggagcatcaccaaaggactgagcatggaggtttgagaatcttcccacaagactggccgtgaaagaattattggccacttcgctttgtatcgctttatcctgggttacatcgccttggattgtcacttcatttggaaccggcgaatttcttaactcggtactggtaggcggaacaaactgagaggcgactatgtcaattccgtgggctgttaggcttctctttttgtggtgagggcgtgagaatctcgagcaaaaaaaatcttcgtaatttagtgtcttcgaattttcaaatatatgctctgtaagatagcgcgagtactcctccaggtattggatgacaaagtcatcccataggaacgatcgttggagttggcccttttgtcgtactgcctgcaatttcgaacacatctcagtgaagtgagcaaaaccaccagcgtacggcgaataatcattgcagaatttttcatagactgtctgtgcttcggcgtactcgtcagaattgccgatagagccttgtcgccgtgctaccaactcgacatttggaccgtgagccgccttttggccagtatcaacaccctcgcagcccggagggcgtgaatatttagggcgtttagatggggactctccgtgggcagcgaccgaggtggtgaattccataggcgacaattccggcaactgcgatcctccgtcgagtcctcccggagaatgttggcttagttcatgaagttgagacgtggacagcgagtgagacccgacatcaggaaaagatgatgggttgtctgagggatctaaacggaagatagacgacccacggtgtcgttgaacaggtctcgatgaatcaagtacgtctggggacgactgaactgtagcctgtgagagtgcatgtacgctgcttgtttgagtctgagtacccagcacatccattagcggtggttcgtcttgggataaatcactgtgcccgtggttatcttgcgagcggtaggtattcggaattcgggacgagggggatgtcttagtagcttcagagtatggctgctgagagctcgggagctgaaccccagttctctgttcgctttgtttcccgggatttagacgtgtattattggctgcaggtgtctccaccacttggatagtcccccctgcaaatcttggaagcgacggtcccgagctagtaggttcctgctcaggctggctgcttaacggaaggcttccacccagagcgaaaggaacatatgtttccatctctggctcatcgctctcatcgctgcttgattcatcacgcatttcagatctaagtgggatagttttggcgggtgattggtcatgctcttgtgttatgcttgggggttggtcattgaccacatcgaccgactttgaagcgttgtgctcttggggtaggtcaggatcatggtccaaaggcaatggacttctgggttttgttgttacttcctcgggagatggagaacattgttgctctgctgttctagtatcgtttcttgatgagacaatatcccccggtcctggctgaggagcactgcaagacccgttcaccatgtctacatccccattttttatagactgatcaacgctatattgagtgccagttggcggagaagctcctctgataggccgtatgtatcttgggggagaagcggtgtcccgtggaagaacatctcgagcaggggccctatcgggggacggagaccatggtatgggagatgtagagggctcttgcggtgtagaggtaagcgcacgttcagatagtcgctcttctgcttctgcttcttctgccaaatgttgtcttcttcgtgcaatattgttccactgcgtcaaaagacgaggcggtacatggcatagaggtgtagatataccggggtcctgagggatccatttgagcccttccaaaagttctgcttggtcttttggaatatgaacttcgctcagaggtattttcatcattccatcccatggacttgttgcggacgggcacccgatgtctgtcttggtgtttacgatctgtaccctaggaggcgattgcatgagcttgttttgtactcgctcggatttatttggcggaatcacctcaccagcatcaatgcgctgtcgctttttggagggtggtgtatttgaactttgccggccctgcgagctcaggccatcattgtgaattagcacatctgtactaccacgatgtcttttttttgacggctgaatgtcccccattccaacattgcgagccgggccatgatcatccgactcattgggaggttgtgtgcccgtacactccgctataaagtctaccacttctttttcaatatctgcgtaagattgattggtaacatattcactagagcgcgtcgaattagcaatgttgctatcaagtctccgaaacgagggttctatttcggtgaaaggtctgccaatttctggtgccactgacattcctgtatttggcaagggagaatgcctgctttcactttcaccaagaggtagtccgtgggcctcgagcacctctctagtggctgcgtaatttgtttgaattggatgagaaggagcgagcaatcctagaagatctgatgacccgttgagggaaacacgactggtcattgcattactcttcggtgcgccatggcgcatattagacgggggttgggagaagagcaactgtgatgccatattggtttgagaatgattgagcggcatagttcgatcacgctgagaagcaaatgggtcggtcaatctagcatttgtttgatcgttggagctagcatgccctcgcgtcttttggattttgtcgcatgccatagtcatcagggctctaagagccgttgttttcttgagctttggtttcggtacatcccctctcggaaccgcattcgggtggatagtaaaccgtttaatttggaggcagacatccggggcaggtgctgagtacgttaaaatgagcttgatgtcgaaaagttcaactaggtgcctagggcctcctttaagcgacggtggacagggtgatgttgctccctgtacgtccggcgagtcttgtaaaataatcgcatcaatctggttctttgaatctgtaaatgtggcgcaatgactcttctctccttctccccactaacagacgaaagacatatagttagcaacaactctttcctttttttcgcattcgctcggggtattttaccgatacaacaacggctgtcttgagtgtcggcttgcagaaactgaagctgagacatccgtcgatatcttccacctggacttcatcttgatcattttgaccgatataaaatgagagacattggtcggccaaagccgcgatccagggacttactggattcatcgtgcgaatccagccttgtagtcaatgttgtacacagcatatatgtcatagctggtaagagtagacagtgggcatgggatgtttgtagccccggagtttgtagaaaaagagcgaaggtcgtcaaaaaaacccaccactcaaccgcgtcttatcgattgtgacctgccaagacccccccccggggggcggggcgcgccccgcctnnnnnnnnnnnnnnnnnnnnnnnnnnnnnnnnnnnnnnnnnnnnnnnnnnnnnnnnnnnnnnnnnnnnnnnnnnnnnnnnnnnnnnnnnnnnnnnnnnnnnnnnnnnnnnnnnnnnnnnnnnnnnnnnnnnnnnnnnnnnnnnnnnnnnnnnnnnnnnnnnnnnnnnnnnnnnnnnnnnnnnnnnnnnnnnnctcgggaggtcgggacgcgcctagcttactcagcaccaacacgtcattcaacgtgcggagggcaaagggacctattctttttttctttttttgaaagaagtttctttgatccgatcagtctgacagacgctcttatcgaccctcgatactcttttttctgccaaactcgctaaactcgccaaacctgagaccttcccgcagttctgcccgaatggtcggctataaaggtgcctagatcctgtgcggagatgatctgagacctttctgcctaacttggcgatggattctcagcactcccaggactcacaaagtccatcggcgtcttccaattcgcttcctcttgagcgacgcggatcacgcagctctatggccacgactcagaccgagcgagaatcgatgaatgcagctctggataactaccataatgcagcgtatcagtccgagtccctcactctcttcaacgattttactagtccgccagccccggctgccatatcggatgagaaaagactgtctgacgaattacaaggtggactaagcggtctgtatagtcgctttaggacttccgtcggaggggtgagggatattgtcagcggtggcggaaaaactgcagacaaaaatccgacagagactcctgcagtcaaaagtcttgtttcggagaattcgctggcaaacccagtctcggacgtggctacaagctccgctgattatctgccatcacagcccaactcgtcacaaggatcaaggctacactcgcctgttgtgccagacttccacacttatcaagaacctgtgcaacaagcaaatataggaaagagatcaagaatatcctcgaaaaatggcagcatatcttccaaggcctccgtgtcaccatcccttggaatcaagcccagtatcgcaccgttaacgaaagccaccggtagcgccattgtggcagaccctgcagtcactcaacttcatgtgaacgtagtcgggaaagctgactgctcaagaagcagctccattaatggtcccttccagggaatccataatgcaggatcgacaagtatcggtagcaaggaaggctctatggatcttcccatgagtcaaacatcctcttcattgagtcagaacctttctaattcaccagttttgtctgcaaagatgcatgaaagccatcatgaggaattcaacctcacagactcagcaacatatactcctgacaaccagtctcggaagtccgtctctactctagatcaacaaaagctgcctgaacactcgtctcaatcagctaacatgcgagataccaagcaatctgagccagttcaggatcatgcatctcagcatccggcagaaagatcaaaatcaagagcatctttcccttctgaagagccgaaagcttcggtttctacgtcaaatagtttatcaaaactttcctctcacgactcagtaccgtacaatgctgaaaaactcccaaccaacatggagacaaccattcctcgtgacagctctaactccaatgagcctgcaaaggtcacagctcccggtagatccaatgaggagtcaacgccctcaatccgagcagcgcggctgcctggctacgtgatttcacgggcctccacggccgagacgaccacaacggtctcctcattgccgcctttgaagactgatttcgatcgggctactagccaagccaggcgtcaacctcccgccgggggcgacggtgttttatcgcagctaagaagtaaactacttagcagggatttttggatgcgggatgagaatgccaaagactgctttcattgcggagaacctttcacaacatttcgcagaaagcaccactgtcgaacttgtggtcaaatctttgattcgaaatgcactctgctcatttcgggaacacggttcggacagcctggtaatattcgggtttgcaaaccctgcgagaagatgatcaatgcgcacgatgatgattcatctgaattctccgacagcgagcagagccccatagtggccaatcctcgggtttctgaactcacctggaccagtcctggacgagcatctgcggatgacgatgattcatcttcggttgtgtctcaatcaatcgatcacgttctgagaaccccgacgatggctataccggccacacgacgtgctggagagggacataaccgccgctcggcaattcttgaaattgattctgatcgccctttaacacgacctacctcttcgcgctctctgcggtcttcgctgggtggaagaccacactccctcagtcacaaacgtcaccactctcgtcagcaatatattcggggctttaagccatatcatgaagaccgagcccccttccaacgccgacatgcagatgacatagacgctgaatctcgactccctgcctttcataaagataatatcattgaccctgaccttgctcaatatctctcggatgatgcatccagtggcgatgagcaacctagcctcctgtctgcggtctctgagggcactctgtctaaaagtgggggtgaaaatgagaaagcatcatttggtgggcttctcgctgccatgaaaaagggtagatctgcttttggagaccgaagtactcccagtacgaatcgagacgcagacgaagccagtatcacgagttcaagagccgtgaatctccctcgtttttctcgacgtcgaaacttgagcgttactagcagttatcagccgcgtcattcacccaggacatctaaggacaatatgccccctcatgacaactcagcaccagtcatatctttacccgagaatgtaaagcagggtgggttcaagatgactcgaagttcatcaatgagaggcattgatgcgccacctgtggaattgaacaaagcgagtctggaacacgtacgaaagcttctccatcaactgcttgtagagtctgctgtgccaaattgcgacagctgggaaaacgctttgatgccaatactgttgaaggcagcagatgaggttgatccagatgtccaaaaaggagatgatatggacattcgacactacgtcaaattgaagaagattccgggcggccgacctggtgacacttcttatgtatcaggactcgttttcaccaaaaatttggccctgaaaggcatgtcacggaacatttcacgtccaaacattttgatcatcacatttcctcttgaatatgctcgtcaacaacaacattttatgagtctcgaacctgtcattcgacaagagcgtgagtttctagaaaacttggtcagtcggatcgcagcattgcgtccaaacttgcttttggtcgagaaaactgtttctggcctggctcttggcctcctcgagcaagctgggattgccactgcatacaacgtgaagccatctgttctagaggctgtgtcgagatgtacacagactaggattatgacatctatggataagctcttgacgaccacattgcatagtgaatgcagcagtttcgacgtgaaaacctacgttcataatggtcggaagaaaacatatatgtacatttccgggtgtccgaaagagctcgggtgtaccattatcctgcgtggaggggatgatcaagtcctcgggaatgtgaaaagcatcactgagttcatggtctatgttgtgtacaacctccgtctagaaacaaatcttatgcgagatgaattcggcaggatatcaacctcgccgacagaagaatcagcagttgggcacaaagacaataaattcaatccgcagattaccactcacgaaggcaacgcacatctagtcgacctatctaatgctcagcagggagccaacgagaaacgtggtgatatctctgatagccaaattcttgttgatgccgatgctgcaaaagttcctgacaacatcccaatgccgacatactataacgatatggttaaggattacgagacaaagattttgtcggcctctcctttcgtaaaattcgaggctccgtatctcctaacgcgtgcgcgcgaaatggaacgcaggctttcgtatttgaagtctcttcgtgatcaagaccgcaattctaaccagatcaccgatgaaaaggtcaaaccgcaaaagtttgtcctcatcaccccggaaatggtccatcaatcaccgcaagatgcgccagcaaaagtcaaggaagtattgcatgctgcgcatgaagccgagtacgaccgggctctttatcaccatcaaactcaaaagcgccaatgggaagcctatgtggcggggaattccaacatgtttgatccttatgcgcatcagaatttggtcattctctacagtgttgtgtgtacaacaacatcagtcccctgctcagggccagatacctttgccttggagttctataatgagcatggagatgacacaatcttcgagtcagatctcacaattgggcagtatgtagaggacctttgtcacacagcaaattccgtatgtaccgtcaacggctgcgagaaacgcatgttcgaacaccaccgccagtacgtacatggcgaggctcagatcagtgtcctggtccagccttatccttctaagctccgtgggctccataatgccgtgctgatgtggagctgttgcaaaatttgcggcaatgaaactcaagttatgcctatgtccccgagcacatggaaatattcattcggaaaatatctggagctgtgtttctggggcagacacttgcttgctcgtactggaggttgctctcatgatttgcggcgggattatctccactattttggctacagggatcttgctttgcgggtccaatatgaccctattcgtcttctggagattatcgttccacggcctcgtgtcacttggaaggtggacaacgatctgaggctgaggaacgaagtatatttgcgtaccgagcaacgtctcaacaaattcatgatctctgttcaagaccgactgaaaggcatcaatgccgagagtgttgttcccgagctactggagagctgcaagacgaaaatcgaaactttgatcaagaagagtcatgaagaccatagctctttggtccggcacttacaagacaaatacacaagttctcgctattgggagatcataccgctgaatgaggtcctccgtgcagttcaagaaaaggttgtcgaatgggacacgatatttgccgatttcgagatgaactttttcccatctgagaaggatatcaagcatatggcaacactgcaactcaaaaagatcttcctcgacaaagatgcaacatcggtttctacagatgatgccctcgaaactcccacggatgttgaagatgagaacgaccaggaagatgacaggccacggatgatgcgacgtatgacactttcaccggagaaggcacaggatgtactggtctccgttgtcgaggagcacactggcaaaaagcaccgcgaggacctcgaagaagtcgagttgcactcgcctccagcgtcggctgaggaagcaactttatcagtcgatgcaattggtgggacgaggtcttctccccaggatgaggctgtctcacaagaagtacgacatctcgacttggctgttcctgtcggccatgctagcatttcgaatcaatctcctataaacaccgatctccctgtgatgatttccggcgacggatcatcggaattatcaccaccggaaagctctaggattcccgatcaaggaaccaagaatggaaccgaagacagcgtatctcctgacatagcaaataccccagtacgtcggccttcagcaataccgaggcctaccgagctagcctttcgacgcaccggtaagatacggtctcctccgcttttgcgtactcagtctcagccagctgcgaatctaccacgatcatctcacagcattcaacttccggggttgaaactagcgttcgccaacccatccgatccggaaacccctgcagtgcaatcaccaacaaagtcatcggatagaaagctgagcgatcgtttaggcttaagttccctcaagagtgcccgatttgccgcgggtcagtcgcttattccacggtcaaggggaatatcgcaggtttctcacctcgccaggcattttgagcaattgagtcgtgaattcgagaaagagagacagcgcgaaagacgtcaacgcactgccaagggcactcagtcccgagcattcccattggcgtcctcgaagcccatcgtggaggtctatcgaaatgtacgagaggctgttgaagaacgcgaaccgccggttgatagtgatgaatatctgccctcggctccccggatcccaatggatgacatgagtcgcaagagtgatgaacttacgcatgatcataaaactcataatgagccctctctggcaagcgagtctcccgcagagcctatgaaagtagacagtgcactctgtcctgacgacgaactcttgtctggcgacgaagcagatgatcaccaaagtgatgaggatcaaaacatagttgaagatctccatccagtagattcacatgaagagaccaaacagtcaccagaggatgattcaattgatttcaaagaactccctaaacatgagcgtaccacgcttctgaaaatgctgacaaacttctggtctgaacgttctgcaagtggttgggcgtctcttgactatccactcagtgtcatggatcatgtctttgctgattgcaatattattgttcgcgaggatgaaccaagctctttggtagccttcgctttggactcttccgattacaaagaaaaactttcaaccattcaacagcggtttgacgagacggaagaacaaaaaccagatgccggagacgacatcgaggctgcgaaggaagcacaggtcgaacatgctctcttgcgacctacgggcacacacctaaagtatcaattccaagaaggtcaggccaagatgctgtgcaaagtgttctacgccgagcagtttgatgctctgcgtaaaaagtgtggtgtggcagatcgaatcgtcgagtcattgtctcggtgtgcaaagtgggactcaaagggtggcaagacaaaatcgttgttcctaaagacccttgatgaccgtttcattctcaagtctctctcaacgattgagacgcaggctttcctcaaattcgccccggcgtatttccaaatcatgtccgaagccctgtttcatgaactcccttccgcaatcgctaagatgttcggcttttaccaagtcattatcaagaacccagtcactggaaccgagttcaattggttcttgttgttaatggagaacttgttctatgaccgtgtccctacgcgcatattcgatttgaagggctcaatgcgaaaccgcaaagtagagagtaccggtgaacgggacgaggtcctcttggacgaaaacatggtggatttcatctatgaaacccctctctttgcccgcgagcattcaaagaaacttcttggccaaagtgtatggaatgacacactctttttgggtcgtcaagacgtcatggactactcactcatgatcgccatcgatgaaagccgcaatgaactggtggtagggatcattgactgcattcgcacctacacctgggacaaaaagctcgagtcctggatcaaggacaaaggatttgctggcggtgggcgaaatcgaccgacggtcacaagtcctagagaatataagggtcgtttccgtgaggcaatggctagatatgtgcttcaagctccaaggttagttgatatatattccctcgggtgtgcgactgaatactaacgagtttagctgctggcatcaattcccatcaaatgcgatgtaccgctatgagaaccagaacactgaagttgagactgttgatgggaacgggtttgtggaagacactggttactgatagcttcttagacagtcttcgttttgatctgcgcccatgaactgcttacattaatgatttatgacctgacgaattttcatgagacggagtgcagggtgatgtttcatgtgttgggaatttcttgtcatcatgccttaacattgcctctagacattcatttcataccaacattctcatagccagtcccgaatctttttgcctacctctgtacgcagtaacacgtacactgctagaggcgcgtggcctttttggctcatcgcaggcgagcgttgggccggatgcgctagccatgctagtcgtggcattcctgaagatgaaccatggccggtttcccgggccaaatagcttgggtgaccagtttcttgctcttctacagttctatggtactcaggttgacctcaagtctgtcggtgtcgccgtggatccccccgggcttttcagcacagacatgttgcctgtagctcgcggggctgatgaaactgcccaccagcgcggtcagcgttctctgatcaacgtcaagcggaccgctgcgggaaagctcaatatgcctctcttcatatttgtgttgtgaaaagcagcaccctgcaagccctgtcactcttgatctcctgctttccagtgcgatctcgggttaccctaatattagaactttagcaaactgccgggccgactggtttctagatgtgcaagcggataagccatgagaagtcatatttatgagatcttgttttatgccaccaattaattcgagttctcatcggtttggggagaagtaggaagttatattgttgcccaacttccaaagcgttcagcataagtagtctatatattttgaaaaaggcaaagaaatccgttaattaaaggtatgtaggtgcaaccaggagacactgatttgcgtagaaaatggaacggccatcgaaatgttattcgataggccaagggggctgcctttttaggaagggggtagctcatgcgcttcaccaatgagaatatgccgacccttgcccttgtttcggtggagatgattcgtattccacaaccacatcatctttgcggtggatacgccccagtgggaggctatttttcccgtggtcatcgttatgaaggatgctctcttgactctcttgatcgtcgatgttggtgaaacagaggtcatcgtgcggttttgattgcttggagcgatggaatgaggaggggaaattgctgctggtcttgagctgatcgctctttccttgactgtatgagcccattgctcgtttgccgagaaggatttcgaggagtggttgtaaggtggggatgcacgatgctaaaacaacgacgtcggcctcaatactagacggagaacaaagggttagatcatataacaagaggatcggatggaagatgcttacttggtccacatgacaaggtcggcagtaccgtcttttgtttggtcagcctttggttaaagcgagaaggataataaggacatacatgtgtagtcggatttgtcggcaagtccatgcagctgggtacactttataattgccatcgcagaagcacttcatcgccactttggtcagcttctgggtagtatggtatgagttggggaggtatcaacttacattccaccaagccctaaagcagcacatagcgcaattctctttcgtagagacatttggagtttcaacaagacggttgttggataaacggccagagttagatcagcaagagcagagatagctagaagtatggggttaattccaagacatatgtttcaaggggatgagacctacatccagtgaagatagcaaagtcaatgagtaacgctgtacttttgcacttggcgcctgctgcgacaagttcaggcttccacaatgcctctgctggatcgcacattgtgaacaagattataatgcaggtaatagacacgacgcttgtggttccaaccatcgtccacagcatcgccttatgcagtggtttggggttcaagatccgggtcaacatggaagtcacagcaatcttgggaagagtgaaagagaaaatcccgaacaaaaagctgactgtattgagtagaatggccttctccagattgtccgtactcaagtacttggaatgttttccataacccacacccacacctgctgtagagattccgcaatatgcaaaccccattatctagtacacaagctccggttagattcacctcgaaaggacagaaagcctcttaccatggaaaccacaatcaaataatcatccaaaccaaagttccgcagtagcttgagccggatgtagaccctagccacaaccataacggcagttagccccgtcaaggtccacagtacagccaggatcttgggacccttgtcatcgtgaagatttccggcggtgaccaccattgtctcaatcttgatgcagaaacagcggggaaaggccagaaagtgcgaaagagtgcgaccccgttatggagtagtttatatatagccctacaggaaagggcctgctaaaaccaacaatagcacataagagttcacatgagatatgtacatggaagtaagtacaggattgatttcagtgtgccattattcgatcagtcactccgtactattattttcctgaaactccgttaaacagccaatccttcgagattttagttgcgatgatcgtcctattttggtaagcgcattgttcatcattgtttgacgatttatctccgaggtcatcgtctacaatagtattatagctagctcgtttttacggagtactccgtagtcggataggggtatgatccctgtcacgctagctagttagtcgatgccgctaaacgaaatgacagcagtctcggaatgggaccccaatacccggtggacgggcctgcatcgtaggcagtagcttgagatactccgcgtgcactgccctcatgtcgaataaccggggttttatttggaaatatctggccaacctactccgtagtctagaaagaaacaattgtaccatgcagtgtagatcttgggtgaagtctagatcatattctgggttctaaaaatttgctgacatttcaacctggattttacgagtcccaccgtaatacgaagagagtgggtggtttctaatccaccagctcgcctcgtgggtcttttttttttcaagtccaagttgaaaatagacaaaagtacggagtacggagtactacggggttaagtacgtcgtcgaatataaggagtgcagagcacgaagtagcccgtgcgaacaagcgaaatatcgttaaaaaaaacaccaaaaaagcgcgattagccgtctcgatgtgggtatttggtgtggatattaatgtattccggtccattgagccgattctatcagaatctcagccctctctgatcaattccacatactccgcttatatatttacgcgattcgttgaggacaaagtacatgccttgtacttttgcacttggatggggaattagctttagccaggtcattttagcacatcaactgcctataacgtataatgagtattcctttgggacatcttgtgatagatccatccatggatgtgggcccatccgctctaattttattgtgatgatccttgagttattcggtacttattatatacataggtacaacataccaagtgatattcttggcttgggcgagccgttagacaatctgctcgtttgttacctgaataggaagaccgttgaaccgttgcgtctccacttcctttgtcccaactggcaccgacttactccgtagtgtcggtggaacctatcttctagcacagtgctccagtgggatgaataccagccggtcttcatgatagcggatccatatgattgaacccggtccaaccgttgctcagctggcgtagcttcattaaagaaaaggagacagtgactgtagcttgtttcaaaaaaggggatacgtagataatgaatgtagtatatttaaagacccctggagtacttttgacttggatcacttcatattcttctgcactcccacgctatctatattacattacattcacaatggccgacattgcaacccttacattgagtgaaaccacccaagctaatgggaactcacacacggagggcacaatccatgcaactggagattgccagaccagcggaggcctcgaggaggccttcgtcgaccgcgtagcaatttccgccaacacacccgagctcgttcctggcctggttgatcagattgcttcccttggcaaagtcgccagcctgcaagacaacaccgatcgaacaacccttttggaagccgctcgatccctggtctacgcacttgagaccccacgtgaggctatgatcagatactgttggtctcaggtaaattcccgtgcttctaaggcacacctttgtgctgttgacggcaactaatattgatatcatagtctaccctttacgcttctttggaaacaggtgttgatctgggcctttttgctatcttgtccaaggatgacaagcccaagtctgctgccgagttggccaaggccaccggtgctgacccagttcttcttggtacgtaacttgccatccgtcctgtgctttgtcggtacactttactaactacatatttgtttagctcgcattctgaagcacttgtgcgcaatgggagttatcctcgagactggtcctaatgaataccgccgaaccggagtttcaatctcgctaagcttgcaacgatacaatgatgcatacccttgcatgtaagtcggaatttgtgggcatataatccaaaaggatgatattaactcattggttaggactaattgcatcaccgccggtgtgcttgctctacctgcccagctcaaaaaggacggctataccaacccatcaaacggcaaggattgcgctttccagcgcggattccgaaccgatctccacttcttcgactttatgaaggagaacctagatgccgctagccagtttaacaatcacatgtctgcctaccaccaaggccgtcctagctggatggatgtcggtttcttcgacgtgcccagcctgttccccgatgtcacacaggacgatgttctcctcgtcgatgtcggcggcagtttaggccacgatatttcggagtttaagcgcaagtggcctgatgctcctggacgtctggtgatccaggatcttcccgatgtggtcgctcaagccaagtcaggacagctagatccgtcgatcgagacattagagcatgacttcttcaatgagcagcctatcaagggtatgatttccccttctatgaccccctctcaactcagatcaaaactaatattttcttctaaaggtgctcgcgcctactatatgcactctgtcctgcacgactggtcagacgataactgccgcaagatcttgaagggtctcgtgaatgccatgaagcgcggacacagcaaggtgcttattaacgagaatgtcatccctgataccaacgcgtactgggagacaaccagtctggatattattatgatggctgatttcgcttcgaccgagcgaactgaagctcattggcaccaactggtgggatccgctgggttgaaaatcacgaagatttggaatgcccagaaaggagtcgagagtcttatcgagtgcgaattggcatagatgccacctaggtaatgggatctgatactcaggatgatagattgtactggttttgaattaatggatatattttagcatatgtacgggccgcgccacaaattgtaagagccgaaagcaacaggaaccgaaaaaaaataataactaaacaatttgttcaatttggaaggtagcagtagtgttgatacttgataggcatacaacatagacagtggattttagatgtgaacctcgtatactagtacaaagtataatgctgacggtaactcgggtggtgatcggcggccgaaggcccgaggtccaggtggtgagttagaataaaaccggttcaaggccgaccgctggaatcaccgcctttgtgtttatgttgctgtggtaattccaatacaatcacattgttttttttttaatacattaggtataatggtacatactcctactccgtactccgtgtataattacctatgagtctagaacaagccttggagaggtccgtgggcccctggacccctggaccgaccgtggacttacccgttagtggggccgcccagccttccacggttgggacgtaacttcccttttcgtctgcttgctttctctattctttcccctccccctttctcacacacgcacattctctctttccacagattaaatgcagatataataagaagaacaacacgaaagagaggaaggaggataaattgtcatggcagagggcgattctcctatctcggaccccggaacccccggaccccccgggatctccttctcaggtgatcggcaggcgcagaaacaggctagtgaatatcataaagcaaaatgacctccctcaactccgtcgattcatcgcctcatgcaatcccgaggatgtgatcgcccctgggacaccctacttagaggacacattgttcaatgcagcctcgtacggcagtcccgaggctcttcaaattctcttggatgtgtatactacggccccggaagttgtcaagaggttcaaccccaagttccgtctgctgctcgacgcatgtggcgcggcaaatattgatgtagtgcgctttatcttggacagtccagaaaatcagttacctctcgggacggtggatttacatcagcgagatgattccggagatacgccgatcctcgtggctgcgggttcgctgatgtatcttgataaagacccagatgaagtagaagatgagggtcttcattgggctgagtggattcgggatcggattgcgcggggccatgagttgattcatcttcttctcgaccgaggctgttcagcgacagatgttattcctcccttgccaaatgatatccctccctggggaagtcaggtgcaagatagtgtgcttgggcttgctgtgtcgagggctaatgggccgttaattcaacggctcattgactccggtgccgatatctaccttaagcatcaacacttccatcatgccagggcaccgttccagttcaggaccgcaaagggtcacgcgtatgatgtcacaacgctccatctagcaagtctattctacaatgctgatgttgttgttaacttgctcttggatcatcaacattaccagaacaataccaaccctgacctggcttcctcctgtgatagtgatgggcgactcccactaccctgggcagctagcggtcctggaggtttttactgtagactcctatataagcagctcggaatcacagagatccttcgactgctcctcgaccatgattctattcgtatcaaccttattgacaacgctagatccacgccgctacactatgctgctataagccacgctatgtgccagcacgttgagtctactatccgcactttactcaaatacagggctgacctccggatccccggcagctctggctgtaccatcctacatctattaggataccactcccatcaaggtgaccctatcaagaccaccctcctcgatttgctcctatcacacggtgtcaatatcaatcgtgccgagaacaagggaaagacggaattgcacgtctttgcccagaatttgcggcaggtctcggcggcaaggttcgtaattgagcaccaggcggatttccgcgctcggaatgctttccaggagacgccctttcatgccgcagcgcgggggtttttgaatgatcatatacgatgtgatgggagggataaggaagtgacaactgcgaataagatcaggcttcaggatgagataatgcgtgttctgaaggaggctgctggggaggaaactgctatgttgatgggtcaaccaaatgcggagggtaaaactccgcaggatttactggaggagaccagaaatcggtggcaggggacggagcagcgcataccaggtcctggaagaggcagaggcagaggcagaggcagaggtagagggctgccagtaggagcataatgacagttcaggaagaatatctatctcataagggtagcaatcgtagcatccacggaccaccagtacatagaaggtcaaattaacgttcaatttgaaagtgttacagctatgtagtttgtatcggactgaaatacgaacaatatctttgttttatacataaaattggtgctgtccgcgctgctaaaggagataccaatgaacacagatctatataatccaagggctaatctctgggaccatcggcaaaaaccgggatcggggcggcaaaggctccacgaaatttgttaacgaatttactagccctgtttttctaattctctttttcattctttcgccaatggcccggaaaatctcaaaaatcgcatcatttcctgctgcagagaggggtaagtacagttcgtcagcggcgtatgcccgggtgatatcgtcatcccctcgggcacatggatgggcctcggtatcgggctcctcgggtccctgcgtcccccgcattggtttttttttgtgcaagttctttttttcccttcattcttttgactgaagtcttcttccaagaggatggatcattctcgtttgaatcgcgcatgggatttagagcagttactccatgcatgcgacagcgactttcgtggactcgacgcgcgacggatgcaagtctataaggactcaagcgcaaaatatcagtcctatgtctattcattgaattgtctggtctctactaactcattaatttgaccggaaagcattaaattcgtttcatttacatgagcaatgtattaaccttccgggctatggtcccagcgcagaacaaacttggcttcgaacgaaacaaaagcgagaaaagaaaaaagaggtatgtatcccatccgcacaccggcggtaaaaaaagcacactggaccattccatcaccgaaagcttaccatctgatgagtttacagaaggtttactccatggtcagaccgaggttctcatcggcgggcaccacacgaacggtgttggtgtggcccataccgccacgccatccctggacacagacgatagagtcacccttgttgatgattccgagcttgagaccgtggttgataccccacttgaggcgacggtcgacatcttcttgccagatcttgacgttgaaatcaggcttggtctcggggaagtagaacggccacacaccgcggtacaagtgggagtactggaactgttgtcagcaaagaacgatacaattcgaacgatacaattcgacttacccgggcagcggtgtcattgcgagtaaccatcaggatggggcagacgggacgatacttcgacacaaggcgggcagttttaccactatgaacttgttagtatgatcttcatacaaaatgacaggaaggttccggctacctggtggtcagaacgatgatggcaccggcattcagctccaaactggcgctgacagcggccatggcgatggactcggaggtttcagtggggcgaggggcaaggttgcgcagctcgtcgaagacgttgaagtgaggaatggcaacctcagccagcaagcaggtctcggacatcatccgaacggcctcgcaagggtagttacccttggcggtctcaccagacagcatgacacagtcagcaccgtcgagaacggcgttggcaacatcggaaacctcagcacgagtggggcgggggttgtatgtcatggactccagcatctgggtggcacagataacgggcttgcccttgatgttgcacttggcgatcatcatcttctgggcaaggaaaaccttgggggcagggatctcgataccgaggtcaccacgggcgaccatgacaccgtcggtcgcttcgagaatctcatcgaagttgttcacaccctgctggttctcaatcttggcgatgatctgaatctccttgccgtcctcgccaaggacggaacggatgtgctcgatgtcgctgccgcgacggatgaatgaggcaaagaccatatcaaccttgttctcaacaccgaatcgcaaatcggcaatatccttctccgagagagcggggaggtctacatcagtgcccggcaggttgacacccttgcgggatgagatactgccgtcgttcaggcacttgaccttaagggtctgcgcatcaacaatctcaatcacctcgaatgacatgatgccatcatcaacatagatgagcttgccaggagcaatcacattggtaatgttcttgtagtccaggtacctgtcgtcacacagttgtcagtccacatcacatgtcaaactcgacattgagggactgtcggtccattcttcggaatgggaatgatcttacatgttcttatcgtcagaagcagtggcgtacgcctcatcagtggtgatgttaagcacggtgccctgcttgatggggatgtccttgtcaccgggggtgttaccggtacggatctcggggcccttggtgtccagggcaatggcgagagggcggccaatctggatacgagcggcctcgcgagagttgtcaatgacagattggtggtactgcaggccaagtcagtgaaggtcttcattcgggtgttgattggagatactgacctcgtatgatccgtgggagaagttcatgcgaacgacgttcagaccggctatggccatgtcagactaactatccaaaaatgctgcccatttccatcggaaactttattttcatacctgtgcggagagcattgatcatcttggcggagttcgtcttggggcctgatcgattggctgttagtaaccggtgttttttttctctccaccagaacctccctgataggttcggcctgatgttttctttgacataccaatggtacagatgatggaggtgcgacggaagttcttcgcaggcaccatatcggtgctgagcttggagtaccactccagcttcatgcggttgctcaggtggtcgagggagtttgtaaccgccattttgagatgatcaacaactgttgaattgatgtagaaaggatgagggaagttctgatcaattgagaatcagggaggatgggtagaagagaaggatgagaaatggaggggaaagagaaaacggatgggtgcggggcggtaggaaaaatgttgcccgccggtgtgagtattggttccatccccaaaacatttttttgtactattgcgaccagaccatatctttctaccaaattaaccggtgaattctgtgacatatgaggatttgactgttcttatttctttctatttgttcagctatattctctatttactaaaagctggaggtgtggttagaggcggcataaacagtccaaacagaaaaaaacaattatatatcaactccggactgggctgaccgcaaaaaagcggaggattaccccgtgctggcctacgcgctgtagattggagtccttggagcgagtaaatgtgacaaatccagacacccaattgatccaggccccagctcaaagaccccagagggatttcggtgggatgagaacgcttatcgatagaccgaatccggactagtgacaatcttggcctcgatccggccccagccacaatgtggattatgtcaggtacaaccagtttcaccagcctcgtctccagccactcgggagacgtcatgtgaatatccacgtgaccgctctttaggcggtcttgatgcctggtctcctcttactttcgcctcttaagcttttggtaactcccggttactcaatatccacagtgttgacacttactactcggaatcatggtgagtgacatttgctggccgatcctggacaaccggggtcctcggaacatagagagcatgccatggctgactcggatgtgctgcaatctagttcggccgtcttacccactacgcatttgatgcggttctccgtgagtcctctaaagtgtccatattgtacctccgaatacagactaaccagtgccttcaaccgcagtctccgccttcctcgcaggcgtcaagcgctccacgggcctcacgtaaatgcaccctacccctcacgatcgtctttttccaagctattgtttattctgcttgttgctcgtcttgggtgcgctcgatatccatgagagaattcttagctaactctattactcctgcgcacccccggttgggtcgtgtgtgcgtgggaacttcatagccccagcctcaattcagacaagatcacagacaacaaagacatcaagaaatgggttgatagctaccttggtgttggagagtggatgatggaccaatcggtggctgttatgggctcgtccgcctggtttgaacgacgccgatgattgaccccgccatactcgacccggagagacaatcggcgatccctttctcgcgacttgactttcggccgtcttgtgtgtatgattgcggactagcggcacatatctggccttggctctgactcttggccctatggcaatgtgatacaatatcagtatgtacagactgagtctgtgttgtggctgtgtctctttaaatcaccggcacaccacaagtatatgctttaaagccgaattgacgagtgatgaccaatttttatctgcgctctagcctccactttcgatcggtgcttatatggtcatggtgttttgcctgttttcgataccttttatctttctgcatgtctatatcatcacacaaatccagccatgaaattagcagacaattcttggaatattctccttgtaggtatgaacataagtcacgggcttgtcagacggtgctacccggatagctcgaggtcactattggtgcatacctaggtggcactgcatgcctgaagctgactgctggcgagctacgagagtttcgttgtgaactacatcgtacgctatgtgaactactgctgaaaagaccaggtttcacccgcaggagactagttaatgattaccgcgggacgaaggtctatgtcgatatcgtggaccttgctgggagctcatctttcctcccaagatggaggctaaacccagttcacgtatcaatcacaacctaaacaacttgataaacgtaacatggaaacaggggggtattttacaaataaaaaacggaatgaagtaaaacgagaaccacaaaaacatgccagtcaatcatacaatacgtagttagagagcgtcaatgtccacacggcggtagtaagagacatggcccatttccttccagtaatgagccatgtggtcaggagaaataaggatcagttgggactcgatgtaggtgtctggcaaattacatgttagacaagaccgttatggtgtatctaccaaggcagcttaccgtcgtggaacccaagtccagcgacatgaccgcggcaacgcacaatccgggcgccaacaaaaggctcttccgtcccgatactaataaagccgctggcgccaatgtcgtcggcaacaaatgagtactgtccacgaggaacattggggtcacctgtcagcttgacagccagcagcggacctcgatgtctaacatcctcctgggcgtcgattatcttcgactcgttttcggaaccaggtgctacggtcgttattttatcctgggagacaagcaggaattcacatccatgggccgaataatctccaacccaaatgccctggtagggtttcgcttcggtgggggtgtaaaggacaggatcgagagttgagaaggttagacccggttcgttcggtgccggagacgtaagctcttggtttgcccacttcctgacacggaagaaagactccgacaaatccgataaatatttcggtattggcggggacgagtccctcaaatcacgaactgtacgtgcattggtctggatggttcgtggtggccaaagcacatagggtttgaccctagattcgctatgtttaaatgaagagcaaagagacagcgaggtgtacatatgtcgggtatccgaatacattggcatgtggcgctctggcattgatttaaaggattggattggagctgttcgggaggacggattatggtcgctgagaaacaagactggatcgaaccccttgtatacactgggttcaaaagactggatcataacttctgggtgtgatatccatgtttgaaactgaggaaagccacggtctgcaaagaccggatatgcttcaatcacaccccgacgattatcatatcgagctatgattagcatccctgtgtgctccgtgtctgcgaaccagatcttgtgctgaggaatgaaccaataggggtgatatgcaagataaagtcggcgaaatgactcaaagggacctgagttctggataggagtaggcagtctctcgttcaccaggctagcccatagtaagtcattcgatgcatgatcgacgagggcccggcaagtggcaccgaggcaacctagatctggagctgagagataagatgcaatctcatgaatgagttcagcgggtaatttctcaaggaacgatggagacagttgctcatcattaagtgaccggtcgttggggccatcgttgctttgttcctgcgacatgaaaacgtcagtacatggccgtccacggtatttccaccagcaagaattagacatacccggctagtacgggtggtaatcgccatctttccttccgaggcttgattcattgaggtttataagagagagatgatccaaagtattgtaaatgacatcactgggaaccccagagtcgcatggagataagaacattggaaaggggatcgaaccagtcacaggaaagactaataagcctaatattgccaatacagtgactggacataagtttttgcacccccgcatactcaccgtcacgatagactcataccgcctacctaaaaggcgtaatatatagatttcatagtatgaagtcatggggttttggccggcaatatattatataatcatgggggtgtggggccaggagtacaaatacttatgtccagccactacggagtatgttatctgaaagctgtgaggcgccaggtcaatcagaaaagaaagagtggaaagcagccttgttataaagctgctaatcactttgtctgtcaacgttgtaagcctcgaacgtctagctcagctagctaacaaaaaatatatgtagcaaacaatctgaagtaaacaattgcaaataataagcgagcaaaacatgaagcgtgtgatagcgatttatagtagatcgtgacaaaaactgcctagctttttaatctcgtatttggagctaggacatttagagcttaactttctctagccgctatcttcttaatggacttccggtgaatagattatcgtatagcatataaaaaataatctatgattcctacagaaaacataaaatcaacttaacttggtgttattgcaaagcgataaggtcggattgaatcgcagctgattttcacagcatttaagaggagagcctaggaaagttaagagtactggtaaatagaacaagaacataggatttcttggcacataaactagggttaattcccctccgtactaatctgcactctagaccccttgaacgcgttggtggctatgtatgtgtagatgccaagaaacaatgttgtcagagtcagccaataacgtctctacagcatagtacgtctctacgccatagttcgtgttcgactgaaagggtcagcgcgaggattgatacggagtatagaggttgagcctcgaggttgagcgatgaataatgcctggttcccacgatattaatagtatacttgtctaccttcacctagccatactgtaaggcgatgctcgtacagttactaatagtaagccatgcttgcctgggcgcccgatacagtacaacagctaccctatccaaacctaccctatactgtgtcccataacggagcatatcacgtgaactaaatatcacctgaccacccaaacaagcgtcttgtttaccattgcccgaacaggaaatatccaggaacgcgcctgggcccctgctgcctaactacaatgtatagagccccactttgtttgtttatttgtgatctataacgaattctctttataagcctatccctgcgtacacttttattttgtaaacgctttctttgttttggccttattattccaatatactctccttatcaacatggatactcggtcaggaaggaaacggaagagttctctctcaaatccaagccagtcaccagtctcacgccgaactaggcagagcttggcagtggcacaagaagataccagtctcaatcaacaacaaaaaaatgtatctgttacacccaagaaatcaagaaagagagtccggttttccgacccaggtcctcggttattacatggtgaagatattgggtcgaccggcttgactccagcgatgcgtcgaacatcgttcgagacagaatctggggatagcacacctagccgcaaatcccgacgcaggtctgccccaacaccgcgctttcagcggtcctatgacccggaggagccgtttgatgaaacatgcaccgagaggaggatccaatttaccccgctacgccaaatcctcgacacacggacccagagaagaattaggcgaatcgggttgagtgatgagatcaatcagattgagcgcgaaaagcgtgagacgcggaacatggaaaagaccatgcgagctttgcttcaagagcgagattctctgaaagatgaactcagggccattaaacaaggtggaatgggcttggaggaccaaagttcggtggctgagtcttattggatgacgccagagacacctagattttgcgatgaagtatcggtagtttccagtcacagtctggatgacgccgctccatctacaaacagtgaagaggagacgttcatattcaatgacagtgctgtcattgtgtccagctcccctgatttccgtggtatcctgcgtcataatccaccggtcactgatagcttgatgctatccgacgaatcacaaacgcagactgaagtcaatacagaagaatctgatattcgctccctgtcccttgatttagaggctgccaggaaggagaggaaaagcttgttcgacgcatgtcgatcacgaatctcagggttcaatgaccctacaatcagtagtcttttccgccagtcatctccaccaccgaacttcttcgagaatatcatggagatcttagaaaatgctctgtctcgtgcgtcagatgctgccgaggctcttgaaggagtcacccaagaatgcaccggcttaggattctccggagacggcgtggacgatgtgatagccgacatgcggaaccacttccgctcagctcgcctcgagcttgagcgtgcgctacctggtgagactgccaacgttagccttgacgacggcaaggcaaccttaggtgcgctggtgaggcgcgttgagtcactggcaaaagatctagggacggagcggcattatcataacggctctctgggccgggaaagggctctcagagggcaatttgacgccttattacaccgatatgagacagctgcaagcaaaattgacagtcttgaggagtcgatcgcatcttctgcaagcgatatgctccacacgcggatgcgaatgcaagaactcgaacgcgaagggcaggaacaggccgttgggattgacagattaagttcagcccttgacaagtacaatcatgaagtgaagggcctcgaaggtcttatcgacaatcttgaaaaggagaacacagctacaaaggaggactacgcccggcagatatctaagctcaaggagcaagtggcccatgaacgttcaaagcgctgttcggcggaggctacggcttctgagtccgagtcccgtattcgagaattagagaaaacagtcgagcacaatcgcattcgcgcttgcgacttgatggctcaggtggagcttttcgaaaaggaacatcaaaaagccatcgagagccttgagcaaaatgccagtgagcgtcaaacacatgaggcagagacagggactctcaatgttcgcatctcagacctcaccacatcattgcatgctgccaagtgtgaactgcagcgtcttcagaatatcaacaccggcctcgaagaacagctccagctagaagtcgaagctcggaatgagctcctagataagtgggccgcagagcaagtgcgatcgttcgcccacatgaaggagaccatcaactcagaacgtcgcaaagccaaagttcgcacggccaattgggaattgaagtcggacgatctcatgtcagatggcactacagtgggcggtgggagtgaaccaatcactccggttagcgcccgatttgttgatatcgaagttggccgtggcaaggataggcgacgtatggatattgtcaggatatcggccgagggactggaggatggcatttcgggtgtcggcagcgatatcggatttgatgttaccgccggtgatttggcttaatttttgtatacgacctcgattatttatttatttacatgtttgttttgggtctcttcaatttctccaatttcttcaactttcttgatttccttcgaatgatatccttcgaattatcttcatcttatcttcatccaagcctgcagatgtcatacataatagccaagtctttccaaggttttggttttgcggggatcgtctatgcccctgtcagggacaacccggagatacgattgttggacggctgatatgtggagcttcaccccctctcttcggagctgatcttatccaaaaagaatggaaccgttacgatgctaagttgcatttaatatatacaacagcaataatctcaacaatctcaacagtctcgagataacaggaagcgaactcctatatatttgcaggctgggaagcccccaaaatattcctcatgcctcctcataccattcaaacttcacgatgagactcaagctttcagccatttccctcattgcaagctgcggctcgctgtgcagtgccacagaccgtgtcctcaagcatggctctcctgaatcagtgggacttcttgccgagcctctcaaggagatgccgctcaacttgagccagtacactgttgctgccaattatggagcattcacctacgatttggttcaccccgtccagccgggaggctccgttgtcgtcggtcacaaggccaccattgtgagctccttcgctttcggccatacgaacatgtatgcagactccaatggcacattgctccctcacgcaaagtggaccccgaaccacatcgacaccatctacgatatggccagtctgactaaagtgttcactgcggtggccgcattgcgcgccattgacgagggcaagctcagcttgtacagaaccgttgcctcctatatccccgagttcgcgaccaatggaaaggaaaacatcactatcctgatgctggtgacccacacaagtggcttccctcctgaccctctgcccggtctgtatgatccatcttacacgaccatgcagcagcgtgtcaatgccgtcctcgagcaagccctccaggatgctcctggatctacctacacctactctgacttgaacttcatgaacctgcgcttcgtgttggagaaggtcaccggtaaaccattcgatgagtatgtcaatgagtacaccagcgagctcggcatgaccagcaccttcttcaacaagggaaacaaccagtccccttcattccattactactcgcgcatggcaccgactgagtaccagatcgaagttctgggagacgacgagcccaagcgtcctcagcccgtgcgtggaaccgtgcacgacgagaatgcctggtctcttaacggtgtgagcggacacgccggtctcttctcgaccgccggtgacgtggcaatcctctgccagatgatcctcaacaacggtacctatggcggcaagcggatcctgaagccggagactgtcgacttgatgttccacaacttcaacaccaaattccctggtgatgagcacagtgtcggcttcgagctcaaccagaactacttctccggacccatggccaatatgcttgctggaggccacactggctttactggtaccacgcttgttgttgatcgcgcatcggacaccttcatggtcatgatggcccaccgtgtgtatcccagccgtacctggtcgagtaacaacattgttcgggaggcggtaggctattgggtcgcccgtgcgcttggtcgggatgttgccttcccttgattttttgtgagatgaaaattatctaagttgactggaacctactgtaaatcacaaagggggaagaggaggaaaacttgtgtatagttaaatcgtgtgtttagaataatatgctcaatgactatttgtcctaaacattaaaatcaaatggtatatctctcggtgcgtaaagcacaataaactcccaaacaaacaaacaaacaaactaagcaaattgcaaagcctactcgctagccatagctttgggctgaggctcaatgtgctgcttgtgcccaggtcgagcaaaaatagccccaaagagattgaaaaagttattacagcgaagtaacatgcaatagaacaaggtgacccccgtaaccataatctcctcttgtgcagctctgtcatctgccttggggccaacaaactcaatcttgccaaggttggtgataccccagacgttggcagtgaattttgccacgggcatctgctgctcatccacacagataaagtcccaggtcttgaacccggtatcactggtccatgtcattgtgactggggtttcagtgtcggagaagttgagtgagcggtgggtgtacaccgtccgccagcgtttctgggctagaaggtgggccttctgtccgcgtagttcgtagtcggcgttgatagagaccgcgttcagcttgccactgccgatgacttcgttctcgggggcttttttgaaaaccatgttggctgtgagactgaatggggaataatggatggtgtataaggggtctgttccggtgttggcgtcggagataatggccttccacttcttccatgtaaagcttactgtaaaagcagcgctcttggagagactctgggtgtcttggggaatattggatgaagacattttgtctgagtcgactggattcttagaagtagaagaggttaggatgggttgatggatatcggttgaagccatagattttgtttaacaaaagttgatgtttgggtttttattgatcttgtctttgatctggaatgaattaatcctttagaggggagatttcgaccatacttatataactcgtctcatctggtgcccagaggcgcagagtcttggcatctccactcatttaggtatatcgcactaacctctttgggtgccatgtaccgctccagccaatcaactttgagcttggggattctccgggggccgtgatgtcattccaacttgagatttgggggccagctgggcaggggctgagtgtctgcatctgcaaagtacaaagtacttagactaacaaatagaaatacttgtgaagatcgtaatgtcccttgtacagcgcaatgttggctgcttcaaacagttctcctcatttggggaagatgcatgctatcttacctagatcaatccacttgaataccttggaacaattagtagacctgactgatagtgttaccaagtattacccatagctcttcggagccagagaaatagctggctattgttatctatgtaggcgtagttgtaatgagaacgcagttatcaatatttacttggttgtctttgagaacgatgacgttgtcgggcgtcaagcatataaaattaacttcattggccacacttcaaataaactttcttcaacagcttgttaaaccgtggaattttcttcgaggaagtcttatcaacacacttgactacgcaccccaaacatggttagccaggacaccaatgcacacaagttccgcttgaaggtaacggcaggcgcagactacgaccgcaagactcatcaattggtacctgtaaatggcgagacaatccgaatcgaaaacgagcatgctattgtgagtctctgcgtacggatcaagaactacacaggtaatacccctactctcatctattcggtcaaagagcggagctcatcggtcaaacaggctatcctgagagttcaccttccacaagcccatactttgacgatcccctgcaccaaaaagacctatattccatatgcttctcaattatcttcaaagagccggtgaacggcaacaacctttacttcggcaatgacttcgatcaccctgtccgcgacttcctacctccgggattcaacacagcactacggattgtcaagtggaccctcgaccctggcctagacggcgatgtctacgctgataagccgtatctgtacagcccggcattggcatcgtgggaccagttccgcattggagataaggtgcggaaatccgacgaggtgccaaagctcgatgatgagattattgaggagggcgcttatagcaaagatgctgccagtgtgcgtcacaaatttaacatccctgatacagtcgagggacgcagaaagtatttccaggacgaggcgaataggaaggagtttgaatttgaacctgggaggatgtatgttgctgatttcggaaatccttatttggcattcgaaggttagtgagatgcagatttgctcttttgattgggatcatcgactcactgatcatattagacttctctgtccgtcttcctggatttgatctacctatcatgaagtacgtggatgagaagaaccatgagctgcggtatacgctcaaggatatttcaaccggacgcgtgtatcttactgtattgttctcggtggtcctacgcggaacggaagacgagcaagaccatagtaagagtgagcaacgtgacgacagtctagggaagtttgactgggagccggagccatcatctggcgatgtcgagtgattttctcgatttagcagggtatgctgtagttgcatgcaagaaaaaacagtaaattcgtctcaagtatcatgcaaactttgaattatatacagatttactttttacagtctcttcaggacatcctccaaaacctgctgagtggtagcctttccacccatatcgggggtcaggaactgagcagcatccaggttaccatcgacagcagcgtagatctgggcagcagccttctcctcgcccaagaactcgagcatcagagcaacactgcggatagtagcaatggggttggagatacccttgccctcaatgtcaggggcactgccgtggcagggctcgccggtgggggannnnnnnnnnnnnnnnnnnnnnnnnnnnnnnnnnnnnnnnnnnnnnnnnnnnnnnnnnnnnnnnnnnnnnnnnnnnnnnnnnnnnnnnnnnnnnnnnnnnnnnnnnnnnnnnnnnnnnnnnnnnnnnnnnnnnnnnnnnnnnnnnnnnnnnnnnnnnnnnagggctcgccgatggcgaagccatcaccaacgttggcactggggacgagacccaagctgccaacaagggcagcagcaccgtcggagaggatgtcaccgtagaggttaggggcgacaatgacatcgtagaactcgggctggcggaagagcttgtagaccatggagtcgacaatctgctcctcaacgaagatggaggagaacttctcggcggcgagagcacggcgcgcggtctcacggaagagaccgtcagtctgcgagagcacgttcgacttgtgggtgatagtgaccatgggctgggcacgggtagaggtggcggcagccgcgcggatgctctggcggcggagtgcaatctcaccggcgatgttggcgatgcggaacgaggcatgctcggaaatacgcttgatagcctcggcaaccttgccgttaggggtatcgatggtgcgctcttccttcacgtacaagtcctcggtattctcgcggacgatgaccaagtcaatgggcttgccgttgctgttgccggcagtagtcttgacagggcggacgttggcatacaggtcgagcttcttgcggagagccacaatgggcgacgagtagccggcgaccttggtgctaggggagctttgggttggtagcaattgtcagccggaattgcgcatgctgaaagaatgatatcgtagcttacctgacagcaccaaagagagcaccgtcacactccttcttcaaggtatcgacagtcttgtcgggcagagcggttccagtcttctggaaggtttcgtatccagcatcgaggtcgacgaagctgaacttgaggttcagggacgcggggagagactcaaggatccgacggccggcctatattccatcaagcaactccagtcagtgaatcgcctcgcatatcagatcttgagtgttacccaccgggatgacctcgcgtccgataccgtctccggggatgagacctataatattccgatcatgtcagtcaattgccgagccacgagatcgcaaaacaagggcgatcgtaccaatgcgaagtgtccgggcagcagccattttgatagacttttttgcagagttgctttcttgaaatcgacaatcgccgtcatcggagcttttgattttgtatacggctcggattattgttgatccgatatactccggagaaccccatacgaagtgctttagagactcggctctctagctcacattcaataaaatgctggcgatggaacaagatcaaaaagtaatgtgtgtctgcttgaatattgagttcaagaggaaatgatgcagtcacctgggaaaccatcccaaggttgcatggatatgcgttcggactacccaaacgggtgacatctcgcgaaattgaatatggacaatatcttcggaggttctttgatggcttcgccgaactttaaactatccattttcatcgtgctgctcaatcttggcaggtattatcaacgctaaacccaaatgggtcacttacgatgtaatgaacatacccctcatcttctccaagcgcccggacaagccgaacagttgatgaagagttcgcgtcaatcgggggtagtgtaagcccaatgacactgtgcaacgaggcatatgcaagcacagaggccaagtcgcgaggtctaaatattagaataatcatgacgttctgcaatgcagaccattcagcgattaaactgaatagaacagatactacacttgatctaagccagaggcaaagagagctgaagaagaaagaaaagaagaggaagttctgggggcagggtcaccttatatgtatcctgagggcggtcggtttatgccactatttacaaatgagacaaacaacgacatatgctcgcttaattaaatatgtaagtggtaacgtgatgatcaagacaatcactgttgatatcaattagatggctggacataccataggcgaggatatctctttgatatgttacttattggcagtgcacaggcacacgatgtgacctaattagtcacttataaattgaaccccactctcagagtaaatattcaaagcagtgcagatggcacttagtttctcagattgtattcgatttcgatcccgtgcttcatcacccaaacttattgtcaactctttcttcgactccaggactcagtatggcattcaatcttatgtcccattcgttggattcgccaatctcaaccgggaaacggaatattgccatcgcagaaattgtcatttattcccttatgcaggcgatactggcaccataacaagaacaagagtattggacgctgtgtgttctattcttggtgaagtatggttggtctgctgtcacagagtaagtggaagacgtcccaactatttcaaaaatatggccattgaacttatttatagttcgcatagcgggctcagccttggttcttgctaactcacacccggagaagctaatgctcattgctgattcaattttgcaaagtacgggcctttcacccctacgagggcttgttattaaagctgttgatatagtgtttacttgtcgtgatggtccctaaaagccctcgtacacccgtcttgtttgaagttagcttggttctattgcgatatttcataagcctggacctcgcttttcttctgggaaaagactgaatatactggcaatatttgtctgagtagtggacaaaatggaccaagttgacccggtttgctctttgctctgtatttcttccgtttcccgagttttatcgccatcatgctagcagtggtgggtattttagcatggatacaacccactcaccttcactcgtttaacactgagcagccattgctccgagcacgccgacaattatgaatcataggttcatattaatccaaagaagccaagagagttggagaagactcatatacaacataggatctggtacccgtcacgtgctcccatcggacatgccccgagatcctctcattcgccaaaaggaaggtggttgcacttctattattggccttttctcttgaactaagatcaatgcattattgtgatgtacatgatcgatctatctttcaacgttaattgggagactgtatttcttggctatgctattataccttcatataagttcaatattcctctaaagccgggtatactgcaacacacctggacatgccttggctaatgtatacctcgacacatggagatactggaactatttcgtgaataggagcaaattaggaaaatagtgcatattctgcctcaggcacactatgccccttactcaagatgaatatccacttgtaaaggtgttcagatatcgtggcatgtttcagacctcacagggggtccctgtctccgtacttcatactccgtacagcaaattaatgtactcagacccccagaggatgaaatcacctgtcacatagaaatgaaagcccctgagacagggagttatgtatggagtaaggcgttggcctattggatgcgctagcctgaactagcgcgtatgtatgtaatagtttttggatcggcccttcttcacaccttgtacctcttgtccttttgtctcataccaattctctatccgactttgacgcgttgaacccgaaccctcctgggaacatgcagtggtatctgcctgtatccgattagtcgtcacaacaatcccgtttcgacctgatttcaggagcacccctgtgctccgcatacgcgttttcagattcccctcgatttgcatacccgcccttgttcgactgacgtacgctcaataatgtccgataacaatccccatcaccctggcgtgcgcagcttgttagccaagtttgaaggtcaaagccccatcgcctccccgcctctccgtggccgatccccaacttcctcagactcgtcagcaacagttcggcagctgtccaaggtccgggctagctttatcactgtggagggggtcattcagtcgaatccttcttcgccgttgaggaaaacaaatgcgcgcagcgacagtcctggaatgtttggaccgaaaatcaactcggcggatgcggagtcgggacagcagggcatgatctcccccaccgcactcagtcgcctgaaccacacagagaacgcgactctggaacagataatggctgagagtcgaccggcggagtctattgaaaccaagcgtgaacggaatcggactgccaaggaggaacccgcggcgcgcaccgagactgaagttcggtcgcgaaccagcccgcgaaagcagacaggggggtcaacctccgcaggttccaagtcaccaagctccgatactccgtcgcaaaagtcagattcatcagtagtgattaagaggaagccttcttccgttgggtctgcccgcaatgcagccagaaagtccgtgtcaactactgcagcttcaactggtgcgaaggctgcttctcaccatgcaagccccaagcccacagctcgggaagtggctaaagagcgcgccaactctctcgcccacaagcccagtcgtgtctcactgaatcccaagccaacaacagcacggtcaacccgcggctcagcaccggcacaagatacttcaaagcctcatgccgcaggtgtatccagcaagccagtatccaaatccccatcgaaacctgcgcgtgtacccggctcgatgaatacgtcaacacgcgcgtccaccgctaagccaggaagcacagcggctccgagcgctcgcactactaccagtgcatcaaccctcacaagaaaaccttcaactctcaaaggcgcagctaaggttcagtcgcgtgccactactcctagtgccagcgttcacagacaaacttctcgcccttcgttgtccgctcaagcagctagtgatacaagccccaaacatgtcaatgagggtttccttgcgagaatgatgcggcctactgctagctctgcgaacaagacccatccccaggaaaagaccgatgcaaagcctatcgccaggacaacctctgtttccaggtcccccaaggcgtcgtctgggagggtgccagatcgtggcgtccaccaagtgaagcctaagaccaccgcccttcgatctcagagtcagaaatcccaggctctgaacaaggagactgcgccaccgaaagatggacagaaaccttctcaaaagaaacaggagattgagaaagagaacattgtggaacctgaaaccgtgaacctcgctgcgattgcggctgtggagactgcttcccctgctcaggttgaggagacagtgaccgagagttcctctcccatcccagttgaaaatgctactgaggtgccggccgaggtcgatgctcccgttgaggcccatattgagcccatcgctgaggatgctgaggaggataaggctgctgaaaccaccactacaaccgaagagattgcagcagagcccgtggcaatcccaacggctgaggatcaagtgaagatcggcgagaagcaagaatccatgatttccgagccagagctccaaatcgaggctcccgaaaaagaagatgatgcgccagtgaaggaatttactgtccctgaagctttaacggaggtcgccgagctcaagtccactgatgagcctgcaactgaggctgaatcgagcaatgtcgccatcgatattgccaatctggcattgaactagacgctctgaatccgaactgcactgcgttcatctcaaatggatttcgctggtccatctccgcttctggtaaagtcttggaataaccttttaatcttctccgataatactcctccccattgtcttctatctcaccaagcgtgagcccctttccattcgtcgaggcttgccctcaaccttttcaccatctattcttccctgtctatctcttactctatgctagcattttcacatctatcagtgttttgggttgtcttgttatcgtttgtttatctcttgcatactctgtaccaatttcttgagcatattattcttagcgcttaggggcattatccaatttagcatcttgatttatcaatctagcggggctcaaagctttcatactaccattttgacggttcttatttagtcgcttcattttctcatcaaattgagaagctagatgatattcccacagtactgctcaacagctggcctagtaataacaagcactcaattgaccttgaccagcagagatctcttgaaaaataaagatgcagattctcaaactcccaattaaataaaaggctcaaagcttcctctcaagtttcttcaggaacctattcacaccaccttccaaccgctctgccctgtcctccaatttcctcggccgctgtccaggattcttcatggccttctgtgcatatttctgatagtgagagttagcctccacttcagtgggtctgtataattggttatggatatcatattcggagccgaaacgctggtgttgttgttgttgctgctgctgctgcgcctgagtctggtcataggaatgatgcgagaacccgcctatcggcaccgtcggtccagcctgatattgaggcggcgactgggcttgggcagccccatagacgtgttggtcatagagatgggcattcgggtcctgcggcggcggagcgaaggacatggaaccttggcggctggaactgtactgttgagctccctgtccgccaatgaacgacggcgagtatgaaggcacaggcattcccgggctggagctggcggtggagaaagagtttgaatgctgtcccacactgggcggaggtgaggcgaatgatggagggcctgcgtattgcaaccccggggttgaggggggcggggacgcgaatccgcccacgactcctgcgccccccatcatttggtgcgggggcgtatatggcatgccgctgtcggctgccactgcggctgcgaggccggtgccgctcatcccgtcctctggcggcggggtcttctcgcggtgttggattggctctggggcagctggggcggctggattgtatgggagcggggcaaagctagctggttctttcctttcctccgcgggagtagaaccagcgcttagttgttgatcaactggaggtccgcttggaggaggtgggggaaagctgatggtctgtgggagggcttgtgtcactgatgccgctgtgcttgtaggctcggatcgtgagttgcgtgtttgaccattctggtaggcagggtcggagactgcaacggtttcaagttgctggactacagagctcatagtttgctgtggcagcggttctggctctcggtctgtctcgacctggtcactggatagaagccggatgacagtgtccagaaagtcggttgaatcttcttcggtccagaagtagatatccaatgtatgtaggcgagggaaatcgcggacatctttgggcttatcgcgtgggtctccactaggcagacgccactcatgttgaagggtatcttgtccatattgctgttggggcaagggggtgtgagtatcaaccgttaatgtacaaagtgtcgggaattgagcagaatgtcgtatatgaacattgttcaagcccccacagaatgcatcctgttctggagatccaggattattggcaatttcaacccgggacttgttctgagaagcatcatggtaaatataaacataggagcctttatcaaaacggtggtgatatggtgaaggtcttcgggttggctcagtgaaatagtagtggatatccgcaaaactatctccgccgttagacacaatccgagaactgcttcatatcgatctgcggggaagtcagttcaactcacacagtcacaaggcgctcttcgcccgccgatggtggcatgtctgacaattcaaagtatggaatgcaagtatacaacgagagcagcaagtagttgggggaaaagaaaaagagggacttacctttattatttataccttggactgaggggtactcaacctgtgaaacgccagcatcaaccgccatgcaagttgggcgcttagaagatgagtgtgatgtgatgtgataggacggtacttgtacttggctatcacatctatccgctgtgggcgagaaagtaccggtacctggacaagaccgcgacccggaagtaccttttatccgaaaatttccatcccaaatcatcgcatcttcaatcggcgctacaaccacctcctgccgtgtctttgcttccccagacaattgcagtccattgtggtccttttcggtcttccctttcgtgttatctgggatctccgttcttcttctcttccgaaattgttcaattccaccactctctttcctctccgaacggccgccggtagagcttaattgctgccgtcgcgaaatcaagatgtcgctcgtcaacctttctgctgtctgctcccacctgaacaatgctaccaaggcccgtctcgccctcacctctatccccaacagcaacctccacctgaagctctccctcgccctccaaaactccggctacatctcctcggtagcccgcggaggcccgactcctcctccagcccatggcatcctcggtttccctgcagtcaacgatgaggtcgaaggcattgagactataacgcgtgataatgtcgcatcaaggcggctgtggctaggcctgaagtactggcaaaacgagtcagtcctgggcaagatacagatggtcagcaagcccacccgacgggtgaacattgatgtggagggactgcgccgagttgtgcgtggtgagcaatccgggtttgtggccggacttcgctcgccgggtgagagtctgtacctctctacagaccgagggattctagaagctcgcgagtgtgttgagaaaaagcttggtgggctggttttgtgccgtgtgctataagtttgtgattgtcctagtggctaatctctgatttgggggagctacccaccggggagatttgtttctcttcttgcatttactttggagtttgttggttagtcgcagcgctttctcttttcgagattagtctttttgtgactgttgggataatacctgggtcaaggatctgtatattagatgtctgcgtatctcgcattctgtgtgctctgctggtgattttgcagctgtcctcaatgtgacacagtgtatagattatgacttgaaatatgtccgtactccccatggatgtgcttactacaatagagtcgtaatccttctcaggctgattttacagttatactcatgttcccaatatcccaggaatgatatagtgtattaaaggccatgaccaaatcataggcaagaatagaccgccacttgtgcggtctctgttcttcacaatgtaattcaataatcaagtcttatggcaaaagcatccaaagtatgaatatcgacttcactttctattgaatcctgttagaattccgggtctctcgcaagtgtttcgagtctaccggagctttttttttcggcctacaaacactcccaatggtgatccgtccgtctcttgggtaatttacgttcttcgacaattttcatcctttatctcatctcatcttggtcttgtcctctcatgaaggctttgtccccctgacttcagtgatcgggcaaagaactatcaaccatggctaaaccccaaagtgttaaacgcgcgcgatccaatactattggcgatgcccacaacacaacaacgccatcatgggaagaaatctcccagcgcgtccagactctcgacgaacagagtatcgccaatattctcgtatacgcagcgcaaatccatcctgatatcatgaacatggtggaccacgccattcatgtaacccgggagagagagagaaataccatcatcaacttcgacgaggattcgagataagtctggcaactgattaaaatcacacatcgctacgagcgcagttcaaagcagtacgaaatagcgggcgatgtcgttgaggaagtcgtcgataccattgaatcaattgcggaagagtgtggaccttctgtaaacccacagacacgattcaatggactctccgtactgcgcaaaattggcaagacgattgcgctttctaccaatgatacactaggccgtgaggtacaggaatcgttccaatctgatagctctcttgtggatgcgatgataaaaatcatcaattctatgacagcggatgaagtccgagcgatcagagaggataactcaagtccaacagcattgtggccaaaattacaggaattggaaaagctggccgagaccgaatgcattcatcctggactagaagaagtgttggatctattgtatccgatttgaggatgaagaagaaatggatgaagaggaagaggaaggagaagacgaggacgatgataggaaggagttggacacagaggagggtgatgtctatcaagtgccatgagaggcatctttggaattgacctagatcattgttcaggcatcaagaatatcagaacggactttaaatatgaaagaactaaacacaaatctccgaccatttcagttgcttctctagcatcatgtccaatatcatttgaggtgttcttaaggtgatacggtactgttttatgtcgtatgtagttgtgatgtcgcacagttttggcaatccaaatttcgagtttcccccacaccaaagcctctcaaagcttctcatattctcatcctcaacttccaaaatgactgacacagcgaggaaagtcctgatatctggtggcacgggttttgtaggctcggccgtggtacgggctcttgcagaaaaatacccaaactttatcatcgccgtcatcgaccaaaaccctccacgagccgagcacgtcctgccagaaataactacgtggattcaggtggatattacttcaactgaaacattgagcaaagcatttgaggctgtgaagccagatatcgttatccacactgctggagtcgtcccagatctggccgaacggtttggtcgccgactagaacaggaggtatggaagatcaactttgaaggcacacggaatattctggatatatccaagcacagcggggttgaagtattcatatacacgagcagttgctgtgtggtgatcgacgatacgcgtaccgctcatcctaacatcaatgaagaatggccctcggcatttaggtcaaccatttatggagagtccaaggttggaactaccaatcccatcagcaagattcacggcatcgatatgagatatataactaacacgatttgggatggtcactaggctgctgcagaagcactcgttctaaatgcctcaagcagtaaaatggtgacatgtgccctccggccatcggtactatgcggaccaggagactaccagctattaccagctattcacgcatgtatcgccaaatacgaaaccccttttttgatcggagatggcttcaacctatgggatatcacccatgtcgacaatgccgccgatgctcatatcctagccatagagaatctgctatcatctcgcacggctgcaggcgaggcatttttcattcagaataacgaacctatcgcctttcgtgatttttgtctggcaatttgggcgcattttgggcatgtccctccttttcaaatgcatatccctaagagtctggcttacttcaccgggttggtgtgtgagactgtcacctggttgacgggaacaacgacaactttgagccgtggaagtgtacaagatgcatgcgccattcgatatgccagtggcaacaaagccaaggagattctggggtacgaggcgcgcataggtatcgaggaagccatccgtttgagttgcgaggtaagtaaacaccaagcgtaaccttttctattgccgtactcaccaaagcaatttaggattatgcttctcgtctcgggttcgaattgcctcctcaatagtaaaaatcgaaaaaaaaaacagtaacgtccatgttgatggataatcacatatagtttccggatcaccggcaaatgactagggttaaggacatcctgaaaatacttcgctcattatgattttctggggcttgagaggcgttccttggcttgaatgatctcatcatatctccttttgccgtccagggttttgttgataacaaattctagacattctcgaccttggaagatggacattgatacgaaggatgaggttatcactattgggatcagatctgttgcgacgtcgacagattagaaatgactaggggcatcactgtacccaagcttaacttgtcttcattgaaggtgcctcaacctgcacggtcagcggaaatgatttgtgggacgcgtatcagaatattcgcgatatcgggggctgcaagaagtgcggctcgtttgagaggagtgacggatgtacacttaagattgactatgtttatggatgtgatcaccatacttctaagatggcggttatgaatctcatggaggcaccgaactctactcagagtgtgtctatcgatcagcttggacctggggtggtgtatgggagctagtttgagagttttttcagtattttattgagatgaaaagtaatatgattcatagactgaacctcagacgaatagatcttgctgtgaaactgttctactattaaccctgttcgaccacgatgctattactaattgattcagctctctgaagcacatgagaccatcactaatgtatatttttatgattctctcccccgtcatctgaatcactatctcccaggaatcccaccgggcgtaactgcaattcctacgaagagaataccgaacaaaaattcaaagtatgatctcagttgtttttggctcactagctgttgggaaaatgagatttagtatattttatgtagaagtagccacccaataacgtactcagcatttcaggctcatcatgtcgtatcctggtagcagcgcgtgacgattaaaacaaaagcataatatatttgctgcttcatctcttcatccaacaaaaaataagggttgttgagtgcgatgtggcgttttctctttgttttcaccaacctggaacctaccgacactcgtcgcggactcgtctgggcgtcttgttgggctgcaagggtagatcgcatgccatcggaacagctgagctctccacaattggaaaatccggtatctaacttcgtctctgtttcacccggatcttcagaagagtccccagaagggcgagagacatggcccatgcggcttattgcattgggcctcaaaaagcccgagtgcccaacccagattaactgcgcgcgtcaggatttccatttgctacctcgagtcatattttcatttcttccaggaccttcgcgggtgcagatcgcctctatctgcacatttgggtatccataggtcgatgtccaattccagaacccctgtccttgcatttcctacccaacatcagctttgctgcccgaggcattgccccaatacaattctcgaacagatgttggtgcggcacccggcagatactagtgcttctcccttgatccatgaagatcgagactttcgatggaatgtttaccgtccgcattcatgtcatgcacccacagaggcgtctcacggcggctgccaacgagctttacacaccggtcttattcttaatcgatcgagatcttcaaatgtacacagtacggatagttcatgtgttacgcaattgggtttcttgaaatcgacaatgtgcaggcaacacaggcctcatctccatattttgtctccactaacgccactggcgtaaagtcctctagcgcggctctgaatccagttatactgccgttgcatacatccgggtgggctctgatcccctttgtcaggcacacttatcgatttgtccaacccgggaaaagtgcctctaaaaaaaaaaggaactataatatacctcccctttgctcgttggtgaattcatcgagaactctctcgatagatattttcttttcctcgctactcttctgaatcttattctcacttgttatattaggctgtggtactactacggtcttacttccttcatgcttcctgtccttcctcatccattggcggctggaccaggctatccattctcagcaagtctcggttcttgtgcaagctctatcaactctaaatttgatactcggtctctccataggttagcagaatcagcatcgcttctcgatttccgtgccaaaactctttggaatccgaaactcatactccgtagcagcaccatggctcagcaccctatgtatggaaacccagcaaccaccccgctggtctatcaacaaaggtattgtttggccgtcgttcattccattgcaaattcctcccaggctgtcatcgacaagaactgatttcgttccttttgctaagcggcgaaaggtcaccatctactccccacgggtatggctacagagacgaccgtcaagtgcctttcggtccaatggattctaaccgtcaggcccattaccatggaggcccagtccttccggatggccacaacctcatgatgagcccacctgcggcacgtttatcctaccccccagctggaccggtccacgtacaacccaggactcatgaatggagccacccaaaccagatgcctcgggaatccccgaggcgggaccttggaacaatgagcgccccggaaaccccggagtatatcatggaaagaaacagccagcggaccggcgagagatccagaggaagcccacactatcattcccagagacggacatccaaccgggatgaatttgatggcccgcatcagttcctggagccgccttctccacaggctgtcgcagcccaggataaagagctgccccagctccctactaacctcgatgccggcgagcaagacagcatcctccacaaggtcaacgaccgcctgtcccagtgtgcctatgacttcatcgcaaaataccagttccgtgttcccatcgagcaggacaagagacccgtcaaggtcccctcggaccgcgagtggaccgagtgggtatacctcttgaagcggctggctaccacacgccgcatccccgctcatctcttgtacaaccgccaaattaagcagctcatcactgtcctggagaactccctggagatgcgccatgctgccaagcaccagtctaggccagtcaaggacgaccgcaacgtgctgcagctcatttcggcggggactcaggtcgcgaaaatccttagggattctagcgccatgcagtatctcgatagtctttatgtggacaccgagaaattgatcctagaccgacgcggccgtcgtgtaagattcgcaaacacttgaatccactggaaaatggccgtttttaaaccctccgcttggattccactgttcactttttgttgtcttcccgtggaagcccattggattgtccttttcttttctctgctttccttttttccaagtccaatttcggaatactccactgtcaagttttgaacccccttggaggggaagtcttggtgatttcctatcaggacaaaaagagcccaagcagctacccagctcagacgaaggaaggattgaaactcaaccccttcaggctggaaaacgatcgaccagatcgccgcatgtcagaatgtttacatctgccccggaattatgtgacagccagtacaaatgagatcagtaatagggtggctttgtttgttttttcagtttggttcctactttcattccggcgtttgggttggttgtcttgatatgtttttatacttcatgcttcatgcttcatatgtttcccttatgccacacgactatgccgtacgactatgtcatgatttgggggtttttttgttgtacgcagtacgagattatgtttgtgatttacgttgtctacaatttgattcgcttgggtggtccagttctgtttttccctctgctaatattccatacgttccaggttttgggctgcattgttcctccacaagtatagtctcatggctctactgggctgtatgtactacagcttcacccaattgactcggacttttgaagaaagggccaaaaagaaaagacaaaaaatagtttccctgggaatcgaacccagaacctttccggaacacttgcgaatcgcatttgttaacggaaaatcataaccgctagaccaggaaactgctcggccacttgggccaattgatgaatggacaggccattattggcctcatgagtctacaactttgttcccaattatttaggtccggagtaacagaacgaacttgtttcgccaaccttccaacattcgaaagtgggcaatactcaatccacagcggcgagactctcaatggttcttaatacaacggagtattctgctctgcataggaaccatctagacccaatatgaatcgaggatacattttcacttatgaataccgtatgctgccgagcgcatattcgaagctcaaaactacagtaacctgaagcttaggagtatttaccaggtcttgaaactacagtctaccccttgtggcttagatatatgtggctgaacccgggtaaccctatgtcaatacctagtcggccattgcctatttaggtaacaaaaaaatgactacggagtatgccattcgctatattccgcgtatctatggcttatcaaggaatgtcagtcacagccatctttggctttatgaactagattgagtgatataatacaaattattcaacataaaataatcactcgccccttcgagctgttttgtgttgtcttattggcttattgcttcctaccgctcgcgggtacagtgattttctgcctggcaatattgatcaatagtattaagtcacccatggcggctgccgtacctaacttaacttgtagacaagccctgaaagttagaatgtcaaccttcccccatactcaacctctctactacagaccagatattactaggactacggccttttccaaaattttcaaataccactgcatacagatatcgaatgtaccatgttctacttatgaacacgctactaattaggctttgcgtcgtagtgtcgtgtaggtttcttgtggtgccatgagtatgattctaatataataaccttgctgatctttttttatcagaacggcattatgaattgtacaagtaattattatctagggatgacataatatagccacaggagccttggtagctgtatataaacaatatatgtcatgttacgttttccatggatgagaaatgagcttttgatgggacgtattaattgcaaataaatttgtgagatccagtatctaaattaaattcgtgtgtgaaagcgaccgttacggaccatgcctcactagttattgtcagtctgctgcacagagtcaggctcagcagggtagacttggtcaagaatgccacatgggcgcttgaggttctctagccaatgcccttgctgcttcgccagagcatctgccactgctaactcgtggtttgcgtgagcctgcctgttatactgtttagccctctcattcggggttacgtcactgacccagggccctaggtagttagctcccgatgccccatataggtaataaccttagaaaggaagttctgacaaatctcccccaacatcatcccgaggtccatcctgcctagaacttccactggacactttgcgtacccgttccttcttctattttgtctggtcgatcaactttcgcgtgttgcattttcaaaatggcctctcagccgggactcacgaatatggaagccacgatgggctctcgtaaacccacgtcgactcgccccaaactcgatgaaaccctacctacttctcattcccctcaacgcaccgacagcccatcaaccagacttgaaggcaccaaagtgtcgcctgtcaagcttctcactacctcccgagcaggcatgccattccataaaacagcgcccacccttcaatatacaaaccgtcgccgcgacgctgcttctgactcgagctctgactcggggcattttttcaagaccatcaccacacactcaacggttccgtcggagctctattcacgcgatcttgatcactcctactgcgttgatctcgacgacttttctgttccactagacgcgagagtcctcagtgctccatcgttccgacagcttcaagccgcactaagccaggtaagatcaactttccagccccaatcccccgtcgtcccagttcctatatctgcaagacaccggaaaaaaactattctccaaaattaaagaagacgaagagctctttcccggtatacgactgaaaatctcatatcttcgccacgaagtactgtttaaaataatacccggccatcagcacgattcaatcattggcggtttctctcaagccctattgatccagctattcataataggcctttcctatgacaatggggcgttcgtatcccgcccatcgccaagaacccaaggaatgtctgtggctaaggagcctgactggtggctctccccagccgatatctttgatgggtgggggggcgggattccctaccctagcccttgaagtcggcgtatcagaatcctactcccagctatgcaaggacgcccagtggtggtatagcaacttcactactactcgcaaacctacatggtgagtagacgtggaggtatggtccgaaggaccttccccaaatccgtataagacccggagtcacattaatacccctttccgaccaacgtagagagttacgtaccaagatgggcaaatccatggtacacctttggtgctcaacttcgaaagtatcttccgcagaccccgaaatcaacacgaaggggatattatcatcggcatgcagtccttagaagctatgtgccaacaagttctttcttaactatctatcccttgatagcgtggctgttgttgctccctgtgtatggagcatcattcttctggttcgagagaaagaaaaatccaacctacctttaacgcctggcagctggccgaagcccttggcgcatcacgacgtttggcggaaagcatctgggtcggtgttgggcaagcggtgattaatggcggtgagctattatccaatgagagagttatgttccgatggcacatttagtcgccccgtactaggtgccgcagcaccggacaatagcaccaaaatcccccgagtgctgcagcacttgtcaaggcctactttgatttcgctattgctatttaggggagacctacggtatatataccaatttttgaaacattggccctatctttttcttttatttagcggcattataccctcgacatttgcattcatgtaacagttgcccgcaactcgacatggaagttttggcacatgggtcatgtttatcttttagattaattcattcatgtccaagtactgcattgttcaaagattataggacgccctggggcggccgacaatcttataactaactagatggccattccaaggtttaaggttcgatgctaatatagtacgagtaattaagaagaggatatatttgaagagtatgaggcatctattcatctatatatttaggacatgaatatcgacatgagattacattcgaagcaacaatcaccaggattgtttctttgccaaatcctgatttgacaacgaaaatgcatattagttcttcccctcggaatcgattaccactctctgagcctccagactactgttgtctgtttgttcctcttcctccgcctcgagctcgtcgacattccaattgccaaacaccgccataagcgtgaaggggactgtagcaccccatagtgcaaatcccagcgccatctggttgatgttggcccagtgggttgtgccgaccgcgtaggcaatcgtgctgccgatggactcccatgatctcaggatgccggttgttcgggcgatatcgccatctctctgcgctcccttgatctcggccatcaaccaataaatgtatgtctgcaacatctcatagaagaaccggaaaaagatatagacggtgaaggccgagttgaagaaggggccatcacccaagtcgaaggcagggggatcggtcatgcgggagagtttcgactcgacgatggcgttccatgtccaagacgctgtgacaaacacagcaacgaatatgtatacaacttgggatctggttcttcgtgacagaaactttgtatcgaggaataagcccgtcactatgttggcgctggcgccgaccacggctgtgaggaaagatgcaagggctctggagcggacggtgaagtaagctaggttttctgtcagcgatgccatttatcatcaagaaaggaggactggagatgtcatactcgtcaaatagtttccctggtaagttgcaccaaactgtccagcgaggaacaccgggatgagtagcagcatgtacttattcgaaagctgcttccagatagcgcgagcctcgatagacatgttcgttttcttcatgtatgggatcttggtgccattctttctgataacgtcttgtggctgagacaacagcaacgcaaatggagcgccgagagatgagatggcaacaaggcccaagtatgttgtgtaggtgaccttgccgacatgcgaagtcttgacattgagagcgagagaaatggcaccgccaacaagcggtcccatctggcggatagacatccagattgccacgtagctaacataaaaaggtcagtcggatacacaactgcatggtccgggagtctcgacttaccgtcctcttttctcctcctctggataaccgactgcaatggcagcctcactagcccatagaagagacgctccaattccacaaagagcggccgcgagcaagagaaaccactcattgccataacgattgttgcagtacagaccagccgcatagggtgtgtagaatgcggctccgatgaacaaggtccatttcgcagtgatcttgttgctgacaccgccagcaaggaaacagccaacggacatgagtccgtatgtcagggcattggcggcattgttcaggtaaggctgcacaatgatatgttagcggtagttgagcagattgtcaacactccgatgacttactttggcatttcctccagctccaagattattgagagcagtccagataccgggttcgcagaaggccactaatcccacgatgacaatctggaatagacatgaccggtaaaagcgggtcacacgttcgagaatcatgatggatgtgagaggtatgcaatccggaaatataccggagacagccactattagtactacatggcgatggggagccaagatcacagaattattttgaacgaaaagaaaacagcacgtcagaacccattataatcgcgatatcttggttttatctctcgccggtagagccccacagctactaggaggataactggtgctcagttgtatactggagacacttgaagaactctgaattagtgtcgaatcggtaatgggaaatacggagtcgtgggagataatcgtcgatatcccgaggttcggaatggtgcaaagtgagccattcgtctccaaaagcacgtaatattggggggcgtgtcgacagggccgggccacaacagacagacttacgagttattttctcttgttgtttgatatgtaccttgtttgaaatatgttgtagtatcttggcaggatgaggtattggaaactccgttataggactttataagagatgttataggctataaaatgtcttggccagtagatcttggggcccgccgacttctctcctatttccttcgaaggactccgtagtcgttaggaattccaaggttaaattagaagcctagaaaatcagacgtttgttttttttttatagttctgttgtagccaaattgccattgtactaacaaatctgcttcaaatcccaagtaccgctaaattacaataatgtacacctaggttaatctaggaatccgagataatcaaaagctagccatctcaatccaactggccacaaatgcgagtcggcgccctcgatcagcagccatacggcgcgagaactcttcaaagttaagtctcgcaccgtgaccacgttccttgttttcacgttccacctggtctaaatagacccaccgagctagggtccggggcgaaggtcggcgtggggcagtgtcacgaggcaggtcattgacccgatgaggaggtgggagtggttgcataggagaaggaggaagcttgggggctgtggcttcggcttctggggaggagcggggagaagatggggcgggaagagagatggtcccgggctggagtcggaaccgatcagggagatcagggtttgtgttcctaattggtgattcctccaagtcggagtctgattcagcaatcacttcctgggtcatcacgaatggctcgtcgggacgatgctgtgggagagttggatcgcagtggagtctttcctcttcaacaaccgggctggatggccccacaccagacgcagaggcagcgatatcatcgccataatcagacgaagtggcggacgttgtggcggattccacaaatggccgtgcttgcccaaatccagtatctcttccgggatcggcgagatgagttggtcgcacgtcgtcatcgtcttcatactcatcctcatcaccctcatctgaaacggtgggccccggcgacggagctagcactggtccggtattctcaggtaccaggactgggctccgaatctggtaaccagcgcgctgtaatagatcatcaagtggctgactgttgataatttcctcgagttcctcctccactgggggattctcagttgtggtgcgtttcgaggggtcctcttttgctgcgagttcaatctcgcgggcccacaacttgcgatcagctctcgtgcgatagacctccatcataaggtcctctttcggcttgaatagaatatctagaagctcgttgaatccctgttgcgtgacttgatataggatttctttcccaacgtccctttcgacctctgggatttcaaagccaccccatcgctcgccaacaggaatactccgggacgaggtggatgggttagatcgaatgtcgtactcatcgtcgttgagatcatcctggaatcgcaccttggacgaggaccgcgaacggaaagagggtgggcgcgataccgattcattaaggtcttcatcatcgctgaagtcatcaatggccggatccctttcataccctgcagggatagtggcgccatcttcttcgtctgtatagaaggcgcggcgcctccaacgttcgtcaattccacgctgacgagcgtcaaacacacgtctctgatcatcttcgcgcattctgtgataaacagcatccgcgacgcgagcccgatcaattggatccgtgatttcccgagcgggaatataggtcccgagagcagaaataatatcttcttcgaggatgtgttcaactgggggccaggtaccactggccaccgacgagctagattggtctgatccactctcgctagcaccatcctcatcttcttcttcgtcgtcttcattttggtcactctctatggcatctggcgggcgaggagtagtctcggcgggtgctaggcgtagtgtagatgggaacaatggcctcattcgactaaattgtgctctgacagcagcatcacccacgaccaaatgccgatcaccagtatcatctccgtcctgtcgcaagattccttcgttgtcaatgatttccatgtccccctcggaattcatgctcttgccttctcctgtgcgagaacgttcacctgaagggatgctaccagggaatgcagagctgataggctggctaccaagtaccacatcacgggctccaccctctaggaagtcatcctccatgccagcaaccatgtcccttgtaagctctcggctcagcgcatagtatgccctgaaaacccgaaggaagtccttgcgttcgacaaagccatctccatcgatgtcgtagccgcggaacacccgtcgcagccgttcgtcgttgcttttgttgttgagactggccaagcccttcaggaattcctcgaacccgataagattgtcgccattggtgtcatagaatgcgaacattcggtcgtaaatgagactcgggggcggcggccggatagaagtattaggcacaaagcatcggtcgaatgttttgcgatcgatggccatatgcaacttgtttgggtcatttgcccactcataattggccaaacagcggaactgatcccagagtgcatcaagctccgtattttcgaaattgcagtctttcataagacgcttggcaagagggcgtggaagactgcgcgggagcattgaaggcttcccgggataccatacaggctgggattgacgagggtttcctaagaatggggctggaatccgcactttgtagaacaaatgtgttttgatatggacctgcattgcctcgcacgtctcacagagatcgtagtcgatgcaattggcacatcggtatctgataccctgaatcggcatggcaccacagctgttgcaagtaaccccacgatggatatagccgtccctccgcgcctgatcctcggcaatatgataaagcaggttaagcaggttttgaccttccctattagaaggatcgttgtttccatcacgccatgagaagacgctctggtcgtccaccaccgtctcaccgccgtcaatattctgtggaggggcagacacgtctggaaaagtggaggttgagagagtgacacgttcaccgttctgtcgtcgccgacgcagctcttcgccgtagttcgtatctccgttgaaccggaccagagccctttcaataccagctcgggagatacctcggcgttgaagttgttctgtcaggtatgttctttctgcggtatcctctgggagaatatgtgcagacgggaaatcgagtgcaaggaaggattcaagaaatgtatcctccatcatctcgcgcatgcgctctgcatgagcaggcgggacgcccacttcttccattagctggtcgcgtgttgcgaggagtgatggaagaagaccgctctccacgcgacgcccatcctccgtctcgatgcgaaatgtcccatatacaccattctgatgctctagctgttcaaggtgggtaatagctcgataagacggagtatcagcgatcccaggttcttcggcttcggttggtctcgtccggcgcacagcatttcgacgtcggagtgaacttgatgatggctgcgagatgacattgttgtgaacatagagaatcgcataggcagcagcgacaccagtgaagaggtagaggataggtcgatatcgtgctagtgagactggccctgggcgcgagtcggacatgacggaggtttggtggaatttgagctagcggaagctgcaaaaaaacatcaggaacacaaggtgtagcgcattctgatcacagctggataagcagatcaagtcagacccgcaaagtgtcaatcaagacactcaaattagaaaggatatgacagtcaatttggagatggcatttccaaggttgaaacgtcaactcgctggttgctgactggagcccggccgctctgattagtaagctatacttgagctccagggctgcccagcagagccctacaacatcatacctacgatgtacgagaagccaaattttttgaaaaaaatgggagatgatatattagctgctctatatattggaagcctatgctcttttcttgatagaattttgaaatagataccaaacttcttttatatctaatatgtcctcggtagcttctgtggtatatatatgcgataaacattgacaattttcaagccaatcccaattctagatagaccatgcactatagtaatttgcttgcaagttttttgcttttgaaagaacacaaatctaaaactttttgaagtatagcttcacctgtgaattagcggttgagtttgctttcacggatgaaacagctgcttaacaaagcgaagaacacgacaaaaaccaaaaaggcgaatcccttgttggtggaccagccatacgagtcccggacaatcctggcagttgctgggtcgagcgttttgataaagtccagactttctcgcactccttcgacaatttgatcaatgttcttactgtcacgtagacctgattgcaatcgattccgtaagacttgctgaacgacagttgatgataaagagagaccaatcacggatcccaatgagcggaatagatatgagcaagcagtgacgaccgcctgatcttcatatgtagcattcgatactggcggattggttagcatatattgaaggattgcagagcaagatcagataaaaactcactcaaaccgatcaaagttgtagtgacaccaatgccattgccgaatgccgaaatcaccatcccgcagatcatcgggactgtactagccaccacaccaccggagaacaggtatatacagaacacaccagttgtcagggaagcatacgcagcaattgtcagccagtaatacttgccagaccatttcatcaacaagcccgcaaacacggacccagtgacaccagctagaatgcttggcagtaagcgcagtcccgcagtcgtggcagagacatcatctactgcttggaagtataatggaatatagaacagggcggcaatccatcccccgaagctgaagaagttgcagctgtagcaagcaaagaatgttcggttgaagatgatgtgaccaggcgcaaagggttcggctgctaggtagatctcaactaagataaagaccacgaacaagacagcagagacagctagcgaggcaattgtcaggggtaatctccatgacacattactgccacgatcaagaccaactaggaaaccaagaacagcgccaacaaggactacggcgccaaggaagtcgatgcgacgcagcttggtcttccaatgggcgctatcgcgaggaggcagcttgagcaggaaagacacggcaatgaaagcaataatgcagagggggaattgcgctagaaacgccctaagtaaaaaaacgtcagatggcgcaaggaaatgtgggtctcgcatcattcataccagcgccagccaatgtagtcggagagaattccacccaagggtgcaccggtaccggcacctgtggcatagatgatattgataataccctgccataggcctcgatcgcgaagaggaacaatatcactcatcaaaatgcttacgacggtggtcataccaccaccaccaatgccttggaagacctgttcgaaatagtcagcattacatgattcagacctgagatcatatgtgaacatacacgagcagcgatcaactcattaatatcccgagctaaaccgcagcccaagcatccaaggccgaaaaccgcatatgcaaagaggaggcacggcttgcgaccaaatatgtcgcttagcttgccatatagaggttggaatgatgttaaagtgagaaagtaagaagtagcaatccaactggtcaggttgagagctttcaagtcgctaccaatctgaccataactggccatgataattgtctggtctgccgccgacaagaaaatctatatatcccgttagtcacaacttcgatttcagaaaacagaatcaataaacattggaagaatccatactccgagcgagatggcaggcacaatatatttgagctgcttctgtgcgtcattggacgactcttttcttcgctcctctgcttgaactgtatcccctgattccacatgatgatcgggaatcgtgccgttggacacagcgccgttaacagatacggatcccagcaacggggagttctcggtaggagatgtctctggagccattatcgagactgtctatcgtcagatcgctccagattgtccgaaagtcaaaatgacttgactgaacgtctacggagaaatcaacaaaagaggagagcgagggcatctaaaccccaaaaagcccccacgtgaagataagacgcccctcactccccgggaccgacttacccgtttcggccaatcaaatgtccatcattcctatgccgctagacctgcaggactttgatctgcgatgacatcgaagtgttgcctaggatatagccctatcttgtacgggctactcatttaatacattacctcacttatagaactatactgataggtcatcgaacggtcgtaaattcggctgttgaataggtatctgaactaaatatatgcaaaatttatttttagttaactcccaattccctaagttcatgctgtcgaaggcatgggaaccggcccaccaggtgagtcaggcagacgggcagtcagcacctcgacaccatcctcagttacgagaagggtatgctcgaactgggctgacagaagtccgtcttgggtggtgcttgtccagtcatccggccaagtgcggtcacggtaggtaccaaggttgatcatgggctcaattgtaaagcacataccgggcttggcagttccaacagccttgttcttggcgtaatggggaatgttgggcgcacagtggaacagctggttaataccgtggccgcagtagcttttgacgacactgcagttgcggctctttgcgtgcttctcgatgaggttgccaggttcgcggaacagcatgccaggtttgacgagctcaattgacttgttcgtacattcacgcgaggtttccaccactcggacggcgtcggggttcgcaagtgccttgtctccaacatagtaggtctcgttgatatcgccgtggaatcccttatgatacagagtaacatcgatgttgacaatgtctccatcctgcaagggccgttgatcgggaataccgtgacagatagtctcgttgactgaggtacacacggacttggggaagttcatatagttcagaggggaggggtaagactaaacttatgttagtgtggtattgcgcaccagagagcaacctctcgtacatcacgctcaatacaagccttgtggacaacctcgtcgaggtagtccgttgtgacaccaggcttcaattcacgagcagcagcatctaaaacctcacgagccaatcggcaaaccttacgcattccctcttgctcctccttgttcaggatggtgatgttatgtcggccgataagtttttgctcggagcgggggataccatcgcgggcatagtccgggtgcgggatcgtcttgggaaccgttcgtttgggtgacagaggatagacgggcctcaaagaaccggcgtaagggaaggacgggtacggattgaaggtaccggtggctggatctggttcagaaactaccttcggaggaaaaaagttggtgaggatgttactctttttgtggatgctcttatgttcgctctagagtatatgatcagcccttgacttcccacataccagggcgcatgtactacgcatcattcagtcccatcatagtcctacgtacccagcttcgtttgaaacagtcctgcgaacagaagaaactgtccgtgccgctcttcagacatgtcgggcattgtagggtgcctgcatcgttagggcagtccacaccccggcatttgcgagtcgcaacttcagccatgttagaatagcaggagtgaaaagaaaaaaaactggagggaatatgtagtgagtagattggacggcggccaaaacttcgagaaaatccccgcgggccggcgatacggagctaaactgcatttggactcctataaacggatgactaatgtcgatcatctcattttggaaggaagggggccgacctcgcagcacgtgatgatgacttattcttccgtttcaacgcgtacctgcctttgttttggacgaccagttaaacttacatgatggctattccaaggcagaaagtggttgttgtgggtgctggcccagtaggagccttggcagcactatatgctgcatcaagaggtgacgaggtggaagtatatgagctccgtggaggtatgtttcactgcctggtgtgacctttcttttcttttttcaccttttggtggccgccattggacacaacccgattgtcaaggaagaacgcatatgtctttggccggggatggctggctttttatccaaggcacaatgtctcgcaaggtccctgtgtcaactctgctattaggagaaacttactccgattaatccatatcaccatatcttccatgccccttgcacttgtcctggctcagttgtgattcattgcgaattcttccgaactgacgccaataatccctgcgcatccgtagatctccgagaccctacgactgtgccattgaactttaccaagtctatcaacttggcgctctccgaacgtggaattacgtccatgagaaactctggtcgggatgatttgatcggcaatgttctccgtggagcgatccctatgcacgggcggatgatccacgggcgagaccgaggaggtctgtgggaagctgcacaggcctatgatgttcacggccgggtatgcaccgatcacctgcttggcagttgctattgctatttacactgcagatcatagctaaccactactataaggctatcaatgccatcgaccgaggaactctcaacaatgccctccttgatgagttggagaaaacccccaatgtcaagctatttttcaaccacaagctcacgggtgctgactttcggaccaacaaagcctggtttgagcgcagaatccccggtgagacacccacggccgacgatgccggtgtagctggtcgagtaccagagatcgaggtgtccttcgactaccttgtcggtgccgatggagcacactccgccgcgcgcttccacctgatgaagttcgctcgtgtcgattatcagcaagagtacatcgacactctctggtgcgagttccggattccaccctcggaagatggagacttccgcatttcgccaaaccacctccatatctggcctgggcgcgagttcatgttcatagcgctaccttcagccgacaagtcattcacgtgcaccttattcgcaccattctcgaactacaacaaactcgagacctcgccacaggatctgcatgaattcttcaactcctatttccccggcgtatgcccagagctaatcgagcccgcggcgttgagtgagcagtttgcagcgaacccgcatctcccactgatcagcatcaaatgcaaacctcaccatttcaacgccagtgtcgtcattatcggcgacgcagcgcacgcagtcctacccttctacggacagggactgaatgccggtctcgaagatgtccgtgtcctcttcgaggaactggacaaacatggagtctatgaccccaactctagcgtctacacacgcgatctcaagcgccaggcagccttccaagcctacacagaccagcgctgtgctgatacgcatgcaatcaacgatctatcgaaggataactatctcgaaatgcgcgccggcgtcaaatcgccgctctacaagctgcgcaagaccatcgaagaaactatcgatcgccatttcccgttccttggctggaaaacgcagtatgcccgtgtcagcttcagtaaccagcgctactccgaggtagttgaagctgttcaaaaccagagccaagtgcttggtcttggtttgagcggggctttggttgccagtgttggagctgtgtccatcttgatgtggaagtaccctcagtatctctcaccggtgggattggttcggtgctcacggcatctggcttgtgtcgggttgaggaccattcgaaaatatcttcatatttaaagctttttttttcgattttgagtggatatgtaacaatgtgcagatacctgggggattcctaacgcgtttagtttgttacacgagaaagtaccttaacatggacagcagactatggtagagagcatgaagtgcacaaaagggaaaggttctaatatccaagtctgaatttttgatcaaactaatataaacacctgataaccatacaacgcttttaatcccaatacctgataacaccgtccaatccaccagtgacgaccttactggactcatggggatgccagtccacacaagtaatagccccaccttcctttccaccagcctggatcttatgatacatcttgccggtcttccagtcccagaagcagacataaccaccgctgtcaccggaaacaaggaactgaccatcaggtgagatcttgaggtcgatagcgtatccggaagtattatgcccaacgaagcgcttctttcggttctggcggaacttgtccgtcgcgctgtagacgacaatctggttgtcgcctgactggaaggcgacatacttgccattcggatggggcgccgcacgcgtgagcgcgaacatgtagggctctgcgatgaacttaatcgggacaggaatgccgtattcccaagcgcgcagcgacttgtcatctgaggtggagatgaagcggcggttgtcatcaacgaaagtaagagtgttgacggcagccagatggtggtcatactcttggaccaactcgccggaccgggtgtcgaattgcacaatcttcttgtcagacataccggccaggaactcgtgtgagtgttctgggctagggttgaagcggacaacgtgcggtgtcttgcctgtggaaaaccggccaagacatttaccgtattcggtatcccagagcttgatctgtcggtcgtatgacccggtaaggaaggtcgtccccgatggatggaaatctgtgtctgagattgctttggtgtggccggagaaagtccgcaagagttcccgagagtgatacacatcccagagcttggctttcccatcggctgctgatgaaagcagcaagtggccagatttggggatgaatcgaagagaggtgatcggcttggtgtgcgatttccaagtttgcacgagttttttcggtacgtagttcttggtggtgccgggctctttgcgcaaatcgatatccaagtcctgaggcacgtgcatgtacgtccggccctggtagtcgtactgctctgatccgtgaaactcggtggtttcttgcgtggcaagatcaccttcgtaagcggtggcatccttactcatggccggcataggtgccgtggtagtcagagtctcgtcttcctcttcgatatattcctcgtcactaccaagcgcgcgctcttctccttcagcaacctccacgtagtcatattgctggtcattttggtatttcgcccagggtcccagatatgcgccctctccctccacaacactggagtcgcccttcttttgccgctttgtccgccagtttgcggacgcgctcttagtcggcttaatttgtacaatatcccggcctccatattgtgccgcattttcgaggcttccgataaattggtccggtagtgtcggattgcgagtgtatcccagactttggaacgtgcgatgttgcgcagaaaatgtggactcgctgatggctgcttcttcagcaaatccagtcggaacattctttcttttgataccgtttcccggacctgctggcttgaacgggttcacagggccctgggaaggctttgtaagatcatcgtatgtggcattgtaggtgagggcttgggatgaggcgttggcgagggccatctgcatatgcgcttggtcctgtaggatcgttagtcttatctgttcgtcatagctcaagtgtaaggcacaaagagattcgggaaggaggatgattatggggggaccaaacctctgtattgacctctggtgcagcaacgaccttggtcgcggtcgtcacagacgagggcatagctgtggcgtcatcatcatcgctggagtcataaccaagacctagtaaggcggacatgactaatatgttaaagagggtgtgaatgcgcagatctcaatgcccctttgcaacaacgtcggggttgaatgtggttgttaaatggtacggagtaggtggtggatgggaattttacgggcgtcgggagacccccgatacgaaggccggggaacagccaccgcagccaagctctttatcagccccaatgcagcttcgacgatagttaagtacgtcaattatgtctacctgttactcttcttacgcatatttgatggcgatggtatttctcaacaataaatcagttaaatgttagaacttgggtatcgtacgctcttcattgccaaccgcatgggaggtatatacaacttcaacaggccgaaagatacaacaagattaacacagaagaagaattaaaaacaaagcaaaagttagcaagagatgcaccaccgcgagtcaatcatacagtatctcgaataatccagctcacatcctcagctcgagacaccccaaagaaaatatctattacctctcatcgctgtagtcctcagatatctcaagactgaaagaattcgttgctcatccgtagtcatggccacccatacgataaggaatcatatcgacataccgagttatatgatatgacggccgtcttggggctgcactcaggttccagggtcgtgcgataggctgagaagaatgtccagaggacatcgacctaagaattttgtgacaacagctcatcggcagacggttccttgatctagccgggagaaccatgatgcatcgcatattcggtcttttcacgcagtcaattaccctcatcacggatcagggcaacaatcatgctgtaaagatagaagaagaacataagaaggtggaagccaagcttgatgaaggattcctaaacacgatttcgagtcagtcactgtgcggtaaattgggaggtagaaaccaaacataccttcttgtgcacgttcaacttgcggaaaatctcggtcgcatccaaaaggtgctggttctcgtagatcctgtattttcaaaaacgacacggttagcctaccgctgaagagggcttgcgactactcggggagcttccaacgtacttcttggcgttgaacaacacgaggggtaggttcagcacgatggcgagccagtatccgttgatcacgaagaggaaggtcaggaacgcgtggacagcggcttcggggatgatgtaggcgttgaggcggttgcaaaggtcgatagggttgatgtaatcgctgggaaaaaaaggtgaagtgtcagcttgtattcggcagtatgtgtggatcaaaaactgttgcttgggacgactgcgaagactcaccattcaagatcactgtacatgatcgtgaagaacacctggaggaagaggttgacggcgttgatcaacaccgacaacaggtaaagccatgcttcgccagacatcattgcgattttgacgttgcgtcaagtataattgacagaatttgaatggctaaacagaggatatgagtaaactgtcggcgacaaaagtgggtgaggttgaggtggattgaagaggccggaattggagatgtttgtggggttcttccgcccaaggaagacagacgaatcgcacagagtcctctccaaagagggatcaaagctcactcacaaaaacaaagctaaatgcactcaagctgatggagatgaaaaacaacgtactgagcagagatgaggtgggatcgaaagaaagagtttcgattagcgaactgcggtcggcggtgtcgggagggctggtcatcattagcgcaacccgcaaacggggctggtaacgtacatgctgtagtccagagtactcgataagaaatagattcaaggtgttgtagtcgaagtaaatattgctgattattgtaactgagttcttttgtccaggtggcaaccttggaaggttggtaggaggatgacgtggaccgtccctcgtggaagtacatgggaaatacggagtagatgtacccaacttcaacgttgtttatttggaggcatgaagggatcattaggcatgtctattttgtctatatacatagtgacaaactatagaccgcagcatacgggcttccatgcatctttaaagagccgatcttcaatccccttcgcaatgaccgcaaaacacgaaacgacgtcggacatggacaaggaccaagtccaacccaagacaaaacacaggatcattgaaaacaccctcgatggtatcataccagtgtatagcaacacgtaaggaccagctcatcgtttctcgacaagtaggaaatgcattgcactgtatgcaatgatgatgaaggccccagaaatgacagccagcccgataacatcgctccagtaggcctgggtgtcaaagccgaatgcgcttaagatagaggcaccgggaacttcaatatccaagccgtacttgtgatcaatcaaagtgaggtaagtcacttcattgacgatcaaggcctcgaagccatagtggaagatggacagctggtaatatggttagtagggaaagcatcactcaggttagagggaaactcacagtctgcaaccacaatgctgacttaggaatcgcatcgtgattcagcaggagaccggcgaagagcaaactgaaaagcatcaccaaactgccgataagattggcgactccgccatcccggaaaataatgccaatgaagaggcaaatgttggctgccgcgagattgaaaaggaccagaaccagcaaaaagcggaaaaattcaggccacgccggaatcagacccgtcatggggtatacaatcatacccatgatgatgggaggaatcagcctcagaggaacgatatcaaacacgactttggacgcaaagtatgtgaccggatggtaataaccattggcacgctcacgtacaaacaaaagccgctccgtggagaacacgttgagactagtcaaagtactgaaaccaaacagagccaagatgaagaagaaaagaccaagacgattctggaagcctttgatatcgtcagtgaggccatagaagaggtatccagataaaactgcgagaagaatagcaattgcgtaatgtgtgagcatcaacatcgggttgcgataaaggttgcgccacgtccgctgagaaaggatcatgaactgccgcaccagaccaactcgggcatagcccttagactgtatcacagtatccgacaatatgggcgaatttggtgaaccgttcgcagcctgggcattctgaacggcggttagaatctcatcatgaacaaaatggcaaacgtcagaatccgcatagctagccaccaaaatgtcgagatcactttgtccagatgccggaggagggagctgatcgggatcatcgaggatttgcggaggaacattgctttgttgacgagaaagacgcagccattgttgatgattatcggctacatccaatgtagcactctcgtcatctgtctttggcgtgactgggcgctcattatgttgctttcgggagtaaagttggcgatcctgctgctgttttagagacacctggcgtttgcttttgggtctccgagtcgcctctgcgccgcttgagttgtcttcaatactccggatcgacgcgctggtgacagacttgacggctctgagactgcttgatgcggtcttagatggaccagtgcgcccatccacagacaacgccacttcgtctgtatatgatgaatgtgcgcctccggcgtgcattgtaagatcaacaaggtaatctgcaatattgaatcccggtggacaggaatagcccacacggtcgaaatactgctggcatgatgagaaaggaccagaatagacagtgcgtccatcagcaagaaggatgagtcggtcaaagagagcaacaatgttcgagcgaggttggtggatggtgaagataacagtgcggttgtatgtcttggcaagcgtcaccagacactcaaccacattgaatgcattgtaggcatccaatccactagtgggttcgtccaggaaaaggatactagggctggtaaccagctcacaagcaattccgactcggcgcttctctccaccggaaatgccacgaccattgccttcttccgagccaatcaattgatctttgatgtgatagatcccaagttgcttttcgacctccaggactctctgctctttagctgcccggctcatatcccggggaagtctgagtagggcgcttgtcaagatggtctcatggactgtcaaggtagcaagcatcgtgtcttcctggtcgacaaagccaaccatggttctgaagtcattatcatcaatcttttcaccgttgacataaaagtttcccttcactgagccacgtttgttctttcgcgctaggatatcgaggaatgaagttttcccagcaccagatgctcccataatggctgtaatttggcctggtatggacgcaccttgaatgccagagagaatctcttttccgtttagtgtataagaaacggtatcccagtacaaagccgcggggtgatagtctgccaggagtttggcagattcgtcgtccgaatcatccgaaagagacaggcgaatataaccgcggcgcgcagcacgacgggacatataccagatgattagaatgaccgcaaccacaaagagtgaagttcccgcgatcacgccggcgatgagtggagtgttgattttcttcacggggcgctcgtatccaggttcatcagtcttgtacatgcactctcctgaattgcatgacaagaagatacttggatcaccgaagacgcccgcaattaatccgttcatctgaggctccgagaaaacgctcttggtaccctccagggtcgatttagtatcgaaagtagccgggcccttgatcagttgatcaaggaaatcgctcaggtcaatcgatccattctcgccacagaggaaacggcccggaatacattcgcactgaaggtgctcgcacttgtagtgagttgtattggagttgtagtctgtttccgtgttccactcgcaagtgtctaggccgcaatagaatgactctttctggtcaacccaaaattggaagctacatgtgtcatcctcagctttgcaggaaaaagtcacttgaggtttgcggccgtcgagctgtttcaagatcgcacggttggtcacatcacacatttgaaagttctccttgaccgtggcaccttgcttataacaaacgcccccctgaccttcgggcatcatcgcgttgcaggcatcatctgagttgcagacattgcagttgatgccttcccagccatccttgcattgacaggtgttggaatcgcgctgcggtcggttcaagtcgtcagccaacgaaccgcataggggaattgaacagtcgtcgcctccaaatccgggcgggcatgagcatttgccgttgaagttattgcaatccgcaaaatgagtgcagttatagttgtcgagctggcagttgaagcaagctggacactcgggacatccgggtggccgatcatcgaagagggagtaggattgcgtagcgaggtttgcatcggtaaattcgctccatgctgcagcagaccccagtaaaggagttaatgtgagaagcgaaagggatattgcgccagtcaagcgcatcttgtggaaaggatgacagcagcgtgtcctagtacgcagcgataccaacaaccgaggaaggagtgcggggcggaccgccgaattgatcaaattagagaataaagctggagcatatagctgaagtaaaagatagagacaagttcgaaggttgagaagcagaaagcggagagattcagagggtaagattagccccaggcgatgacgcgggcggagaagcgagaggaggctgggcgtcaggaaccaacagtcttatgctatgcaagaccgaccccgatggtttttcattctacatcaagatactagataattacagcaacatgctagataattcgtaaattccaagctttcccaccacagcattttttccttcccatttctgtatacaacataagtggttctacctcaatgcggggaaacacgtgatgccgggggatatataccatgtcgaccagtttagaggacaaaaagcaaaaaaaaagaagagaagagaagtctatagaaagtagctattctttgctacaactgattcgtagtcttttatccacgagcgccgaggcctgggacgtatgcctcaagcttgggcaatcctcccaagaactgcaaagtgtgttgttagtagatttgtatgtcgaattcgttgaatgcaatttctgatagagttaattcccttggttgaacggattaaccgcaacaaggatatggagcaaaatggaatctcctttattgcacaagatcattgaaagaccaccatcggaacgtaggcacctatgggcacctatggagtattgccctaatagatcagctatgtgccgggaacctccgtgaacaaagaaatagggcggggatctgttcctcgatacttgctcggtagcaagtcctggacgagtacatatattacgaaagttatggcccgcagtatgcaaacttccagttcaaaggaatcacattcattttgctacccctgctagggctacaaatgccacgtcactagcagagactttcaagctcgcccgctttttagctctattttgaatgcctcgactaggtactcgaatttaccgccagataactggaataccgtcctgaatctttagctacagtaaaacaacaaacagacagtgttgaaactttccttgaccctcaacatgtcgcccctagacaaacgcagaaacagtgagatcatacacaagctggaggctcgcatagtcttccacagcctcaccgatgatacccatgatgagacactgctcaaaccctacactcaccacttagcacgggcatgctggaacggtagtcggatcgttctccgtcagacttcacaggaagcggagggaatatcgaccttattatggagctacatagtgcatgcaacgggcgatgggacgattttgggatcgcggcatagagcaggatgatctcgatacatggcttgggtttactggcacgtttctgtccaatcttggtaaattttgttggtctccaccgtggcttgcaagctttccatccatgacctgaattgctgatgtcgcagtaaaaggatgacggagatcgtaaggctacccctggtgtttccaaagataccctgcgcaagatagcgagcatatcacctgaggcaagcgcaaagcttgaggaagtccttgatccgatgatgacagcccagccggctcaacttagtatcgtcatcaaaccaaccagtcgagttactaccctggaaaagagtggattacaaaggaagagatcgagactgccaccaagataatggaaaccaaggggctctaaccatcagactcccaccgctgtcatatataatcgcccgttgcgatttaagcaatagcggtgtgcagcgctgtctggtagatctactatcccaccctcagctcaagcccaatctgcgcacacctattttcaacgtgcatgtcctccactttgcaaccgcacatcatgatccagaccttctttcatggttggcagcttccatccccggtggacttgtagtgcggggacaacggccctaggacatacgctactccacattgcttcgttacctttcacttccaatcagactgcactttataatccagatgtcgcggacagtatacattgtgcccgcacccttgactctaggtggtttcctcatagaatgccaagccctctgcatatccagttcccaaagccacaggaaggctcccgaaaaccacagccactgacggattcccagcaacaggcacaaaatgcaagtattcggcttttattggaatggggagggattgatgtcagggcaaaggatatcgacggcaataccgctttacattacttagtgaggatattgttgaaatggttcgacaggcggatggaggggaagaaacgtgggagaacgcgacaaaccgccatggcattactccacgacagatgtggtgtaagtgagatgtaaggcaaagatgacaagggaaggaatattagtttcagccttcaatttcatgccttgtcgtcatcgtagaggatgtcctagtacctcttcttttcggcatactggcttaattgcttgggtgagtatgaatgtatggataggctcgaattttattaagcattttatattttgcttgcctaaatagaaagtatgttattccctgcatgtgctggatctcattttaaatatattgatccaggtatacaattctagaacctagtttactggggaaatttccacaacttttgtttgtgctaagtcgaggccgggatagcaatgtaaattcttcccggcaggtgtgaagcagcgacttcgcgcaccacgtggaccaggcttgtacgggaaaatatccaagctcttggaaatcctagtcatgaaattcagttgaggtcattttctaatacttgaactatcgatgacattctgatatagcataatgtagggcgtgtgagaacaacctgaaaattaatttagacctagaacaaattccaagcacgaacaagctaacgcccgatgaacgacctcgacatatcaatcaatctacgctaaggtgaggctggatcgggaacacgatccatcacgtgataacacggacagctcataggtagagcggcggtagcataagggaacaagttatcacccattcagccgaacattggaacgtccctaggcaaagagagttgattatagctacttcgctcggtaattcccactattataaaccatggtgaagattgaggccttcgcggttgaacaggtacctccccgcattaccccatggctgggtggtacttgtctgctccctctgtcgttacagatgtgttttgttaaccgtcctgcagtggatggacaagtatgagaccactgcgaaatataataccgccgagacctgctgtgcatccatctccgtcgacgatctccgcgcgctctccgatgacaaggagtccaaccctttagcccagcttcaatccaccaaactcacatatggggcgatccgtggctctgataaactacgaaatacactggcgaatctgtactcggtaagggcaccgacgcagttgccgaaggaaaatatcttgatcaccgctggcgcaatccaagcgaacttcttgctgttgtatacgttggtcggcccaggagaccatgtaatttgccactatccaacatatcaacaactgttctccgtccctgcgtcagtgggggccgaagtcagcctgtggaagtccaaagaggccgatggatggcagctggacattgaagagctgaaaggccttatccgacccaacacgaagttaatcatcataaagtatggatttcctgactcttattacaatcatgcaaggcgtgcttttttttcctgaccatcattctcatagcaacccgcaaaacccaactggagccatcatcccgcgccagactctccaacaattggtcgatattgcccgcgagaaatccatcatcatccactccgatgaggtctatcgcccacttttccacaacatcagtcccgcggatccgaggttcccacccacacttctttctatgggatacgaacgcacggtggtgacaggatccgtttccaaagcctatagcctggcgggtttgcgggtaggctgggttgcgtcgcgggatagttcgatcattgaatctgttgctaacacgcgcgattatacaaccatctcggttgggcaaattgacgaggcaattgccggttttgcattagcaccgcattgcattcacaatcttttgaaacgaaatatcgatctagcccggactaatctctctattctagagaagttcatcgatgctcatcgctgggcatgtgagtggattaagccgcaagccggcaccactgcatttgtgcgctttaacaagatgggaaaacccgtagacgatgtcgctttctgtgagatgcttcaggaacggaccggtgtgatgcttgtgccgggaagcctttgctttggagtcggagaagacttcaagggttatgttcgcattgggtacgtcaatgaaaccgaggtcctggagcggggcttggatgccttgggtaagttcatggaagatggatatgaggatgtaccagtgaagaagcccttgcaaaagtaaaaatagccatcccgatgccactggtcaactggacatgcaaactagccttttgtactctccggcaactactagccgagcccgtttgtataaagaagaatcataacaatgtcagaacgatctacagaatgaaaaattaaatcattattgaaagaaacaactgccgtacaacgtgtatgtggcgaatacgttgcacaatgttgcatgtcgtcaggggatcggcacatcccgaggtccgtgccgaggcccgtttcgatctctcctactccggacatatctcaaccttaccggatccattagatgaagtcaaccaatattgcttttgatctgtgatccaataaaaggcagcgaagccgaggtatcagtcaaagagtccctataacacctcatctgctcttccttccagagctacattcaaagccgtgatacctaaatatcatatccctcgagtacattacttgagcatactatcgatctcactcctagatcatatccacttgagcttgatccttgaatatcttggtcataatgccgctgccatctttgtccggtaggtcataccccatggcgggactgaatgcatggctaacaagcggactctttgtgcagatattcccttgagtcttgcactccctgccgcagcaacgacactcgcatatctcaacgcaagatggtcggtttcttacgatttgaacctcctcagggggttgctgaagatgtccgcaaagtcccgcattgccgaacgtggcgaccgcttgaacctcttctacacacttgaagcctacgcactcgatcctaaaactgcaggaaacgatttcattgtgtacaatggacgaacaacgacgttccacgaaggctatatcatggttcttcgctacggggcatggttcaagaaagtccacggcattaagcgcaaggagattgttgcaatcgacttcatgaactcttccaccttcatatttatgctgttgggactttggagtattggagcagtcccggcatttatcaactataacttgtctggcaagccgctcacccactccattcgaacgtccaccgcaaggcttttggtggttgacgaagaagttcgtcactgcttcccggcggagcaggagcagatattgacatccccgaccttccgtgatggcaagggaccggttgagatcgtatttcataccccggaggtggaagcgcagattttgggaatggagcctacgcgagaggatgacaaggcccgtagtggcttgattcctcgcgatatggccatcttgatttacacaagtggcaccaccgggcttccaaagcccgctattgtcagttggaaaaagtgctggtctggtagtttgttcgtcaaagattggttgagcattacttcctctgacagattcttcacggtaaggtccaaacttataaatgttactgcccaagctaacctcctgtagtgcatgcctctttaccatagttccgcttcgatacttgggttcataacctgcttgatgagcggatccgccatgatcgttggccggaggttctctgcgcgcaacttcatcaaggaggctcgcgagaacgatgcgacaattatccagtatgtgggcgaaacactccgttatctactaggagtggcacctgcaattgacccggtcaccggcgaagaccttgacaagaagcacaatatccgcttggcatttggaaatggactgcgtcccgatatctggaaccgcttcaaagagcgttttaacatccccacaatcgccgagttctacgccgctaccgaaggcactacgggctcatggaacctttcgacgaacgacttctccgcgggtgccatcggccgaaacggtgctttgggagatattgtccttggtcgtggctctgccatagtggaagttgaccacgaaaccgaggaaccgtggcgtgaccccaagactggtctctgcaagaatgtcccccggggtgatcccggtgagttgctgttcatcctcaatgcagcggatcccactgccaatttccagggctacttcggaaacaagaaggcgacagaaggcaagattatccgcgatgtacttaagaagggtgatgcctatttccggaccggcgacatggttcgatgggacaaagagggtcgctggttcttctcagatcgactgggtgatacgttccggtggaagagcgagaatgtatccaccagcgaggtttccgaggttctgggcgcgcatcctgatgtacacgaagccaacgtttacggcgtgactcttcccaatcatgatggccgtgccggatgtgcagccatcctgttcaaccagcaggtagcaagcggtaacctctctgataccgccctggaaccctcgcgtgaggtgcttgatactctagctgcgcacattctcaagaacctgccccggtttgcggctccgctgttcttgcgggtcacgcccctgacgcagtcaaccggtaataacaagcaacagaagcatgttctccgtaccgaaggcgtggatccagctcttgtatcgaagaaggaccgactgtactggctccagggtgatacatatgtccccttcggacagagggattgggaacggttgactggtggtcaggttcgcctttgatccgtctagttttcttggacttgtctcgtcttgtgtgtcacctttgccttgtcccgttatatctctaagatttttcggtcctatggcctgattcgtagcctcattcaccttaagataccctcgacagccttcaattcaacaatctatatacgcccattggggctgacctggtatcactgggctgagtttacacgtaggacatacaagaatagtcagtgttctctgcccttgacgatgtaagactaagataatctgatctatttagcccaagatgacctcggaggcgttacatgtgtttctatatgtctttttcgatgtatacgaaggcggcaaaacgatatgtatgactgttggaatcatggacaattatcttgcctgatattcttttcctggcctcgggtcagcttagtaggctatgcatgacgtggaactcggtaggaaatcccgagtcttagaaggcacggcaactatcggaaggtaccattagaaactgacaggaagggactgccctcaggcaagagcgttgggtttatgcctaaggaaggaacgataaaaaagtgagtataaagggaaaggtcaacccagacattatagcccccaactcccatggctcagatgggatgcgccctgttcctcgagcaggctagctgctgctgaagaacctttgggcccatcttttttttttatcccgttccggatcatttgaagctattcacacttctggcccaccataaccccaccctcgcaataactctttcagcgtcttttcttaatgttttcacaacaattatagtagaccgcttacggggccttatcatgctactttgggggtcttcgtagatatatattttaagaagctgtatagccttggacatgctctgatattgctatgaaagattctggatatattcttctttcaagggaactaccccgcagttctcttaacgttcgacttgtcaaactagttgaaattgtccaaaggcgaatcagcctcgacaatcttccacacctgctcaatctgtgctactatttccgcatcgagcggacccttgctaattgcagcaagtgtctgattgagctgctcgacattacgtgacccaacaaccacagcatctccaagttctgctttgaggtcggagttatgcaccacccaccgatatgccaattcggccttggagataccaaattccttggatatcttctcccacttttccaagccctccagcatgctcggcttgttgaaaagcgcattgtagatcccaccaatctgtgtctttggatcccaccgaccctgcccaccggagaccaacgtcgcgacatccttagtcaggaatcctcctgcgatgggcgaataagcatagaatgagatgttgtgtttccgcagtgtgggaaagatctctttctctgctcgtcgtgcaacagcggaatagctgccttggtagacacttggcacgacataattcttttcacagcagatgcggaccacctcttcaacctcctcagccagatagttggacagcccaaagcgcttgaactttccagccttgtgcgcagagtcgatactggccagcaggtcttccaatgagcttctgcgttcgggagcatgcatgtagtagatgtcgagctagaaataggattagggattgggtctttgcagcctcagattacgaaagaagctcacctgattagtttggagaagggccaaactctcgttcaagcttgtaacaagagactctggggtggagggctcaggtctaaacccgccagggaatttcgaatcaatggcaaagcgggaatcggcgtgaagtttgcccaatagctcctcggagttactgtagatcttggcagtatcgatgcttttgatgcctttgtcatgcagaatatcgaggacctcgctgatggactcaagagttggataggcggcttgatccatgattgaggctccgccccagacaatcttgatgctagccatgatagatggttattgaaggatgaaggaaatatgaatgtctaaaatcagccctgacaattgggttatttatattccatttcaagcttacaatgctatagaagatttataatcaaagcttcaaaatcaaaaacctcatacaagtacaacgcacgaattcatccgtccgtgggcgtctcgtctcccccggggccgccggggtggattattcatcgtaatagtgcctctcacggtacaatagatagtcttatacaagcttaagatagtatatgagagctatataggttatttgacttcaattaaatctcactaggatgggggaatccagtaatccatctgtttggcgtggtgagaattataaagtcctagcaatccaagtttatacataggaaagccgtttattaaattgcgccctttgcacctttttccgtgtacctaagaaggaggagatagtcacagaaaatatactaatgaaaactactgaaaatactaccaaaatgtcatgcaaaggccttgtccaataccattctacggggtcaagtatagagccgactcgggagcaaatcggcttccccgcatgcatttggagatccccgctgtttatttccttctctgcttttgtttttatctctctcctcaacccatcatgtcttcaaatttgtccttactcacacaccttcgcccccgcgtactggcgcgaacccgaccgggcgcaattcgcagtttcaccatccctcagcgtctccgctcagatgcttcctcggtagcctcggccttcttgtcgcgcttccaatctctagggccacaaacccgcacgcaaacgatagatgcaaaccagctccagcttctcaccctcaccctcaatcgcccgactctcttccccggtgccccctccctatcgaatagcgctcccgctccgcaatctgcagtacccgtgccgccgggctatcacctcgcgtatttcacacccgcgttcctggaaagtgaacttggggcggatggaaccgatgtgtcgtataatcccgacgtgcctttcacgcggcgcatgtgggccggcggcgaggtgctgtggccccgtgtggatgggaaacccaatctgttacgggtaggacagcaggtgcaggagacaacacgggtacttagtgcggaggccaaggttgtgaaaaagaccggcgaggacatgattgttgttggagtcgagaaagaattcgccaacgagcacggcgtgtcaattattgaccgacggtccggcttcccttttcaagaatcccgctgttcaaagtactgacaatatcattcacatagcaattgggtgttccgcaaagctctacctgttccatctgcgtcaacgtcatccagcgctcttccgtccccaacgtcccatattgcgaccccaaatcctacctcgttcgccatttccaccgagggcaacgcccatacgcgaacactggtgcaaacgccggtgtcccttttccgcttctctgctctgactttcaaccctcataagatccactactcactgccctgggcgcgggatgtagaaggacacaaggatattgtagtacatggtccattgaatctgatctgcattcttgatctctggcgtgacacgcgccagaatgtcaccgattctaccttggttgttcctgagcgcatctcttaccgggcaacgagtccattatatgccggggatgagtatcggattgtgcttgaggacggcgagggaacagaggtgcagattattgggcccgggggagtagtggccatgaaggctgagatccactaaatatgaactgcacaaataaaccaggtgtagaactgtggtggttacagtttgggctattcctgataaaatcgaaggacaaaaagctttggggcgtgtagatccccctcacgggctagcgaatccacttcttttccctttttttacctgcgatattcgtatttcctcatttgctgatcgcaataaccacaaacaataatgaacgaaccttcggaccctgatgcagagacatccgcccccaaaaagagaacacgggtgcaattttcgtgcacggcgtgcaggtatcgaaagtaagctcaagttcaacgcatgacgtgcatacatcatacctagcatatcagatattgatccactacagattgaaatgctgccgcaaccacccttgtaataattgcaagaagcgaggcgaggccacatcatgcacctatgtcgggcgcggaccacgagccaaagcccagcatgggcgctcgagcccgactctggtccaggaccgcctgcaccatctcgagaatctagtgatgtctctagcacagaagcagaggtctaatctcaatgttgatttcaattcagtgcaatcgggggatcgggatgctggcgcgatgcgctcacttgacgctgcgttgactccggttgacacgggcacgctggtcgtcaaaaatgagggaactagttatattgacagtgcaaattggcgcgctatcctggaagaggtccgtattgatctaattattgctgttctctgaaatggttgtgttgacgggttcttcaaatttgaagattaatgacgtgaaagaatgcatcggagaaaattccaacgatgaaggcgtcgatattgacccgtacgatgcctcgtcaccagttctactgcttggtaatagtcgtccggtgagcaaagaggagatgcttatggacatccctccacggtcaatagccgatcgcctggtctctcgattcctcaagacatctgaaccggcacgaggtatgagattctcaaggaaaacaacaagtaccgagtactgataagccagcagtggtaattcacgttcccacgtaccaaaaagagtacgaggagttctggctacacccagcagataaatcatttacttggatttccctcttatactcgatcatggctttgtccgtctctctacatcatcgaggctcagagcagtcgccttctaccatggaagactctatcaattcatgggccatattccggaaaaggtcatcgcagtgtcttatccaagcaaactacatcaccccagggcgatacaaaggagaagcactattactctactcactcaccgagttctaccgtacccaggatgcgcagattggaatgtcctatttgcttgggattactattcgcctggctatgcgcatgggctatcatcgtgatccacgtcattacccaatgttatctgccatggatggggaaatgcgccggcgtctctgggccctgctcgttcagcttgacaccatagtctcattccaagtcggtgtccctcgaacaatccagccttggcaatacgacacagagttaccttctaacttgtgggacacggacttcgatgagagttccgttcaattgccacccgggaggccggataatgaaggaacagattgctcgtacatgagggccaagtctcacgttatgagtgtctttggtcaaataacagacctggcattctcccaagagcgctcatcctacgatgagattttggaaattgaccgtcgtttggagactgcgcatgatatgataccctcgttcttgaaagttcgaccaatgacgcagtgtatcgcagacccagcagaattgaccacgcggcgcttcgccttggagctcttgtatcaaatagcacgtcttgtcctacatcgccgctatatcgctgagaccaataccaaatttgcttactcgcgatcagtctgcctggccgcagctcggcaagtgcttcaatacaacacagagatctggtccgagttcatgcccggcggtcagttgttcgcagcgcgatacttcctcaactccctccaaaattcctttatactctcggcaatgattctttgcctcgagatgtcccaggatgcagatcgtggtcatgcttcacgcctcgagcctcgagagcgagcagaattcttgcttcttctggaaagtacccatcgtatattcatggaaacccgtcaccggtctgtcgacacacagcgagcagtgaatgctttgactatcatgctcaaacgagtgaagaaaggtgactcccaatcttccagttcgactgctgggcaatcaatggcacctatggatagtaagtattacttttctcttctcgcaatatcatgctgattatattacccagattatatcttaacccaatccaccagtgcatcagtccttgatcaacaatactcaacgtacacatccaatattagcgaattgcagtctgcaatacccaaccccggccagacgtcatataactccctgggggtcattgaagacatgcttgatatacccgctcaactcgactgggtaagatcccagccatgcttaacacaactaggactaatcctttatttccagaacctgtacgacagtcacatatcagcagtcgaaatggccaccaataacgacatttggtactctggtggtccagcaattccgtatgatttcggcgcttatcctcctgggtcatcgtcgatagatcatgagagctatcaatgacaatgtgaactatacaagaccatatcatcaatacatatctcgtaaaaccaatatgtttctgattaaaagaaaggtctagaatacaaaatcgaaccaaatccagagagtatgtactgagtatgcatccaccgagagtatgcatccaccgatcttgccgaggcggctgcagatcccgctccgcggaaccggagcttttttcttgtctgccaggaacactacactccaagcaccaagccgtataaatcttcttatataacctcctaaatgcaacccatccgcacctcgcgacttctgagtcgcgcaactctaccctcccaacgccagaatgtgtgcgcagccccccaccaactcaaggcaagcacgaggacaataaacacaacacaacggccaagtctgcgcctacctctactccccagcaatggcaccaaaaccaccacacgagcatttggcctgcctgacctatcctccttcctccccaacagcaacaataacaaatccccacaccgcgtcctaaccgccacccgcaacctcccctacaacccaaccctgctatacaaagtgatctcctcggtcgaatcctacagccaattccttccgttcctcaccgcctcgaccgtgacagcgcgcgatcccgaaacggggtccccaacacaagcgttcctgaccgtcggctacggcccgctcagcgagacgttcacgtcgcgcgtgatctgcgacgtcgagaagctgactgtggaggctaagagcggggccaagtgcggtcaagagggacagggtgcccaggctagtaagagctcttcttcgtccgggctaagcgggttctttcccggtgcgaatgagggccttttcgagtacctgactacgaggtgggagctggtgccgatttcacctgctgggacgcagggtgggccgttgactaaggtcaatttggaggtgcggtttgagtttcgttcgcagatgcatgctactcttatgagtgctgttgaggggcagatggccggggttatgattgaggcttttgagaagcggatgcgggaggttgagggtaaagggcagtgaagtgtcaattgtagattggattgtacattagtggagttttcgtattcgggcataaatggcatcacactacatatgactacttgttagacttgcatctcttcgactcttgacagcggaagggaaatagagagcatcaccaatttgattctattggatggatcgctgtacatgctcaatcagaagcctgtgagaatgagcaatgagaccaaaaaaaaataaaacatgatagtatataatacagattatccgaacacagaaatgattttcaacttaaagcatgctcatactccgatgacggttgatagagttgcgtgagttcttcatcgagccgacagcattgtagttatcgaagaccacatcccagttaatccgatcccaccagcgctcgaggtactcatcctttccggcaataccgtagtccatcatccacgcgtgctcccatgtgttaacacagagaataggctgcacgtcgacggcaccgggcgcgaggctcttctggttctgggcatgggcgcccatcgaaccggcgaactggttgcccagctgtgtctccggggtgtgggtggccatgtcgacgggctgccgccgggagtgggcggccgggtagggcgagccggcgctgtaggtgcagaagatgtgcatcatgccttcgcgctcgaggttcttggcgagccacacgaatccggggccgaacattgagcttgctgtggccaggaaatccaacttcagggactcgacggaggagcaggtgtcgacgatgtccttggcgaacttttcggggacgctggtggctgtgggggactatattgggcaggctggtcaggattgaatatgtatataaagggatttatattgctactcaccaggcagttgaagaaaaagtggttgttgtgggccattgaggcatagttgaacaccgaggccatctccggacgcttggagtatttgaccagcaattctcctggtttggcatctgcgtcgacggtatctattgatttcggttgttagattggtatctccgtgtgcaatatcgctcaattatcggattggggccgaattagatcaatccatcgttccacagggtcggagtgtcgggctcaccttgtgtcaacaggttgagtttgttaacgagaagactctggtattgggtccatgagaagtcgaacgcctcaggcgaaaggaactccggaacaccattctccttatagtaggcgtcgtgctgcaattggggaatgcgatggatagcccgagtctggaagcgtgagaaggcggaggtaggtttctggataaaacgcggtcagtcaagacggattgagcggcggagaaagtaagtctcactggagagaaagaggaggctgcgcgcaaagcgctttgcggccgggcgaatcggttgaacatgacgagcggcactatgaatggtcgggttaatcatacagagcttcgctgtcgaagaatttccctcccgacgttctgcccgatcgggattagtgtggttatgtaagacccctggcccaacagccaatcacatcgtccatatctacttcatctctctaagcgccttgaactattctgcacccttggccttcgtccaatcctcgtcctgcaatcccctggtccgatgtggtactgtaacaaagatttgacttagcgcccataatttgccattttaatcatgccgctcactctgaaacagcctgggtgctattttaggactgcggcgcttgcaagtactctttgtctacaggatgacagtgctcagatgcctttcaataatgatatatcctggctctttgactgatttttgtttcagacggaagtcaatgcctttgtctgtcagcaattgtcaatctttctctgtcaaggttccttctgttggtctatctacttgcttgcgttatacgtgaagattctgtcaaggacgctatcagtctatatctttcggaaactcctctgaatttgaccgtcaaatactttcattcttctcggcctacatactcacgaccagtatgacgaggtcacggccatccgttctactgctcttcaccctgatggcaagcatccaaccaggactagcatatagctctttcgatcttctctcaagaagctcagacgcttgtccttcctcattttctcgctgcggcggtacgaaacttccaaatgatttctgctgtccctcagactccacctgcatcagtctagatcaaggcagctcctccatctgttgtcccgccggtaaagattgtgactatatctcgccgattacatgtgatatacagctgcagaatgttactatctacccggagagtgtcatcaagacaactcgtctgggcgatagccttcccaaatgcggcgatgcttgctgcccgtttggctacacctgccagggggacaacacttgttccctgaaccaaaaaacctccactactgcaacagaagctttatccagctcctctatcactacaacatcatcatctgtttctagctcctctaccaacacagactcctcatcgacaacggctacaacctcaacaatctcccaagcaactatcacacccgtgccatctccatcatcgacaacgggtacaacctcaacaatcccccaagaaactatcacacccgtgccatctccctcatctgaaaaatccacaaactccactacatgctcagcactatcaacctcttgtccctccttcccagctggagctctagcagcgggcttcttccctggtgcggtcctcggtgctgttgccgccctcttaataactttctgtttccgccgtgcccggaaagacgaatgtgaaatacaagaaggcaaaaatgggcctaattggtcccaacgttcttcttccggggcaagattgtgcatatcaaaccccataccccaagacgatacctcgtaccgcacagacttcctccgatgcccaccacgagccaagcgctcttcaataggaggacgttccactcgcactgtgatccaccgcaccggcagcagagtgcggagtctgttctccggttatccaaggcaaaccgctcgactagacaaggatgtgccacctatccctatgccaaaccctatgcatccggctccgtttactccgccacgacagcgtcagccgagcacagaaagcatcacggtgtattcaccgcctgaatcgtggctttcgcaatctcgcactttgttgggaccaagtccataccctggtgataccgctaggccagataccctgtttagcgacctgatgcgggttgttgggtctcctcatgatggcaagggaaagccaccttatccgactaatgataattctcgggaaaatccgttcagagatcctgtgcgttgataattgaaggatgtgaagcctacggggttggattgagccgtgcgctcagtcatcttggttcagatatttggtcgttctggcatattgattgtgtgccacgcacgatatccatattgtattgtttcccactttgtttcgaggtacctgattaattctccatctaattcaaatatagtgtaccgctttatgtgcatggtcaatatctatctacgaacagtgacacaaggccctgggtaggtatatcctcagaaggaaaaatagttcaatgggtgtatataactcctagaatacataaatttcgtattactctacgatgctgccccgttcgccttacgtcgagccgcaattctcttgagctctttgagcaacccaacaacaagagggacaccaattggtcccagaaggggtagatagacagccaccttgtgctcatcggggaaatagacctggcccaccatactcttttcgaagaagctgcgctcagcttctgtctctgcgactcgggcgctggcaagtgcagcgccgaagcgaccctctcgcaagtggacacaagaggcactcaaatgagagagagtggtggagaccgacgtagccacggttgccgggatagggatggagggtaaagacttagtaagacgggcaagcgagcccattgttgatgaggcggagagcaacaagctggccgcgcggatgcggatagatgtctgaagacggagtggaagagaggcaggggtgcttggagtgccgaggagggtcaggagttgatgagagaaggtcatgaatgcaggacctaaagagtccagggagaggtgggaaggattagacggggcactctgctcgccggtgttggaaagcggcgggttaagaaggaaaaccccgccccattgggggactatccaactagaagcacggttctccttgacaatgagtggagactgcgaagggtctgggacgtagagaatgaaattgatcgtcgggccattgccgatgctcgggttcagcggccactcggcagcattgacgaaggcacttaaaccttctttcttcaatgtccatgccgcctcggattcatcatactcgggcttcggcgcggtgggtgcaaaattggcatagagctgtacttgcgtgtcgacagtgaaattgctgataggagacaatgcctgcaggaggggggagacatattctttcaccgcagcctcaatgtcccacgaggacggttcagacccgggggtaaagagtgaaaaggagaggtggtaggtttcggcatatttcatcgatcggcgcagtcttcggtcgatatcttcggcgagttgtggtgaggtcgagtcaagcccagcggtatttccagacaagatgtgcgctatagtagccttttcctcgccatataattgctgaagctccgccgcaatgaaagtggagaggggggagttggaggaagaaggtacggggacctggctcggcgggtagaagatatcgagctgtgtcgcagctgcatgaagctccgaccaaggacttgctaggccatcctggggcagtaatcggacggtcagtgccgtatccgctgtctctttcgcagggtattccaggttgtcttcgccgttatgaactgccgtcgtggtgccgttggtcaacttgagccgaaggtggtgagctgcgaactcgttgaggtcatcgagagtatgctgcgtcgtgcggagaaggtgctgggcttcgaaagattgcatcgaaggtgtcgcaaggtgaatatccaatggaaagactggtcggcatgcctgtcaaaattatgattagcatctaccaagtcccaaagccaaaggcgatgccgcaagccgtaccttgccatcagcccaatccaccatctcctcgatggggagagacgcccggtagattgatgttgtcttccaccatatcggaaatccaaggaatattattacggcccaaaaggctgctatcactcgaaatcgcgtttgaagggcggccggggtttctgggggtggagcgcgcttgacgctgagctggtcgccttgagaggacgaagcctgaggagactcctggtctcctgttttggtcgtcatggtcgggacatgctttgtgctctaaatcggagcaacaaaggaggaagtgttctcaagtcgattgttgaattgagggagtttgccgggcggagaagccaaggactactacctaggtggccgcatggagcaacaacagtcggctatactccgtacgacatattttttgagctgaacttttagtttcataatctcttaattaattgatttgggggtgcgatctctgcacccaatggctcaaagcaattcgcatccaatctagcctttttaaagaaagtcccaaaacgggtctaggatgccatcatcgactccgagtgctcttaaatcacaaaaaaacaagggtatattgacaagtaacgccgatccgatgtagcagtcaaaaggctaggcctccaccgctgtacctccacatgcaatgtctagtattccttctcgaagatcttttgaataggtttagcagcctaaatgtcatgaaacttattagcaaactcatcgatagcagacctggacaagcggtataacatacatcaatgaacttttcgagatcttggtcgaggttggcaaggtcattcttccttttcttgttctctgcgatcaagccctgcttgcgcttcaaaagctcttgccgcgcttgctccagcttctctcgttcaacatgctcgtgttcgatgcgggcaatcatgaggtcatgttcgctggaattgcgatgttcgggatgaagctccaagaattcttcgaccgggatcaaggggagggagaggtatttgtgactacagcaaatatgtcaatttttcgccacagtaagatgagatgctgtgagtaggaaattcagatcacgtactcatatgcctcgcaagccgcaatctcgcctgtcagatgcctctgttcatagtacaagttctggagctgaagatgtagccgatcgatttcctgtcgagcctccgcagttgattgcttggtgtcgcgcacgcgaaaaatggcatcccgattctgcccgcgaagttgggccagcagtgcgaaaaggagtttctgttgtttagatgcggctaaagataattctcggaccttggcggcatcgttgggctgggtttcggggttcaggatggtgagaagatgctgacactgcaccagagtctcagcgctagtctgaagcaccggcaagagcgactcatcggcgacgatttcactgatagccatattgtggaaatgggatgaatcggtggcgagagatgttgcgggagaggcgggatcaatcaggatgttcggggccgcagtgtgcctcggggacttagtgtggttgggaacttgcccttttccccccagcgctcggttttcccatcttacactccccctcctttttttttgtactttctagatcctctatatgcccctcattccttgtcatttaaataagctcgtttcaacccgaggttgtgtcttgggttcttctccggtctcccggtacttcttctccgctacccttgcctctcaacgcttatcgcccatcccactccgtatggccttcgactgaggctgaacagttgaactctcaactacaccccatggcttgcggcgcttcttcaatgacggcgcagtctcctgaagcagaggcatttgcctctgccactgcgacccccgatgagaataccggtatgctccgtgatcggcgcagacattcgttccatgcttctagaaaactctcgtgcgactatcaagatgcagatgcagtatttatcagggtatgtacatgcattaccagtggaaaatatacccgggaaatagtgtgtctaatcaactcctaggtcgaactcttcttatccgaactggaacgtcggatgcactggatcgagcaataccggaaatcccacatggtgcaagtcgatgccagtctgaaacgaggctatgctacgctggaagccgtgagagatcaatgctctctcgcctcgggagagttgatgggaagtggcaaaaagcgggccaagattctggttgaaaccctcgaggatggatacaatgaagccctggtgaccaaggagactctggaacaaaaggcgcaagccggtgtgcggttaatggagtcattcttggtcgaacttgagagcaaagtgcatgcggttcgcgatcgcggcatctacggaactatagatgacgggtggaaagcggtcgattcgggcttggttcacgcccgagaaatcgttgacgagggtatggagcgtgcccgccatgctcgtgatactctgcgagatactattgaggaagctatccggctagccaaggagaagcgattgatcaactacgatgaactacctcacccatggcgcgtcaacccgcacatcctcaatggctaccgattcaccacttccaaggtagaatgtgtctcgtcgattttcgccttctcgaatgaaatgttcaacatctggtcccatgtgatcggcctcatcatcgtcctagccatcgccttttacttctacccgcttcacaccaatttccacttgagctccaaatccgacgtcacaatcgctgccgtcttcttctttgctgcatgtaaatgtctagtctgcagcactatttggcatactatgaacagcattgcttcgcaaccattgatggaacgattcgcttgtgtggactacactggaatctctatgctcgtcgctgcctcgattgtgacgaccgagtacactgctttctattgcgagcccttctcccggtgggtatacattctgcttaccatgtcattcggcatcggtggcatcattctaccttggcacccaaccttcaaccgccacgatatggcatgggcccgcgtaggattctacgtgacccttgcactcactggtttctcgcccatagcgcagcttatttatacccgtggcttctcatggaccatgtatttctatgcaccagtcatgaagagcatcatggtgtattttatcggtgcctgtgtctacgcttccaaagttcctgagcgctggaagccaggtcttttcgattatgtcggtggcagccacaatatctggcacctggctgtcctgggtgggattttcttccactatcacgccatgcaggacttgttcgcgggggccttccaacgagccctgggcgagtgtccgaacatgacgatgtgaagttacgtccaaccaacctttgcattgtccattgctctttgccttttgctcatggacaaatatcatgtggtacgtggtttcgcttttcaacatacagcgattgaacgtttagcaacgtttaggctcacagtttgctacgggtcacgacttgatatggccctttgcaatgaaaaattttatctcttttacgagagttgtcaccgttgatgcccattttgcctgcatggatggtgtttgtcttgattttctactcttcttcttagagccttggattgtacataactccgatgtctctccctttcgcaccattcggtctgtctagatacagggtgtgcacaaagatttttgcttttttgcgtgtacttttgagattcttgctgcacttaggaatctacatattgtagactccctttgtcaatatctgtagaacgaacaaagactgatttcgatatattctatgtttcctttcgtaaattacgtatctctatcatcagccatgggtttcaaagttgttcttccgaatcctataaagcattaatcctctcggtatattgttttatgtggaatagagagttatcttcctatatcggaaccttgatggttctctatatggtaggccttgttcctggactgtacttgcaaattaaattccatgctctaatgtatgtgtcgtatattcataactccatcatgaagccattgccctatatacatagcaacccaagccatttcctcgcggcctttcgaggtgttgtatcagcttttcgcactggaaatgcgccaacagtttggtgtttatctcgacgccatgggtttgagatacaccagaaagcacggggttgagtccacgcatggccaaaatcacgagatcaagattggacggtgggaaagaccatcacaattattgtgacctgtacttgtcggtagacgatgaatttcctgtctttgaggaggctttggtgaatatttatagccatctgaaatgaccatcgcagaattggtgattcagatttattgagtgttctcggtgacagccttagcctcagactcagctccaccgcgctttcggaagttgccctgcatccagcagcggtacatcttttgtttggtcccacggttgacaattagtcgccgatcagcccccatgttaaggacctcaaacgctccgctgtcctttgccagttgtttggcctctgcagacagctcctctgcgggctgaggatctttcttttcctcggatgcttcttcggtggggttctcatcaccaataggaatctgcaatccgctttctgcgctccaggtactccacatgtcgatgagctggtccttatcgaagaagtaaacacgtgtgccatcacctcggatgtagaaattctcggccatgtatcgacccttcttgaatcgcacttgggcgaggtcaccacggccgtagtcgcgaaacaacacacggccaccgggcttcaggagacggtagatattgcggatagcctggtcccactggttaggggccagggcggagaagatgaagattagaatcacaacgtcgactgagccttcggtcagaccgggcggaagagagtcgccgttctcgtcaggcacagcggttgcgtcccagacatcagcggacatgtatttctcattgtagagctcgctctcgcgcatgaccttcacggcatacttggaataatcacaggcatggactctcagatgctcattctcattgttggccagcaatgggaaggcggtatttccggctcctgcaccaacctccagcacaacctggtgacccgcgtccttttgtgtcacatcagcgagaatggggaattcttggcgcagccactttctatccttgaagaagttggctgtgttgttcttatagaaaaggtcccaccacttggcggggtcttggttgaaccgattgcgatcaaagtccgacacacgtgtttcgcgctgtctcgcatattgggtctcggcgaaagccttaaactcatcgtctggctcgacgtgatcccaagcattgaactcaaaaacatcatcgcccttttcaaggtatcttgagccgaattggaaggggtcggtccgtttcaggttgttgctgggatcgtgggaacgatgaggatcgacctgaggaggctcgacattttgtgtcacctcttggatactgggatcgacggtcatgacgttggttgagccttgtagtagttctgattgactcgagatttggaattcgggaaaagaatataatcactcaagcgatggtcgagaaggcggggagaacaaaaaatttccaggcggcgacgcgattggcggggtgcttggatcacatgactggattttgcccaaatattttcttgtccctcgacccacatgactgttcaaccaatcatatgctctctattgatacaccgcctcatttatttttgggtacgtcggatcttatcgcctatcgcttatcggtcttttacttccgtggacgacataagatgctttactgaggatcaatacgtctcatatgtgctagaagctcgaatatcattatgctgatataagcgctcaaagattgtgatggctagctaccacttaggctagtaatgcagaaaaatacttgatgtatgagactgattgtttaagcagatatctttcttagcttgatgtttttttgtcaactcctaattgacttcgttgagtctcatttgatttggctagcttctcctggggcaagtatgtttcagagccaatggacgctcgatagtatctcggaaatagttgcagcttgcatatcacaattcaccgatgctagccggtgcaacctagcgaaacctagcattgtttgacttaccatgtttggctctatggtattattatgagaggtccacgttttcttacattatgagccaacccttcattgaaacagctggagatgcttttgatatccattgactgcctcaggcacctatactctcttatcagctaatcagagttcctgggaatctggatgcctgcgggtgcctcgtccggtcagctttctggcctttctttcacccctcatttcctgcctttctttctgtttgagcatgattttctagattcatatttgattcatattcttcctgtttgccggttcaggtctggggcttatcgacgcaagtggggttcagcccactatcggcgtttgaggctcaacagtcgaactgctcatacgatagttcttgtccggcgttttttgctacagaactcacgggccaactttctctcgctatagtcaaatcaatattggctttgacacagtcaattagaaaacagtctctcattgagtcatgtatttcctctcggcactctgcgggtgcttcactcgagacgagaatctctcgcagccccatccctcttcggaggtggtcgccaaaagactcagccccaacggcatccagacaggacgctttacactctccgctgaaggcgaatttatccgcccagcgtccccagcaccgccagccgggagccatgggcacgggcccccgccttctgactcgcaggatggaggctattctagcgtggtccctctcccgcagtactcagcccgtccaatgagcctccacgagaagactttggaagcccatatgcgtgatccatctatttcctccgagtctcagaacttctgccccaacgatgaaaagaacgatcattacgatggagatctcacctccgatagttcatcagccgtttcctttcccagcagctacggcaatacctccaccgcaacgagggatactccaccaccgccatactctccccgtcaatccgtagtgctgagtcgctcgcggtccatgtccatctcgtctactatggcggtcatcattaatccacctcccgctgcccgcatgagcggttcgcggactggacctacatactctgaggaggatgatcagtcccttcgtcgtcatcggcgggtctcttgggagagccgatgatagactcgtttaatacattctgaaagaacgtttgcttgctgccctttgcttattagctacctgcttaatattttccacatcgctcttttggtctaggcgatctggaatcgtggcctgtgatcgtttgggatcttccattgtcgatttacatttattttgcacgactgctgcattgttttctttctctgcttatcatttttctttggtactgttctattgcacatgacgcgacgacatcatttatatggtatgactgggactggacttggtgcaaaaagggatttcttctgggatagccttggatatttaatattgatctgcacatactcgcttgtcatagatgcaggaggacaccgtatcgagatactcggttaccggtactcactcacatccagacatagtgtaacaattatgataaaccgaataaattatactatatttcgtcaatcaaatgttccacatctagcttgattactactatcctcgatagaacaccaaccaacaaaaagggtatcaatgcaaatccaagatataaaccaatttcactcaaaccaaatcaatccaactcaaaaaccccagcccgttcctgctcatgtctaagtaaatacccacaacacgacgccggaaactctaacaacctcaaaaccaacggatcacaactatcctccagaaacatacagatagccgtacactccgaacgaaccctcatctcaacccaccactcctcaacataacacataagccccaaccaccaagccaacaaaaccagcgccggcgcctccttcctaagcaaacacccatagaacggattctccaacctccccatccaagtattataaaccttaaaactctccgtagtcctctcaaacggcaacaaccccatcagcatccgcaaaggccacaaacacggattctcctcgacggtcgtctcctccgcaatcccacaaagatccgccaaatccggatcaagacccacacgcccgggacgcttatcctcgaagtccagcgatgcatcccgcgactccatgaataccgtccaccacatgctctgcgggagccagtggcccgtgcgctcgaggaggtagcgcatgccggcttggattcggagccaggttagtgcggttgggtctgttgtgaagacgaaggaggtgcgtgggttgaaggtttcttggtggaaggagtgcatgctgactatcatgcaggtggagtagagcttatccatgttggcgcgggttatggttttcgagacttcggtcgagtattggttgattgtttgttgccagtggtaggcttctgctaggcggtagtctttgttgtctggaaggagggtgcagaggtgggttgttgcggctgctattatggcgtgcatgaggaagggggtctgggttggttggtggttagtttgggagttttattaggtagattatagctgtgttttgttgaggtatggcttttagataaactatggatggacttacttcgaaggcaagttggaccattttgcccattacgattcgaacgggtgtttggctttcggttgcaaaggctggggctttgtggaaatgatgcaatgcttccaagatgcgggttgattctgtggcatctgtgagtgctctcggcagcttgataccggtagcagagggcggttgcagtaattcattcaatttgtccgcgaccatcattagagacattgaagaggctagagaatcaatcgagatcaagtcggagttggtcttgataaactgggaaacgatattattggtcttctgaggttgaggtcgggctggctggcccgagtagtcacactcgctgccatgtttttggcaccggagacaacgtggttttgcttcatcgcacttgatcggtcattatcagcagacggttgataatgggggcgtccgaagtaccttgactcttcgttgcttacagttcacacagccggcgcgggattttcgatgagacctgcgggaatgatagaccggttcagatggttcggacccgcacgctagagaatcctttgatttgtagtttgggattcgaaagaccatattctgcccctgcatgtgtctagacgagcgtggccggggcaggggtttagattgcgtgtcgtccatcgtttctcaaagtataatttgacacggggaatatttgccgacggtctattaaatccgaagtacatagaagactatacgaacaagctggtcttaggcgtgcggggagtgtgtccgtagcctttctcatcgagatatggttacgatatagctctgcgcctgagatgtcagactggtgcaaggcgactagtgaagctcaagtctgtagaactgcgccttgttctaatcagcctggccacttcatgtgtccaaatagaagagaaactaggtggtgacggagaatacgaggaggcgaaggagaagactagaacggacgctatccccgattaggcaattctcgtattcgcagaaacaatgagaagttgaccagaaactgaataaaagacatctacttttaggaatatattgaagctatgaagacctggaattggattcgagaaacgccatgcaattcatcactcatcgaagatcatccaagggggtttaacccatcttggcattagagaaatccatctctgcaagcaggttagcaacatattgaaacgaaagaacatcgcagaaattcgagagattgaaaaggaaacaacgtaccgggatgctcagcctggaacttcttcagcaaatccatcttccgctgctcgtcactgctgggaccacccatctctttctgtcgctgatcatacatcatcttctcgaccatggcgcgagtctcgccatccagatcgcccagactggagttctcgggcgtaatcttggtgacatcgattttgggagcagtagtcacaacatgaggccaccattcgaccttgttcaccttatcgagatggatgctgatttccttgccggggaaggtgggggtagtctcgagggtccaagaggattcgtcgacgcggatggcgtgggggaagtcaccctgaacagaaaaatgggggtaattagctgactgatttttgggttggaatgtgttgatttagagtgtatggtgtaattctccgggggtggggaacagtggacatacctcgatgaggggttcttgtcccttgattgcgacgcggagtttgttcttggtcaacagcacatccaggtcgcggcccttgaaattggcaggaatcggtgctgtcacatccacatcacgaatcgtctgtgtccacttgtaagggagctgggcctgttccgcatcctcgcgggctttgcgctctttgttctcgcgttcacgttcggctaggtcggcgggggaggggttttggtcgagatcggcagacatgatggcaggtcagaaaaagcaaagatagagtaaggggggctttttgatagacggtgtaacggtgtacaaggtaggcacggagtatacggagtaataattcgtgttcaggtgaggatggaggagcaaaagcccaaaaaggaaagatgtggagacacttggcttttttccccgttggcgcttttgccgccagccctaatcgcctatgacttttgcgcaataccttctacaatgcacttgtactcggggatcttggaatttgtttgactgcataatctgaaactggagtacttgtcaagtgtcctttgtccggtttccgtattcaacatctcagggcgcggtcatttgagccgggattgcgatggtgctctccagaatgatattatactccggagcagggaacgcatatgacatcagcgatcgataaaccgcagtagcgtattccgctacgagcactaatcaagtcagaccggttgactccacaccactgtgatatgcataccggaaaagcgcgcagcagggcgtaatgtcacaataaaccacaagggtaatgtaaagaaaaagacttgaggccccagcgggaagatggcgttgaccaaccggtcgttcagacggacatggtggcgcagccagcccaggtgaaaagtgatgaacgcaagcagtgccccgagaagcacaccgcttagaatcacggtggcattgtgcgcgacgacatcgaggggtctagggtccgttaggaaatgtctcctgcctctttgggaccaccgacaagcatggcttacaaggaagggtgggcgacttgatcgttagcggcagccatgacatgcatcggctgaaaagggatctgagggtgattggcaatgcagtggacaaagtatatgtcgaacaaaccaataaaccccagagaggcaagtgccacccccacttgaggctctctctttccttatttaatttattttacatcgcatggagttgtgtcagtggagaaatataaggaaagtgtgttctcctgcatgttgccttgtagattgccttccaagttgtaaagcgaatgaccgaagcttcaaggtatagaatgtacccaaaaaaaaaaacacgctctgatcccatccatgctctcatcatccgtagagaaaaaaagaagaagcaaacaaaaaaaagcacacgaaaaagcaaacaccagaagctcggttcccaataaatcccacagcttcaacggcgctggcgctggtcgtcatcatcatcatcattattcttgttatttgccatcctcgctagctcgttctctatgctagctgtcagtttccctcttctacatccatgtcagaaaagaaacgtacctcgaatctggtcgatttgccttgcggtgtcttgaagcatctggtcccatttcatctggtactcttccacgattgttcgcttgtatctgttctgtggctcctccttgggctcctccttgggtgtctcgattttgtccatggtggatatgaaagtgttcgagaatgaagtaggtatagttctcagggggctcaagaaggtggaagtgggtggattaaagtcaaatcgacgtgcgacaggaacggctttatataaacgacacgcagaattaaaatcaattaaaaatcaataataaatcgtcgacactagaaccctgttcttaatttcccaaagagaaaaaaacaaaacccaaaaatccctgtcaaataatgttggcttcggaaatagaccggtcacgcgtctaaaggtcaaggaacgcgttcaccgacatcttcccttttggagcctaaattgaaaacgggccatcggtccgcttagcctgtcttagggaagagctgaattggcggttgctgattggcgagatcagtttgtgacgggtttttttttatttttaccccttgagcaaaagtaccgtttcagaaagtgactggactggggatgatgtcagaccataacgggacctagcatagtacattctgtacaacagttgtactccatacctgatcattccaaatctgccttgtcggtacgactaataggatggcttccagcgtaccgaagttgtcccgcacccaatcgggggctgaggaaccacatccgcgccaaccgatcggatatcttgggtcgcttttaaggggtgggaaagggtcgatacgtatcatatcgaagaagaatcacaattttaaagaataaaaaatataaatatataaatatataaataaaaaggggcaccggggaagcgggtagaactggattccctcccagtgatcgcccgatccacccgaagttgatacttctgcgatctataacggagtacggagtactccgtactctatggatatactccactactttcacaacgggcaacaaaaaaacacatatagatcttggcgcccaacaccttcggccctgaagttcagccctgatgtccaacccggagtccaacttggagtccaactcggagtccaacccgggagccaaccctccaaccctggaaggctagaaggccgaaagggctggctgaatcacacggaccgctcgaaaaccctgtaccactgtagtatgtacaaggtagagcccaacactacccgggatcctgcatggctcgattggcccaaatagcgtttacaccgccgatagccccgggacgtgcagagccgtagacgttgcatctcgacaatccacgtggtttgcatacgctagcgctgtgtcatggccgttgtccttgaccgcatccctctatccatctacggcccgacacgttctgaaacgctaagatgcttctggtgcttttgtcaagggcatctcagcacagtcagatgaaaccgcagttgggatgtttgatcggggctatgcttgttcattccagctgacggaagatgatggtttaatgggcttgattacattccgctatctgaacggagttggtcttgcctgtgcattattactggctgtgattatagtttgtccagggtatcaaaccttagactcaagggttcaatatccaacacaagggagatacggtcattggtctaaggctacaaggatgaaaagataaagagcaagcggtaaaataatacctgatcctttaagatatgcctctacatggtcaaattccacattcattccccatgcaggtcggcaaatgaaagtaaaaataacaaataaatcgtaaattctggcgttggtgcctgcatccattggccagttatgtcaacgcagccctttccgaggaaccgcccatcgacagcctcagcccggtttgaagagggggtggcagaagcacgtatgcgcaatgcgcccatattcacatggtacaacgccgggttaagacatgatattgatcccgctgggatagattgcttagaaaatatttcataagagtagatagactcccatatgacgccagtatatgagatcgctgaaaaaaccgagagaaaggaaacaggaaaaaaaaaaggaaaaacaaacttaggatgagaaccatgaaagtccgaaagtccgaaacggagacggtgagcagcgcctcggactaattcgagtctgggaggaaccagtcaaggtcatcagactcgaaatgcgaggcggatgtttccggtactgcaatgccaccttcgaaaggatcgacaatcccgtcatcaaaagggaccgttgtctccgtctccgaaggcagactgctgcgccgctcgacgaggtcaaagaactcacctgcaaactcagctagctcattagccactttgagctccaggatagcttcaagcacttgcatttcctttttccatttgcgatcacgctgcgccttttcctcctggcgacggcggcacaggctgtcacgagggaggtccgccacgcagttgggacacaagtaagtttcctcgcaatacgagcatttgcagggggaatgagtgtatatgcagtccgcgcatacatacaccctgcagcctttgcattcgcgcagatagctagagcacctaggacgtggatccctgataccgcctcggacatccctgattccggttataggatcagccggggggcagaaaaaggattggcaaccttgccatcgtggttcgaatagcggcgaatcaaagaaggtggaggatgaggatgagggaggggaagaatggtcagatgcaggggccgaaaatgagcgagttggttggttggagaagaaggaaacaggagccgactgatcaccaacatgtgattcgggtgtattttcctcgtccatactatcctggcgtgaatcgtcaatgtagcttttgttggtcgagtcaagaagctcctggcttctgaatagtaggtcgtattcgggaatttgactagaaataagagatcccgaaagatttccagcccaccgattttgaatgatttgcttttccgtctcaaggtctcggtagccgcaaatccttaggcgaagcccgcggaggtcatgctcaatacagagaggccttgagcagctcttgcagtgcaccttccactgtggtgaatcgtaacatccttgacacaagttacgcggacacggtgagacttcccggttaggtggtcctaggagccatttcatcatcgccagatgacccgtttcaagcgagtagtccggcttgctcggatccccatatgcatacttggggaacgtcttgctccattcactaacggtgtactctagatcttcccaaccttggccacgaggcaaaggcacggctcgtacttggtccacctcaccattgcgaggtccgatgctaatcccaccgcccccagagaggtcaggcttggtgcagcaccaatggaaattgaggataggtggtgggtccaatcctgtaccatggggttgatggggatcggtcagaatatccacgggatcctgcattgagcctggagagtgtgtggcccctggtgcccaccagaaggaacccggtgcgttctgggctttttcagacgaagatgttgtgcttctgtgaagatacggccgttcgtgggcacagcttgcgcagagtgttttacggcatccgacacagtgcatcaggacgctgcaatgttcacatcgctctgagatatcctcgaggcagttgtcacagcggatcttgtcgacaaattgggtatgactccggcgcatatgggcaggcgtcattttgccttcaccccagtcgataccctcgccagttcctaatgcctcgccataaaatccagtgtcgcgattctcccacagctttccatcgtatacgtgtggctgagaagactccgtttcggttgggccgatccaatttttggatctccagagtcgatcaaagaccacccaaacttccggcgaccctgctccatgcgggaacctcgatttgacataaccggctctacgagcgcatctaccggcaggtgtggtgcaccaagcggtatcagtccaaatgcctagcttgtggcagatattgacaagttcatgggtcgactccgcgtcagcgtccttccgcatcagtgaggatgatagataagggcgtcttctatggtgacgacagcgataggcgtagatactcttgagagcaagctgttgcatcccgggagagctgccggtgttattctccatgtccatgtcacactgcagcgcgaacatggtcaagaaaggaacgatgtgatatttcaaagacacattcttgcagccccgaacagagagatgtaccagcgtctctcgacgtgaatgcaacacggttgaggtcaggttctcccccgaaatggccgtgttatccagttctaggcttttcaaacacctactgaatgggataaccacattcatcaggaacatgtctagcgcgtaaggcctggattgacgcgcgggcgctgtctcaaggccgcttgggtcattgatttgaggatttggcagagtgcttgaaggaaattgtaggcgaaacgagagtgacttccatgcggtcggatatgatcgaaggaacgtacggaggtaatttgaagtgtgatacagctttatgatggtatcggtcgggatctgaagtaataaagactcgaatataggtgcatttgttgttatcactcgctcaaaggtggacagggtccgttcttctgggataacagagtgttgtaaggcattttccagcaccgtcgggtgcgacgctggatcctcagcagcagcattccccctagccatagtgtcgagatcgtgattcgtcatatgttctgggtgaacaaaagatgccacttcttaggtcgaagatcgaaatggcgcgaggtcgcgagctcggcggttagagacgcggcacatgataagacaacttgaagatgcaatcgaggggggaagcacaccctgaggtaagccaccatgcaaggccattaaaggtaaagagtcgataattgaaaagatcaggtagcaagggctgacgaattggggtatctgaagggggacggagaaagggaggggtataaaaggaggggaacagacgaaatccccaaagagaggggaaagcaaagaaagagagaatgattacttatgcccctatgacgctgaatcaatgaaaggaagcaaaggcgtaggaaaacaagtgcaaagggtgagcgacacaaggtgatatccggatgcgcccgttaggagagaccagcgtcatgtgatagccatcaaaccccggattttcagtcgttcatagattttgttatgcataggaaatacgatgcactgatcgctgagtctattgcaaatggtttctatgctaggccatgtggactaatgtttgtcggtcgcatcgcctacagtgtagcccctcgcaatacccttgcgcccttccttgactagggtactatcatccaagtcttcctcatcatatcgaatatcaaagtcgctacccagacccttccatgtccgttgagatcgcaagtattcagcccctggtgaaaaggcaccgccgatcatagccaagtcacccttagctcgtcgcgccagtgccctagcagcggatggcccgctggtggatgatccatcaacttgagaagcgcgaggcgcgggatcccgcattgggcgggattgtgagacgtatcgaccggtccgaaagtcaaactcaggcggcaccgactcgggttctgacatgtcgtcctcatcggacatggttgtgccagtggatgtctcctggtcatctccatttccgttgacctcctgggctggtgcgtcgaggactgcctggaagtcactctgccacgctcctgtccatacccggtctgagtcatttttcaaggccagctctaattcgaagggagtgatgactggcttccagaaatccttgctatccaccaaagagctttcccagcagccaatgaccacccaaccaccgatttcactgaaattggctaccttggcagcattcaatttgccaaccacgaacatatagctcttcttgcctgctttggcaattcgttccttgacatgttccacaatatgcaggtagttcttgacactcaaagtgttgataagaataccccagataggcacggttgtcagagaggcaagagtgccatagcggcgtcgcaaaaccgcagtagttgaagcaggcaatggcttaacgttctcatttgaaaggtcgttggtaggataaatatggattgctgcaacgcgagacgcgagcgtcatcatgagggctgttggcggatcagatatgtgaaacagttgccagtcggccagtgtctcgggcgcctctcgaaccgactcgggaactgtgcgattgggaatcgatgatgaaggttcatgaacaacttccgttgcatatatattgctatatccctcttccaccaggcgagcgtataccgtaggaacgtggtctgcaaaggtaacgtcggccgcgatgataaccttggtcgttggatcaagataagttgccttgaacgctcgtatcactggttcaaggggcagatccttatgtgtgaagacatggatcacgggtagacgagctgttggcgacagacaggacctcccgtaatgtacaaccacatctgcgtccacatgttccgcggccacttcgtcaacgcagcaggtcccgtaggatgtatcggccaaaattgtcaaccgaggagagtgttgttccgttttatcctccacctggagctccgttatcgagtgagcaaggtcggtatcggcgttgctagggtcggtttggttcgagggctgtgtgccattggtgccgacttcttcgcgttccaggccccggctgagcaattgaaatactcgcggagcatcaggaagcatatcatctgggaactggagcgcaatgcgcttgtaccgcgcttgccgaatatccttcaatgtgcgctcgatatcgtaggtaatggaaagttcatcgtctgacactggagccgttgggtctcgcgtcgccactagattgatttcttcgagaatacgatcatcagcagtcgacagcacaggggctgacttcatttcagaccccatttttgtaagatagagggaggaagcgtggtagtgaatcaaaaacgacgaaaaattgcaaaagttttggagaaaaaaaaaagatccccccaccaccccgccaatggataacggtaaaatacaatagagcccattggcagacagcagaccaactgcctagagagcgaattttggtgcaaacataatcaaattattcccgaactacagagctatttacgcatttcagcatttcgacataaaaaggcaaaggatatctacaagtccgcccgtgctggctctcccgcccaaaccctgcgaagcaactcgcggatcggcgcgcgttcaatcgggcgaggattttagtaagtattggatagcgcaatatcagccgtattattgaggtctccttccttaatcccgtaatccttcacgccacgcgtgtgggaaagattggaaggacatgcctacgctgcaaagccaggcaccatacaatgccttggatcgtgcaaattgagaagatgggttttcaataatcttggggagagaggatgcaagtgtccgtatgccctcgagcgccatgttgatgattgggttggtgttgcgcgcgtagaaagcctcggccattcaggaacatattagattcgtgcataggaagctggtgcagattaatcaagtcgcaatggcgttaacaccgctagtggcactaataggcaccggcaagctcattgtgagctctatattatagatgaccgtgccgggcaagttcctgggctccgactaagtcttcttcaatccattggcagtctcacttagaatcggagccatttcgctaccagtatatgcagtcggattgcaaatatgcggtagtccagtgcgaatgctgatcgccttccgaagaccaatagtgctttcgcctccaatggaaatgaccgaatctgctccctggtccttcgcatatccaggagccttgtgacattcatgagagtatgcatagtcgcacccgctaaagatacccgtgatctggcccttgagcaactcattcgctttttcggcctgaccgatctgcaagggtgtcgagagcaccagcggggccttcacttctggccgggagatctcatcggcaaatttttgcagcgtgtcgctgccgaagacggacagggtaggaattgtactcgaaggtatccattttgtgtttgcaattatctgaggggacacttgccatcttatagtccgtacccccccggcattcaagcctgtggggttttacgagaagtcgtaatctgggattatccgagcgatgcaatggcgaattttgcggttaatattaaatggccggtttgaattgtttgggtacgctcggttcttgcgtagctacgggtattccgatcatagtgaacatactatggacgttcgatccacaggtggattttgtgcctagatataaatttcccaaagtagcgggtggggttttgctgcatgagtcccaaagtcgcttttatgagactcagactcaggcttggattccagtacaggctcggactccgtgtaatccattgtattgattgacggaaaacttgaatgggtgatgggtgatttatagtgatacataggcaaactaagactagcgaagcccctctcctgtagtggtaaatcggatcaagttatctatgggatattcaaactatcctggctcaatgcgctctaaactattttatcgccggcaaaaagtcgatgagcggagcggcaaggatattctcgcggcggaaagcgaaagcactcgagctcatgccccaacggagtgacaacaactagattgttgaaggcagaggatctgcagatgtcagtatgtaattttcgttctatggatcacttcgggtcggccctcaagtacccacaagccgcaaccttggaagtttcggttcctattcgatcacattgatatcaccgttgagactcgaactaatcaacatacgtgtaaggaaggtaactgagacatagtaattcggagctcagaggtacagcgaaatttaacaatgcatattcaattttcggcttctcatactgtattattagtctctattatagattctcaaactaaaacacacacatgaggcagatacacggactacagtagtggctgttcaatcttgagttccgcttaaggagctcattatcttcaaatgcctctcattcttaatagaacgttgtctatatgtctgaagcatcccactcacgtgatagggtcgtccaaatgtgtccatcagccccggtagatcttcctctccactctccactcttctcctctcgcatctgtgcacttctatggttcccaagtgaatgaaattgaattttccttttctgatattctttgtgcctttcatagaaaaatcaaacatacaatacatctcccgaggtcaaaatcaacaaagtctatatgagtggacacaaggaccccgaagacaccagtgagcattgaccaccaggctgtacaccgaattgatctctaacctcagattctatttaactcagaatttcattattgaggaatgaagactacaatcaattgagagacccagacgattttgcatattacctgtcgcaatttcagcgttgccaacatccaccaatcctgcaaatggacaaaatagagatgcaaaccgatagcgggccaaatcttctcgcgaagcgcatggcttgtgaagagatggatatctctcctggtaccaaaagagctaagggctttcatgatgggctgacagaggtggttatagctccagctataacccggatagttcctttccccgagaaggtatgctaggaccttgaaatgccaatcaacattctaactgttctgaagcctgcagttttggaagaacgaaatggcgagatcgagctacgagttgtcaacaatgatggctctagagagagcacgattatccttacaggtcttaaatgcctatttcaaaagcaacttccggaaatgcccaaggattacatcgcacgtctcgtctacgatcgtgctcatttatcgattgctatcgttaagaaacctctagaagtcattgccggtatatcatttcgggaattccgagaacgcaagtttgccgaaattgttttttgtgcagtctcatctgatcagcaggtgaaaggatacggagcacatcttatggcccatttaaaggactacgtcagagctacttccccggtgatgcattttctgacctatgccgataatcaggccattgggtattttcaaaagcaaggctttactaaagagctcactctcgagaattctatctggatgggctgtattaaggattacgaaggcggaacacttatgcaatgctctatgcttcctcgaatacggtatctcgaagttggtcgaatgcttttgaaacaaaaagaatccgttctagccaaaatacgtacctcgagcaaaaatcatatcattcatcaaccgcctatgcaatgggctaacggcgtggttcccattgatccactctctatccctgccatccgggcaactggctggtctccggagatggacgagttagcacgacaatcatgccacggatctcgtttccgcggaccccatttcaacgaatttcgtcgttttattaacgatatccaaaaccacaaacaagcatggcccttccgcaatccagtcaacaaagaccaagtccctgattattacaatgtcattttatcaccaatggatctatcaaccatcgaagagagattagagcattacactactccgaaggaccttctcgccgatctcaagttgattttcagtaactgtcggcagtacaatgatgccacaacggtgtacgccaagtgtgcggtcaaactggagaaatacatgtggaaactgatcagggagattcctgagtggtctgacttgattgaagaatgattgctgctagtgcattctttggggtcagctgtgcgagggttttgtatggtgggagtcgatatcggatttgagaagctacacggagcaaggtatcaatgattcgatatttcttgcgatttttagcccctaacgcccctaacgcttagttgacgttcccgtggacatcagaataaactagagccaagtaagggggagacatatgtatgtacatatcggagatatagatattcttcctctaattggcccttaaaacccctaacaccaacgctatgtacactttttcttgttttcgggctgaacaatcgatttgcagatgtgggtatcagagaatgggatattgagacattagtccaagtcatggaacgccatgacatgctgtccaccagtgcggtccttgcccttagacttcttgcgcttctttcggtcctttggatcctcgcgacgttccgcatcgctgttatccgaatccttgtcgtcatcactatcatccatgtcttcgtcgccagatccttcaatattttcctcagcctcgtgccacaccttgacggtttggccaccaccagagaccatccggccctccacgtcaaagcccaagcctacaacaccatcgatctcatcgtgcacaacctcggaaacgacttggttcggtccaatgcgcacaaatttcacttttccgtttgagaggcctgcggccacaaccttgcccaagtagtcaggcccaactgccattgtctcgatggaatctccgccatcggcattgcggtcgacgtagatccgctcatcctggtcatcccacgcgcccttctcccagagagtgaggataccgctggctccaccaacaatcaacttctcgcctctactggttccgctggagggcagaccacccatgaagatcgagctgaccagttcttcttcctggttctcgctgcgcaccagaacgccccttcggagatctgtcacggccaaggttgttccaccggttgtaacccactgcttgctaaagcccgatgtgctagtttcggaagccggcagaggagtaagagaggagatgtagtcgtcatgggggtggtgcgtttgttcaggtcgcgcggacaccttagagtaggggatacggagatcgtagagatgcagagcgctcgagtcggtaccgaggaggagggtttgaggagagagggcgtgaatcatggttggcgcatcaatggagctatacgacatcaaaaaaaacgagaggtcagccaaatgcaaaggtctggatcgcaacgtttgatattcgggagagttcctttacccgttcttctcaaaaggaatcacaatcttgttttgcacctggccagtctcactgattgcagctttcaccataccgtctgtaccagccgagtagagcatcttgccatccgtactgaaccctagggtgcgacagctacccttgtgtcgccgagttctccacattgtgtcaatgtggccctttccggtccgggccaacgaactcggtgcggcatcttcgtcaccctctccttctaaggaaggcagtcggaaggtctggacgtggcccgaggctaaaccgacagagactacgggctcctcggggtggatagcctgagcgaacaggtccgaagaaagcggaagcgtgcagaccgtgtcgaacatggttgcgaaatgcgacgggggtgagcacgaaatacgaaggcttctagcgagcctactaaatttttgaattcgagtgaattgaatcaagagaatcaatcgcaaaaagctgtagcttcagagctggccgtttttttctgccgggccgagaataccccgaccgccttcttacttgttcagttcaaatgagcctcgattctgacaaacagctctgattgtaagaaagataaatgaaaccaagaatacagacaactatcaacgaaagagatttatacacagttcaccattctcttccaaatttggtatttccaccactggctcaaggatatatgcagcacggagaccccgcattccattccaagtatagccgaattcagcaagtgaatgtcatttcgactctctaggaagaagcgtaggtggagccaatggggccgaccttgatgttagagtaggtcaccttggccgagcccgactcggcctcaacggttgctgggtcgccggaagtggtggcgcatgtgccgcgagcagcaccgggatcggaggcagatgcatcagtggggtagacctccccatccaaccagagcatgttagcatagtggtcatcccacaggctcatgacaaggaccattccctggtccaacccctcgcccatggtagccagaccaccgtgctgggcgaagatatcctcatcgccgaaggctttcttctgggctgtgcagaagtcggtggtgatcgagtttccggtgacaccgctaacatccgaggctgagttggcgatgacttttccgtcctggacgtagatgcgcttgatctcgctgagggtgccggtgtcggtgccgtcgctggtgatgaactgagtgaccacggttatcttggacttagtgtcaacagtcatgccgggaccgaagaaggtctcatttcccatgcggaaggagttaaagtcacatccatcgggatcgcaggttcctgcgtagcgggtggaagagtaagttccgccacaatcatcgccctcgcacatagtctgttcagggctgtcgcaagggtgaggcgtgtaagcagtggaaatgctattggcttcccagatatccatctcagggcagcaagatccatggccgccaacaccagcgttcttgtcgttctcggaaggcacccagccgtccacgttggcctgtatcgcgcatcagtcactttgcccgcaaaccgttcgaattgaccagtataaaaactcacctggccgttgatgaacttcagatcacgagggcactgagaatcgcaatagccagttccgtacttggcacctgccttgttccccgtgtacttagccaggccaccatcggaatccatggagacaaagtacagagctccattgagtccgcagggcaacccggaagtatccacgtcgaatgtgaactcctggttcttcagcttgaatatctggtaggtactctcgtcctccatcaggtacagacgagagccaatgttggcgccagtgacgaagctcaaagtgagggcattgccatcagtggtcgcaccgtatgtgccggcgtagtcagcgccgtccaacgcacagttagtggcgcaagtctcgtcatcggggcagagagtcgcatcccactatcatcaaacaagtcaatcaatgtgaacgctcaccttctcggttgaggatctcttacctcgtttccagtgtagcagttggtgtaaccatcgacagagtgaagccaacgccagttggcatcaatgacaacagagccctgctggtcggtgcaactgcccgcggtagtgcacttttgccaggtcaaagagggatgggtctcagccgtcaatgtgccagcttgctgggcacgggctgcggccgccaggacggagaaaaggagtgcgcgttgatacattgacaattaagcagagaggtcggtttgcaatgtgtccttggtgtcttgttgtctggcctgctgctagtgaacacaaataatctcgggtgggaatcggccattatatgtcttttctccgtgcaggatttctctgggccgtgactaaagtcctttccatagcatgatcgattgacggaccgtgaggccgttaccaaattggtattgatagagagcccacaattatcaatgcagggtcaaattccatactaggtgacctccggcgttgtaggtacgttaatttgggactggaaccggcgcctgaatcaggaagggaatgatcatcactgggtgacgctttgttataggatgtctcaaaatcctgactaatatcggagtagataaacatgcatgttaatcgtttcaacacccgtgaagacggagtatgccccgatcatccagttctgtcgattgctgtggaagattcggggagcttaacagtacaaggatcaacacaaggatcaactgcaaatagagaccttttgaggtatttttcctatcgatctttcgtatacatcagggcgaggataccagacagggaatttggccataggattcaaatatgctccactccgcacagaacaaaaggccatgggacagttggtggcgttgaagggcgttaaagcatgccaagagcgcttttagatggaatgagcgctacttacatcaaaccttgaaaaggctctctttggtggcagataatgtggggtaatatagacgaaggcgttaggcccaaacacggaggatggcctgcagacccttcggatatgaagcgtttcagtccgaaactagattatatacccttgcagtaccagctgtccggagtaattatttgatactggactgttattatcctccaggttcataacgtctgctctattttttgatatagctgctttctttcaatgattctctagagagtcctcaactcgtcgtctctttgtaaacacatgaatctcaaaccgaggctctaaataaatctctgcataaatcatgaccactttcaagtttccttgggcatttctagtccggaataagataggctctagttatgcacaatagatccacagcgcgatggtctgatggtatatcacattggactaattgcccaactcgaagcatcggaagtaaagaggtacataagtagaaggacacatattaagtcttggctattactgtgtatcgcattgccggatccactaagttttgatttagaagtacggcaaagccgttgtttcagcctgtttcgccagttcacaattctaaacggtagcttgtaaacaagggtgcaatatgacctctgcaagtgattactggaagggatataattttaccgaacggaaagagcgcaggctgatcccccgtgttctagtaaggtacctggtgacaaccctataatccggtggctttaaaaatgtatctttgcctgttggtaatgtcatttagcttaactacccttgttaaccgattttacccggaaatctctaagaagttatattcaagggtacactgtcctgcagattcaaagcgcagatggccaaatccgaccaggaatttgccatcaatatacaagccaagtatttatgtgctccaatggagcccaaataaagtgcctcctccatgagtagacaaatctccccgggcggttatgtggctggagattcaccagccattgaacatggaatgaacaaggccttggacaggctcatgcgtagagatatataactagagcttcaaggatgactacatgtactatgtccatcatttcctgtcatgataagttccttcagggctgagttgaataagtctctaggctgaatactttcaaagacataggtagggtaggtatgtgaataggtagcatcaacgttatatcgatacagaggaaggattcctgctgccgatgcgaaaaacgagcaatattaggatactttctagccaatttcatgagtacctagtcatacccagcttctcacatgacgctattgaagttggttgatggaagggaacattctcaagatctatatgtagagaggagagaaaagaacgggatttattatgaaactgactagttagttatatcattgccactaactatatcataaagtgaatgaagcaaatagaaaaaaaaaagaaactccgatggggggattcgaacccccgttagtgctgtgaaagagcacagtgataacccctacactacatcggaatgttatacaaatttcagagatcgaggtatagttattccagcttttattgatatcaccctaggtattccggtgaaaaatcctataatttactacaatgtcaaaatccagaaaggagggacagcgtgcgcgtaatgggtatgaagacctcgtgtcacttatcagttatttgcataagaataacgatcctcaggcgcgcagaagaaaaattagatacaaaaaaaaaggcatgaaaaaaaagaagttctccgatggggggattcgaacccccgttagtgctgtgaaagagcacagtgataacccctacactacatcggaatgttatacaaatttcagagatcgaggtatagttattccagcttttattgatatcacccggagtgttgtacaattatattctaattatgtcttactagatatttcccaaaggtaggtagtagcaaactcctccaaaaagcagcacaaaagataccaaaaatagacataatgtcataaatcagatattgtagccgggattatatcgatagataagcattataaggtgatatagggcgcgtagggtgtcgcttatggagttgaaaaatgcgctagaatgaaaaggaaagcgtaaggttcaagagcactatccaaccagagttttatgccccggtggcatattgagcttattccgatcatctgaatttttagtatgaagatgcgaaaagccgttttcgcactagatgatgtctaagataaatgaaacatgtcaatcctacagagtccagatgaagtagaagacacacttttccattataggaagtactagtgaatctccagctcgtactgtcgacacaatagccgtgatattaaatgataattccacttcattgatggtaaaaccccgggagctcaaagaatatgcggcaattctcaacaaagacgtaaaaataggctgagccggactttactgagccataggcttctcatcatagtcctaatcatagtcctcatcatcctcctcgtcattgtcatcatagtcctcatcatcatcgtcctcataattgggctcctcgtcatcctcattgtcgtcctcatcatgatcgtcctcttcagcctcctgcgcggagttgtaccacggaacagcagcatcttcctggacctgcgtcaattgtcctgagccattcgttgcgacttgaagcccatgtctcatagtgtgttgaagactggcgattgtagaggtggaagcctgcatttaattaatagccacctaggggagcctcagtattgaagaccactcacatgtccacagctcggtacacaataatgaaagaccttgccatggcacacaacgatttgaccaatagagttctattcacgcaattagaaacattttccgaagttgattctccttcgtagagacttacggtcgtgtacggtgggagcttcagctccagggcctcggtcttgaagaggtgctctctgtacatattgcagctttgcaaagagagtggatagttataactatccagtaagagattagggggatgcattttgaagtctgcttcaatctcagaattcttttctgatgggagggaggatgaagagggaaacattgaggagaagagttgaaatgttctgcgcagctccttccttgccgactacaatctttccctttccacatcctctctttctctttctctttctctttccccttccccttctccttctccttctgcttcatcctccatctgttttcttttcttctttttgagactccatcttcaaacagcttgactctactcttgttgccccccaactttcccagccaacatgggcttcttgttcgcaagcccgagtgatgtgacgctcatcatcatcgaagagagcgagaacgacgaccaccaaaccaagacagccttatttcacgttgatcgttccaaattgattgagagcagtgattactttcagagaatgttctcatgtcggtgggaaaaatccgggaatcacaagcccactctcagaggcgacacgatcaaaggcatggaggtgatattcgggtcgattcatggagtcgagatcgagccagagtttgtcactgttgcggatgtctggtacacaatcaaggcctgcaacaagtacctgctggatcctaagaagctgatgggctggtttgcacgctggatcaaacatattgacgagaaacaacctgaaatatgggaagactatgatttcaaccgccagctactgttaccttgccatttctttgatcatgcagaggctttccagcatatcacaagaagactcgtctacaacgccccaggccatatcacagaaatggccccgacagactcaccatcattcgagccgatgcatatgcccgccatcgtcatacgtaagttgatccagtcacagttttaagatcaaaggacgctaactcgcagaaagagcaactaaacgcagctagagggcgtctccgaacggttctccaaagatcgcttttcggagatttgaacatgactctcgataaagctcattgtggctgtgcagcagagagcatgtttgcctactttagagaattacatcacatcagggtcaagccgctggatagtgacatatacaagaattgtgtcagtgatattctcaatcgactggcaaacttcaatgaagacaatatggcaaagaggaagccatcggtgcagagatgcgtggtatgccccttctcctggaaacgcacggtggagtacgcacgaagactggtcgatggttactttcatggcctatgtctagattgcatgcagaaacacccagacgaggattctgagtactgggatcttcgtaccaccagattggtgtatgaccaaacttgccgcattacccacggcgaggcaacctggttctccagtttcatgggccatcgtaacaaacggctataccgcatacgttcctgagtgaacaggaagggatgaatctcgacattttttccgtgacgttactgatcatctgcccgggattttgctgaacaatcctacgcccatttctctttctgtcaattggtacccaccctctaccgagtcttgcaactatgtttatggcaaattccaatttctcaattgacggcagatactcgcaatgttagctgcccttgagccatgaattggcgaatgcatgttttatcattttgtttagagtaataatttgactgctatttgccattaatatctatttctctagaccgtatctttcaattctatgtgcgacacctacatacgacgtattaccctacaatatttatcttagacaccagtgataaaacagtcaagtttaaaagaacctgtgggatgagtgcgaaaacggctctttgcatacatcaaacaggtttcatgctaaatatgcagatgatcaatatggctaactgcgtaagaattgtcattgaaagattcactcatacttttattgtcggcttgatttgataagtattctatggtatgaatatcgacttatactggttgaatagagaatcaagattgccacttatacagatcatattcgtatacatagaaaccagtgtgataataaagcttttgttgttcgctgtaaacttctccctataccttgaatatacctactcatttcagtacgaccaaagagattcagagcctattactggaaaaagtaatttgaaacatgtctagcacttttcagattctctttgtgctggtattagtgggtgattttctttaagttcattgtggtcagacaaagatttgatttttttagaaaatatgaggttcagctaaatactattgaatatctaatgataatttgatgtgacctatacctacggtgagattaaaatgagatataagtggaatgtattcaaaagacggctaaatatacaaacggacaaacaaagaaacgatcaagctagacatatcgtgactcccaaacagttactgaatgttcattcaagtttgaattcctggcaaacactggtcattaagcgtgaatagaacaaagagctgcgtattcattgttgcatttttgccttcttcatggtatattacttcccaagagaccgagaaacatggagattcccttgagtctcttgaaccctaccctattgatctgatatagaaatcacaaatatgttcgaccaactggtgctgggagccatttttgccggcctcagcagcattggcatttggcattctgttccgttgaccggagtcactccttctaactctttcttttggcgcagtcttagctccctagaaattgcgtgttccattcacgagttacgcaaagtccatcctttggtcttcccccatgacgacgcaatctcagaacacgacctccttctacaactttcactcgatgtccaacagtacgaaaatgccaggctggccctggaacactcagctgaagctgtatcactctatctcaacacccccggagttacagcaacaatgttactcccgagtgccacagcgatgccgacgtcggtctatttgaacgatgtctgggcaaatgagcatagctacgatgagctgcaacagttccacccagcccagaataacacgctatatttcgccgtgatggctactctcgtcttggttatcctcacagtgcagataatgggctttgggatgacgaataccatcaagcagcacgtcgaggacctgcaatacgattattttgaccgaatgagcggcgtgcaagtgcaattcgacactctgatgatagagattcgacagttccgaagggaaaatgaacaagtacggcctgttttcgttcatctggcggaggccatcacaaactcgtcggccgacctccaacattgtttgttacatattgttgggatgatggaagacaaatacacctcggggatgattaccattgaatccaagttggatgaggtcagtcaacaacaccatgatctgatgagaaatactgaaaatttccctcagattccgagacaattagcttggcttaacatcctgatggcgaagaacatgtccaacgacctgcctgaaggtgtacacatggaccagcctgatttggatttaagcaagagtcctagcatcgagcagatcaatggagctcaccacgccgcagggcaacccaacgggatttccaactttgaggggagtcccgttcttcagaatggaaaaaagaggactagttcagtgcaatggtcaggattggggctgacttaggacatgtgaagatctatttcgtatctgtataacaggggattttatttgcttctctttttttgggtgtatgatttagttgatgtcaagtgcttgggatagaaaagtttaatcagttggatatttcgttatgattctatattagttgactatgcctttcgtatttgtaagcgactgacaatcatgacgcggtttcttcaccaagatacttgcgacaggcagtcttcagcatgttgatgcgcctctgtgtatgaatgaagacctctcgatacatgtccagactctgctggacgacctcctgtcgggttttagtgcctgagcagatctcaagcattctcaattccatttccttgcgaaggaacggcttgctgagagacacactattagggagaccctcaacaacgttgtcatacccctccacaagggcaacacctaaacgggtcggaatgaattcctgcactgagctacgcccactgccccgttgatttatggcgacgtattcacgttctttgatcttggcaatatgctccgccatcgtggcatctgtaccaatcccgttggcatccatcaggccaatgagctcgggctcagtcagatagtttggagcagttgttttgccttcgaagatattggcttctgtgggctcaaagagctcccccagttcaaagttgggaagctgctggctgctttcccacttatcgtagacgtatacatccaagtagtttctctccaacacggtaaggccattggtgtggaagaattcgtcgccatattgaatttcaatttctgtgctctggcccttcgcgtcatcagaacagcaggcgaggaatcgacgggcaacaaattcataaaccttcttttcattggcattcaactggtttggtgaaacccaggtgacaggatgaataggtggatgggctttgtcattgtggcggccagagcgaggagtcctgaacttgccatcaataagtctagataggcattagtcttgtatatgaaacgcaagtccaataagcttactctcgagcgtattggccccatgactcgtcggggtattgcttttcgaccaatttcttcagatcgatcgctttgtcaaactggtccgtctcggttctgggatagctgatgaatcccttggtgtaaagtccttctgctacctttgaacgtgttagatatcatccactatgaaaatgggtttcctaccttcatgatagtctgactgtccaaacgaagaaatcgactgcccatcatttgcaggtctaccgtagtcaagggcaacggtcgccatttgcttgtaggcttctggttcacttttgtgactttggcttgctttgcaaccaaacatcgctctaacatcatcgtcacaactgctcggtcaaataaatgtacccgcttccagagaaagttgacctttttgctttcccggctgagtatgaccttgaggccccaaaatacttctggtttgaaattctggactctcaagtatcgatcgacaacgaaccccaaagtaggaaattggcaggatcctaacttgttaattcacttgcttatatctatgacgaccgacggcttaccatagctaatgaccttttccttcaaggctgccaccactgtttgtagttgtagagtctgtaggcgggtgaatgcagcgccgattcgaagatccagttcgatcctggcagatacagcactggcctgatattcgtcgaggttgactggttctagagcagcccgacgaacatgtctatcctcggatcagtttgagtagacaccaaaatcaacattacttacgctctttctgtgttgctgaacttggctcgcttaacctcgatccgggcatttcctgcctttgcctggttacggacctcagaaccgatatgctcaccttcgcgatcacaatccgtccaaataaacagggctttagagtatttagcttgattccggatgttatccgcaattggtagcttgtcctagtgaggatatcagcatgcagtcaggacagctgctggaatttgctcaccttatcaacagtctcttccacgggggcctcgaagagtgaccctggaggacaggacatccagcccttgtactgacggtcaaagtccaagccagtcagatggccgactacgctggtcatagtgaccgagcagttgccccaggcaccgccaaaatcaaaatcaaattcataattcttcacgtatttattcccgcgaatcgcatgctatgctcgatgttagctaaatctaccagaaatctttaaaaggaaacccactgtttgaaaagcacctcccgataagtgagtggccactgcgcgagcaatggcaggtttctcagccacacataggattttgcgagccatggcgagctccaatctagatcacatggggttcatagtgatggtggtcttagtgtcctgacgtcgatcacatcttgttctggatgagaagagacgagatgcctgagacgcgctttggtgcctgaggcatacaatccattttagggacgctattcctaatcggggcaattattggccacttacccgtccaactccacctgagcaaacgcttctgtttccctttctcctctgcggcattttgttcccatatatagtacgataatggcatctttaccacttccccgtgtggactcccttttggattatacttcgtttcatctcaccgttctcccctacttgacccagctgcaatggctacccggaagcttgcgcgaagctggttacgatgtgtatagcttgcgagctgtctatctagctaccaaccctctggtctctgcgcttgccttctgtggaactctggctggtcttttcttcatcgcagccgagatcaaccggaactattctcaagtagaccggttttggagcattctccccgcgctgtataacgtgcattttgccctctgggctcgtttgtccggcatccagacacaaactgtggatacaatcgccgtcgttagtgttatctggggtgtaagttggctattcttccgagtctttacatctactgactgactgactgacgggataggctcgcttgactttcaactactggcgcaaaggaggatattcaattggatcggaggattaccgctggcagatcgtgcgctctaaagtgaacaataactttgtcttcatgatcttcaacctcggattcattgctgtggctcagtcactgctgctccttctcatcaccgctccgacctacatttttgttgtcgccgcatacaaccagggacccgagacctttggccttgctgacttggcattctcccgtgctgcgtttttcttcatcatcattgaattcttcgccgacgggcagcagtggaagttccagtctgccaagaaggaataccaaaccaacgcgcgtattcccgagccttacaaggaccagttctccgctgaagatcttgagcggggctttgttgtcagcggcctatggtcttggtcacgacaccccaactttgttgctgagcaggccgtttggttgaccatgtatttgtggtcctgctaccgcaccgagacttacttcaactggaccggtctgggcgctttgggatatcttgctatcttccagggaagtgtacgtctaaccgaaaagatcaccgctggaaagtatcccgagtacagcgactaccaggcccgcgttggcaggtttatccctcgcttgtctgtcaaggcaaagaagaccaagaaggctagcaagaaaagcacttaatgtgttggttgatatataaccagggaattggagaatctataccagattgattgacatgtttttgctgtgattttctgcactcggcgtcttacctcaaactatcgattttgacacaatgcaaactattttcaatcaatatgttcaggcactaatcactcattgcaacaaattggaaatataagatatattttgggacttcttcaagacatgtttatgcagcacaattcttcgtgtagcgagcagcttgcatgcgacaggcctgttctgcttcgatgctcgagaatagtcctctgaaagtcttactgcagcattcattctctctttatcgaattttcccaccgcccagagaaccaagactccgactccggaccaagatgaactggcatcatagccattcgatagtctgatcctctcaagtggatgtggttcttcccacggccattgtcttttcccccgtcgccactgtctttctctccgtggttacattggaatgttcggctgcacaacgccatcttctctatgtattctttcagcgatgcgcacttgtcatacatgatatctatgatagcgtaggcccttgactgaacgcatcttcatgggaacatctctatcgtatatcctttctagaactgctatgccgtcccgtgcatggaatgcttctagagcatacccaaagggaataattgaggacataaagcgtataaagtgcaagacatacacacgtgttgggtatggcattgctaacaatggaggattagataacttaatagccaatatgtctaatgcaacgttattcggtgagttttacgataatggttcaacagtatctacacgtaaaagacatcccaatctaagacatgtttccaaataactccatattatacactcagttcaagttgtacatatccagttagacacggatatggacaggggtaacaaacgagagagaaaataaaaaaaaagacgatcttcttattgagtacaacgggaggaatgggagaaagggtttgtagtcgagggtcgacatataagaggacgtgggagaggagaagaaaccggggatgcaatggataaatacaaaaagaagagaggctacagtgatatcatgcctcccaaaattggaccaaaaccaaacggaagcacaggaatgcaaagaaacacaattcctccataatctatggaggaggaataggtgtctcgtcccggccgttgttaccggaagtttcttcggggctctggtggtccgatggggcaatggtctggccgcctgtgccatcgaagtacttggcgaactcgccagactcggggtaggggcgcgggccaagaagacgaatgaggtcatcacgtccaagaacctctttagaaagaagctcctcggcaacaataccaagctccgtccgcttctcggtcaggaggtcgcggcactgcttgtgagcctcgtcgatgatacggcgcacctccagatcaatagagcgggcagtgtcctccgagaagggcttgtgaagttgctgctgtgcgtcatcctcgtagtagatgaaaccaagcttggacgacatgccaaacttagttaccatggcagtagccatgcgggtgaccttgttgaaatcatcactagcaccactggtcacggaatcgaagtgcaactcttcgctgacacgaccacctagagtcatggccatgcggtccatcatctggttgacgttcatcagatatgtgtcgccgccagctggcaggtattgggcatatcctagtgcgccttgtccgcgaggaatgatcgaaaccttcagcagcggatcagcccacttgaagtaccaaccacagatagcgtggccagcctcgtggtaggcgacggtccgcttctcctcaggggagagcacaagagacttcttttccaatccaccaacaacccgttcgatggcttgctcgaaatgtctcatgacaaccttgtcggcattttcacgggcagctatagggagaaagtgttagctttgatagatacggagaaatcatgcataagaacttaccaacaagagctgcctcgttcacgcagttggcgatatcagcaccagcgaaaccaggagtcagagcggcaagtctgccctccatgtactccaagttctcgtcggtgacaatcttcttcaagtaaacccggaagatctgtttacgaccatccatggtaggtcggtcaatggagatgtgtcggtcaaatcgtccgggacgcatgagtgccttgtcaagaacatccggtcgattggtaccagccaagacaaccacttgctcagaggtattgaaaccatccatctcagtgagaatctggttgagagtgctttcacgttcatcgtttccaccaccaacgttcgactttgctcgagactttccaatcgcatcaatttcatcaatgaagatgatgcagggggtattcttccgggcggttgcgaagagatcgcggacacgagagggtccgacaccgacaaacatttcgacaaactcggaaccactgacactgtagaaaggcacgccggattcaccagcagtggccttagcaagcaatgtcttaccagtaccggggggacctgagagaatggcaccacgaggaatctttgcacccaacttctcgaaccgctcgggttgctggaggaagctaacgaattccatgatctcaaccttggcttcgtccataccagcaacgtcagagaacttgatcttgatatcggtctcgtggttgaagcgtttggcacggctctttccgatgccaaagattccactttggccgccggcgccgccgccagcacgtcgagacatccagaagacaccaccaaggaagaggatagtaggagccaatgacatcaagacgccgccccatggggtttcatcgtgataggcgacaggaatacgttcatgcgagggaataccgagttcacgctgagctgcgtcgatcttcatttcgaagctgtcgacggaaccaatactaaagtagacataggaggcaggctgaccatttgaatctgcttgagcggcagcttcgcggttgagatcgacccgaaccttggtgtggttcaggacggtcaatttatccacgaggcccttctcgaggtagttcgccctgaattcttgccaagtgatttctctacccgcactatcaccggggaaaaagctgcggtaggcgtagtatgtgacgagagcggtaacgaagaacgaaacgggatcaaagcggaactcgagaaccttgcccatgttcggcggcaccttgcccttcttgtcaccctgttgcttcttcttctcttcttccttctcggaatcttgcttttccttggtatccttttccttcttaggatccttgggatccttgggatcgtttggcggttgtgcgttggattgctgttcgccacccttcgccggttgctgtccttgttgatccttctctgagtccttattgaagtggacgctggattcttcgtcacgtttggccatatcactgcgcttttcagcgggggtgcgcaagtctgcgataccgcgctttgcgttttgtgcttgtctagccagacgctcatcaacatcgtaagttgagacttgccacaagaatcgcgacatcttgatacgatccattaatgtcggttcttgattcggatcgatatacgccctgacttccggtaacagtccatttttcatgatgtagtttcggatattggtccgtcggtccacatccatatcttcaagccatgcatccaccattttcaattcagcgtcggtcagaagtgacttcgggttctttgtttggtggtcattgttgcggccatctggtgtattgtcccggccgttgtcgttgggtggtgtcggaccttgcgtggcgtaggttctagcgcggcttgataaacccagatgtgagggtcttgacgggcgcacacgcatagaagccagccccgtgcgaccggttgaatccgcggctttcctcaagtagcgagcgaaattgcctggccgtcggagcagagtagccatggtcgaggaatgggagccccgagggctgcgagggcgggggtaaaaggtggtcaatcgagtttagagataatggatgttatcaacaatccatcaagattaggcgtgagagaaggaattgagctgggagttgagaagctctaaggcatccaggtccgaggtgacgccgtgtggttccttccagtcggttctaaaatttcgccgatccggctgagtcatcggaagcgcggaggaattaactagcttaaagccgtgattactctaacgccgtcgtttatgaattccgttattgaattagattgcctaaggttgatttggattggagacatgtctgtacatagtcctataagtaaggccaacccctgcgccattcgctgcgtaatagaaacccataattatcctggtcactccataagagacctcggggatggtttcgaaataagaagaggagcgcttcattatacaagaggtgtggagataatttagtgtagagagataacaccggaaacaataataccaccgccatgagctacataagagatgaaggtgacttcggtcaatcatacagtcatcatcactgcccaggcagtggcccaccgggaccagctccttcaaaagcaggaaagttggtggacatatccgcccaatcccactcaattgtcattggcatttgccagagatcttgtgggacaaatggctgctgaaatggtgccatgccggggctggcactgaatgggtgttggtcagagaatccaacattgggcatttgatcaggactcagcatgtctgagaactcctgtccaatgccaggcatgggatgaacattgcttgggaggtcagcggggagactacttgttgggggcatggcagtccccgggaatggtcctcctgtagcgggcgagggggcggcagccgtagggttggtaaacacggagggagagaaggatgtagaggtgggtggttgttgtgttcgtttggccgagggtgagtttgtcgactgttcttcggctgcgcctgtggtgtcttctgcattcttgcgtttctttcgcgaatgagactctttttcggttttatccaagaccaccttggcaattctctcgaattcaccgcaaaggcctagcatacgcttgatgctgccgtttgattcgtcggacactagggtagaaaggaagctgactaccacgctcattaatttaacatcggatcgagcacgagcatcggtgggattctggaggatgttggcgaaaagagttacgagggcagacaccgggtagtagagaatcagcctggtatcgagttagcaactgttcgttttcacaattctctgaaacgtaccaaacacaagcaaagtctccttgtgggatatacttgattagattaatcgatgctctggcagcagtgacacacaaaactgccgacaagaataccctagggttcaagggccgtgcatttaagccttgtatggcatagttggatagacggcttgtccaatacccgtgatgaaccgacatccgatgaatggtggtcaggcaattgtagtaggcaaaatgtagaacaaccatgtggatgatgacgggggtgtgggtggcttgaatgtcgtattcggggcggaagtcgataggaatgctgtctttccaatcttccagctctttgtcaagctcaccgattgtattgagcaattcaccgtctgattgtttcgatgctttggcggaataaagtcgcttgtatactctgctttcaatggtggcaaattcacacaatgaccggaataggttgaacttgcttctaccatcagatagtggcacatttccaacattgtccggcggatcttcgctcggtaactcgacattcatatcatcgtcatcctgtactggaggtcgaccagagcgtaggcaaatgctaaggaattggtcagtattggagataaaggtattcgggggtcggaaagcagctcatactctttgtcaagaagataggcgatccagaagactctcttccgctgctcaacttcaacgacattgaggccaaagccagagccgcgtttgtgtagaccaatgctgtgggaaagtcgaatcgccgcagcgactagaaagaaagcaggctgtgggttaggggttccttgaagaaagagtgactagaagagtatgtaagacaaagctacaaataccagggtaggaaactttaccatgcccaatagcgcttgcacgctcaagagatccgtgttgcgcattgtaagctcggtcaaaactcccatggcgttcttcaaataaagccaagctcttttatcctcttcgtgtggcaccaagttactcataatccgcagcctgtgagatatcgccagaacaacatttatgcttgcccaccagcccgaaccctcgtaggggtcgcgggaatattgccgctccaccaagtgcatgaatgtcgcttcgtgaaacagtgggaacatgcaattgaaattttcaaagaagtccttgaacagagaaagggcttcttcctttggcgggagaggtttgaacacacgccttgcgaaaatatcgctgaagatttcgggcttccagtacatccatttattgtcatcgacatatgctgacgaaatcatgtcttggaaggatgtatcgccggttttctcattgacccattgaataccctttggagagaatatagagaatccagaggatgatcctgaggatgttagcaagctagcccagcacagttgcgcgaaaaagcctaccaatataccgagtttccccgcagttgttcgtcaccaaagaacacatcatatccgacagtgcctcaacttcggtctccgacttttgtgactctggtgatgtagcggctgtctgggggctggagttggattccatacgaggtgtggtttggtgggagcttgaagcttgttgagctgcagctgcttgagccatgaacatgctggagcttttcgttgcgttcaacgcattcgttcgatccgctagccgtttctccaatgttccgagatctgtcttgccgccatcgtcttctgacaaaagacccgacaaacgcaacaacgactccatccgacccagtcggttttcaagaccttcgatgtatttcgctctatgtaagaaatccccaagtcagatatagaaccccatatgcaatgaagtatacaagtatacataccctttaggaggatttcgcttcttctccacttgtgtgaagatgcattccgttttgtagttaatgcagtgagaacattttggcatttttccatcgcatttgattttcttcttccgacacatatcgcacgcctgtttgctcattaggggtgttctcgatatccgtaacgggtaatgatcctcactctcgcgatcctccgtctcttcgcatcgttggtctcgtcccccgcgcctaatgacgaatcatcgtacatagatcccgcctgcatctgagacggatcgtagctgaatagctgtggtgtctggttcatcatattaggctggtcgaagcccatgccgtcgccgtcccccaggccatccattttgtgtttgaggggccacggaaactccgcggagtaaaagtaatagcggtgataagtaacgggtgatactgcggggtgctgtctctcggcgcaaagcttttttgtttcgcccctgagagaggagagggtgcgctatagattattgaagtgaatgacgcatgcaaggatgggatctttttttcgagggagtagacaatgaaatcactgggcacaattaccccaaccttggaaagttcggggctttaggtaagaaatgactcaaccacacgtgaggacaaggatctgtgtgaatcaatatgactccaactgtggcagtaagagcacaaaatgctctaccgagttacgctatacaagttgctgcctcgaagattattttgtggcatgacggaaccccgaaacccgaccgccgagcacacggtcccnnnnnnnnnnnnnnnnnnnnnnnnnnnnnnnnnnnnnnnnnnnnnnnnnnnnnnnnnnnnnnnnnnnnnnnnnnnnnnnnnnnnnnnnnnnnnnnnnnnnnnnnnnnnnnnnnnnnnnnnnnnnnnnnnnnnnnnnnnnnnnnnnnnnnnnnnnnnnnnnnnnnnnnnnnnnnnnnnnnnnnnnnnnnnccggaaccccgaaacccgaccgccgagcagacggtcgatttcgtccgatccggggcttgggcttccgttcagtctctggcaatccactctttggttgcgccgatcaaaggcctttttgctctttgtgtatcgtaattattcttgggagggtgtggcgttctatatggggtaggacggattccgtatccgggccttgtaaccggagagcagccctacaacatacgtgtttcttagcatccacctagacaatagttgaccttatggttacctaccgactccgtagttagttaactactccagagcttggttatgtatgactaaaactcaccatgagcgacaatttagaggtatgatctgatgtgatgccgcggattgccggttctatgctggatctgtcggatagatagtaataaaagtacattcaatgaagagcggcgatctcgtagggatatgtgagaatagtacatataatacaacaaggttcgtaaagagcagtcctgttcctccgatcttgtaaatgccaaaccaacgccacgctatatgcccaaaatataatgaccagtttgtcatgtcgagacctaaattcgctttcccatcgtgacccgagggtccatgctagagaagaaagaagtcaaggccgcactggcaaggtctcaaacatgtttgtcgaggaattccttcgcctcgttaattttggtggccaggtatggactaccgccgcgatcggggtggttgagcaacatgagctggcggtggttcttgcggatcttgtctttggtcaaagttcgttcactgagagatactgtcagttctggcacatcaaaggtttgtcactagcacttacgcaagttgtagaatcagagacgcttcccgacggttcatgcgcggttcgaatcctctgttatacgttagtcaatattccatatgaccacaacctggcgaaatgtccacgaaccccttatagaatgcctttccggcagcgttcaatcctcctctggagcggcggtaagcgaccagaccggcgcggccctgtagacaatgagttagtcctgtgctgctagcaaatcactttttaactcaccagaaaggcggttgtggcaatgccaaatccaacagcaaggatagaggccattttgtagatcgagatagagaggtcacgaaaacgagatcaagtcggttggaccggggaatgagcgaagaggcgccgggatagaaaagtcagcgcgggtgtccccaaaagggcttagcgtggtctgctccaccattcaggcccgaagctacagaaaaagtttcttgcgactcaacgaagacataaccaacaccactctacaaccatgcggtaagttttgccgttaatttttgtctctatccgttctacggaatgctaatatcattttcatctgcagtgttgaaacttgtcacttctgttcccgcccggctttcccgagtaagggaatcacattcgtccgcaacgatgcccgacaatttcgtttctgtcggtccaagtgccacaagaacttcaagatgaagcgtcagccccgcaagcttaagtggaccaagactcaccgtgcctcccgcggaaaggaaatgatcgtggattcgtcgcttgttctgtcccagttcgccaagaagagaaacgtccccgtcaagtacgaccgcaatctcatggctgctaccatcactgccatggagagagtcgaggagatcagagcccgccgcgagcgtgtattcacgaaacgccgcctggccggaaaaacctcccgcgagcgccagcgcgaggcggaccgcaaggtcgtcaacgagggcgagcacctcatccggaaggaactccgggagcgcgaggagggtctccccatggtggccgagcagagcaaggtttccaacagagttcacggcgaggagagagttcgccagaagcagaagagcaagcttttggtggatggtggagtggaggagcagatggatatcgactaaattttatcttgggcatctatattttcttttgttttgtgctttctcagatacgacacggttcctgcagcacgcagattttcggagttgggcatgctttggtgttttaaaagcaatcaatgtttttcatcatatctcatatccagtgggctgttagcctcttactgcttgagaggctaattaaaatgtgtttacaatgacccaagatgttacataggttgctagtttgctagtcagtacagtggccagagtggtcaaacgaccataatgagatctttggagaacgaccccaacaaatatcccatttaggcaaatgctattaacctcgtctacaccctctatcaacaaagttctcttagtcaacccacctccctctgctatagacacagagtagcctcaagctcaaccgtctatagtattttaagcaatgattcaacataaaatcaatacttggctattgtatctatatacaactaggactctggggacttaagcggatcagggtcgttctccgcaatccctgcaaattggaaaacaggcgacccatccaagacaacaagagtttgtaccctacgtacatagggagaggcgaagatcccagtatcaagataggtagagtctcggtagaccagctaagataaaacgatcagcaaataggagcacacataggtggaagacataatcagccagcttgtgatgctacaaggatctgaaatcaggtagccatggtagccatggttgcagcgatggcaggaaggattattattgtctcacaaacttccaaagatataggaatatatatctagcaggagtagctagagggagatctttggcagcaaagaaccaggcagttagctaataggttgtttgaaactctcataaaacatgatatgagaaaagaggaacatgttggttctgtctgataaggaaagaagatgaagacagtgagagagggagatgaagaaggggaaggtgaatgagggactatgtcaagtcagtccaacgtcagaactgatcgaatagccaaactctaggatatggaagaagaaccgaggtcgtcaggtatacaccatgaatgcacgcggaacagcgttggaagggttaaagataggtagtctaaagaaatagattgagggttatgtagctagaagctagatgatgtgcgggctaaatgggaggtaaatgatagaaagaagagacatcgaagaaatcgagcggtgttcttgtgccgcgcttgatatgatcagtaaaatactaaatacaatacaagaatggccggcaagaagatgctgatggggaaagcgagaggctagagagagaaaaatgtgaagcaaccagaggtaaaaagaacaaagcgcttctctggtaagcgcaaactcccctattcgatcatccttccttccatatatgtagatcaaaccaggtcctgtagtagactgcgccaaacaccacctccaagaggaggagaaatgaaactcagaagaaaaaaagcgaatgcaatggtggaggttgatgatggagaatgataatagacgggggaaagacgcgggtgggtatgaagtagacaaaagtagatgagactcatatagacagggtatagtctcatcgaaaatcatctgcatggaaataaatatgctaaactcatgtactgttggatcggagcaatgcctggaaataattagccttgctgtttgcgggtggctctgaacatacagctaacgtacccgctcgtcgatgacctcttccttctcttccgacggactgaccacactccctcgagtaatgggaccagaggttgtgatagaccgggaatctataaccgggcgaggggacggtaagggctgctgctttgaccgttgttgttgtggtggtggcggcggcggttgttggttctcattcattgagtaattggggtgcatttccccactgctcgatatcctagactctttgctcttctccaatagtgacccgccaagggtagcacatttgaggatagtttgcatcatctggttttgtttgagaggtttggacaaatattcgtccatctgggcctggatacacttctcccggtcacccaacatggcgtgggcagtgagcgcgataattggagttctttgaagtccactctcgcgttcatattcacggatcttgccagtggcttcaaagccacccatgactggcatctgaacatccatcaaaataacatcataacgacgtttcttgacagcattgacagcttccaagccattaccaacaacaaacacgttgtggttatgtttctgaagaatcttcattgcaagttgctggttcacgtcgttatcctccgctagaagaatgtcgaatgaacgtgagttgtctgtggtgattggcgtcgaccggccttccaaggctggtagcataccgttgccgagatcaatcggctgacacggggtagtcatatatgagctgatacccaggtccaaagccgacttcaagctcacgcacactaaaggacagaccaaaacaatcggaatgtacttgaactcgtcaaaggttcgcaacacccgggccgtgtctaccgagtcaacaataataacatcgtaggcatggcctgattccttgccagaaggatcttggatctcgggcgggggaacatgttcctcgttccgtacaaccaacggctccaggtcaatcttcttcaacatcttcatgacattggtagcttgagcaccgttctgacccttgtcgatgaacaacacccggtggttcttgtacggcaagagctgattggcgataacgctcaaagactggtccgcgagttttaccacacaggtgaagtggaaagtacttccatgtccatattcagaagtgacccagacgtcaccacccatcaaattcacaaggcgcttggaaatcgacaatcccaacccagtgccaccaaatctgcgggtggttgagccatcggcttgttggaaagtgtcgaaaatgagatcaagcttatcctcttcgattccaataccagtatcagctactgagaattcaaaggcgtattcgtcggtcgtgcattgctctctgtccgactttcggatagtgagcttaacctcaccatgctcggtaaacttgatagcattgccaacaagattgaggatgatctggcggagacggaatggatcgccaatgacataatcaggaacggtgttgtcaacttggtaggtcaaactcaagaacttctcgttggccttcacagccaacgtcttgagagcattgaagacagtacctctgacggtgaatggaatgctctcaatgaccatccggttggcttcgatcttagagatatccaaaatgtcatcaatgatagtcaacagactgttcgccaagttgtgaacgacattcaacatttctcgggtataaggcttgagatcatccgtatccaaggtcaactgggtcattccaatgataccgttcatcggcgttctgatctcgtgcgacatgttcgccaagaactctgatttggtgcgattggcgagttcggcagcctccctagcggcagtgtttcgctggatactgtcccgtaggttggaaaccatcttattgatctttcgcttcagttcgtccatttcaccagacgcattgaccgtgatcaacttggtaaagtcaccgtcagtggcggcatcggtaatttcaccgaaagcgcggacttgggatgtcaagttctcggccatggtattcacatcctcagtaatttctttccaagtacccgcgataccctccacgttggcttgtccacccatcttgccatcaacgccgacatctcgggcgaccttctttagctcagtggcgaatttggccagtcgacccaccatgtggttgatagtgaccttgagcgtaagaatttctccctgagcatgcacttcaatcttcttgctcaagtctcccttggcaatagcttgcgtgacatcggatatacttcgaacctgagacgtcaaattctgggccatggtgttgacattgtccgtcagatccttccatttgccttccacgttgtccaccttagcctgcccgccgagagtaccatctgtgccgacctcacgagccactttgctcacttcaaaagcaaaggtattgagacgatccaccatgccattaatcgtactcttgaggtcgaggatttctccttgtacattggcagtaacctttttggtgaggtcacccttggcgactgcggtggtaacgtccgcgatctcacgcacctgcgtggtcagattgttggccatacggttgacgttttccgtcaaatccttccacgttccttcaacatcattcacagtagcttggcctccgagaacaccatcggtaccgacttccttggcaatcttggtgacttcttgtgcgaattgccgtagttggtccaccatggaattgatgatgttcttcagttctgctatttctcccttacagttggcctggaccttctgcgtgagatcacccttggcaacagcttttgtgacagtagcaatatctcgcacttgcgtggtaaggttgttggccatggcgttaacattaaccgtgagttcgttccacattccctgcacaccttcgatttgagcttgtcctcctagtacaccttccgtaccgacatcacgcgcgactcgagtaacttctgttgcaaacgtccgaagttgatctaccatggtattgatggtttgttgcaactccagaatttcaccttgggcccggctctcaatcttctggctaagatcaccatgagcgacagcggtagtcacggcggcaatttctcgcacttgatctgtcaaattcttggccataatgttgacgttctccgtaagctctttccaaataccatggacgccagtgatctgagcttgtccaccgagtatcccttcagtaccgacttcgcgtgcgacacgggacacttcactaccgaagacttgcagttgatccatcatagtgttaattgttcgtttgaaggtggcgatttcagggtccatttccagtgggtggatttgaaccttcatagataggtcaccgttggcgacttgagtgatgattccaccgatttcacgcaaagctttctggaaggcctcgttggcctgctggtgtttgcgcaactcgcgctcgagcagaacgacatcctcattttcgaccttggtaagagcgcggcgagtgtgctcttcctgtttctgcaattcctcgcgaacctgggcaataatatccttttggctgcttatctcctcggcctgcttttgtacgtggttgcgaaggaagctaatatcctcctcccgcacgacacgcgtgccgttatcatcttcgtcatcggattcgtcgtcaatttctcccaggggtggttcgtcggccgcgggaaccgggttcgctttttgctgtgacagagagtcagaatcttgaccggacgacaagcgagagagcccaaatgtccacaagaaattcctctcgttggcctctccagcagacggggtggtctggatggggtccgtctgctgttggaaattgtggtgactgacagcttggaattccagatggtgcacgcggcgcaccagggcctcaagctctgcttcgaaggctgccttggtgggactgtattctccgggaagtttggccgatttggtaccgttgaagaactggaaatcaaatgagggcgaagaggaaccggggacagagtcgtctcttgctaaattctgcagcacggcagtcgcggccacgagtgtctcgtccacgctagccattgtggcctacataggtcagtctcgtagtacaactaacgtacaacacatcttatagtaccagcacccgagctggaaattatgggatggggttagggtatcggagagcgagcttaaggatcactcactggcaagtctggatcctaaccggatgacagagatatagtctaattaaggcgacatgaggggggaagagtccaaagagaagacaaggaataaaatagacacccgagtcaacgataaatatgaaagggaataataatatggcaggtcgggaagggggaaaataggtggataagccctggagagggttatgtaagccaccactagggatggctctgcgggaagaaagagaaaaggaacttgggaaagaccgagatatatagagaaagatccaaatataagggaaaaaaagtgaggtttcgcggatgagaagagaaaggcgggaattctaagatttggggatgagggaggggggaagagattttgaaaggggcggtgatatgtcgcctcttttgggttttcttgggctgtttttttctgtttttttctctctttcgatgtctctgatctttggggggaatctatcaatcgccttcgcgctgtaatagtgcaaatccactggcatcaagcggatcaaattgggtattcaccttgacggagtcctgcccaggtgactggatatggcgcacggactcgctctattatagtttcatcggaagagtatatgaaggtactccggatactatatccaaactactcacaaagagcttgtatgcatctgtacactcaggatccctatatcgccagagaatatgtcgtacacaaatcaaatgtgtttcatgtggaggtgattgcctctgggactagtgccgatcacaaggtggctccggttcgtggtttcctttctcaatactgcgtactctccatatccctggaggcaaagataggcgagacagagtttgccgaacaattggctgggatccagcgagatccagtcggagttaatctgagcctataggagatcaacgagaatgtctcatcgttagggtactgccacagatccatagtttggtcttttttggtggctgagccgtccggcttagcgtctcccgttggccgaggtattcataacgtcgattggtcacacgggacctcgtgaaagtgaagatgttcaatattcggtaggagtactccgtactcgtacctggatcatattgactatatgtttcatatataaaaagagggaaatgtgtctcaatgggtaggattttaggtggattttgtatggattaaatggaatccagggggaaatatatacccaacgttcccggcagtagatagtgatacatggtggtatctgttgtatgtagtaaatatgtatttatcttctcgagagcatgtcaagctgtcaactggtcaacggtcaacaatggcgggggtcaaacggcacaagtggtcaatgtaccccgccgtattatcttttggaatcccgcagagtcataattctacaaaatatcgtcggatcaaaagaacgcccttcaaaacacccgtcaaaaattgactctgcaggagtaggctgcagccatggcgtccgacttaacaaaccagatcttggacgccctgtccgcgtccgatgcgcccatcctctccagcgaagctttcccctccaccccctcattgaacgttaagagtgcgctcgatcgccttgattcccgccagatggtcgaatatgagaccttggacaaggaaatcgttactctcactgcggagggccaggagattgccactaatggcagtcacgaggccaaggtcttcgccgtggtgcttgctgctttggacggattgaagatctccgacttaccaggaattgtgggcaaggagaatgccaaagttggccaaggaaacgccttcaagcgtggctggattaagaaggataaggatttgctgcgggcatccacagattcgattgtcgacgagacgcaacagcagctgctcgaggttcaaaaaacaaagaacctggacgataagaaggccctggctgacctcaagcggagaaagttggtcggtctggcaaaggagatttctttcaagttcaccaagggtcccaagtacgcccgagaattcgtcaaggagcagaccgacctcaccccggagatgatcgccagtggctcgtggaagacggcgcatctcaagccctacaacttcaatgccaagggcgccccgactccatgtggtacgctacacccgctgaacaaggtgcgacaagagttccgcaacatcttcttcgagatgggtttcgaggagatgccgacgaaccgcttcgtcgagaccggcttctggaacttcgacgctctgtttgtgccccagcaacaccccgcccgtgatctccaggataccttctacatctccgatcctgccgtggcagatgctcctcgcgaggatccccccaacgacccccaccgtccagcccaattaaagtccgagaagccacttgactacaaaaagtactgggacaacgtccgcgaagtccacgagcatggaaagtttggctctattggctaccgctacccctggagcgcggatgagtcgcttcgcctggtgctccgcacccacaccacctccatctcgacctacatgctgcacaagctggccgccaacccccggccggctcgattcttcagtatcgaccgtgtcttccgaaatgagtccgtcgatgctacccatctggcagagttccaccaggtcgagggtgtcattgccgacttcggtctgactcttggtggcctgattggattcatggaggtcttcttcgccaagatgggcatccacaagctgcgcttcaagcccgcctacaacccctacacggagcccagtatggagatcttcggctaccacgatggtctaggcaagtgggttgagatcggtaacagtggcatgttccgtccagagatgctggagtccatgggtctacctaaggacttgagggtctacggatggggattgagtctggagagacccacgatgatcaagtacgttgcatcatctacctttcgtttacatttactaatatctcttaggtacgccgtcagcaacatccgtgaactcctcggccacaaggtcgacctggacttcattcagaccaacccggctgtccgtctcgagaaggattaaacagggagatactcatagaaaaaaagaacgtgcttttagttgtgtcttgcttgtaatcacgagtttatgtcgaaggaaacgtattacatatcaacgatggacaggttgtgaatacttggtagaaaggctctagcgtagttgatcaatgtagatacaaatgaaagaaaaagaaaacatgatattgaacatgtaatattcatcgtgcatgtgtctacattggatgtcctgcccgtatctgtgccccagcgcgtggatctctgcagcagtggctcatcaggaggcaaagctcgaaagcataatcttcggcaacaacaagtatttcttacctcctcgctcatggagatggagacaccgaagaccaagaccagcgagccagtctggttttcgagtccccaaagaatgaggaggtcttgatatgccaaaaaggaaaaagaaaaagagaagacaggtagacagagactaagaattatatgaaagggatatcatttcgattttttgacattgcttttttttgtgcttcatgaggttgggcgggagtcttataacagaaagagaacaggcggggaattcgtagagaaaaaaaacctgacccattaagtcatcgatattccattcatttcgagagataggtaggaaaacaggagtttctcagaggagaaaaagaaaaaaatgaactaaggaacataactatatcccttgcgtcccttttttggtcttgaaaccaactccccgaacacggaccatcaagccacggttcctctgcagccaattagccttgttgaacatgaaacatgcggaatgtaatgtagatgaccatcacgtaccatcaaatcaacccgtaaacaccgcccagtgaaaaaaaccccacattgctgtggatgatttagcgctggctggaggcggcccacacgttcttgaggtagccatcacgctgggtcaggcggttgaaggagtcatcgctctcgccgcgggcgcggatgaagccgcaaagagcgtaggtctggttctcgccagtgtagcggccgttctcgtcaaccttgccgacggagagctggacagaggcgtggtcgttggccttgatgatgcggttggtggcgctgcacttgcggggcacgtagctgttgagaaggaggtcaagttagtggtctgggttcttctctgggggtttgcgagcgaatatgttcccctccaataccctgtgtcctggtttttctgatggctcgccaacgatcgcaatcacgcgcgctgagtattttttttttcaatcctcgcaatctctggtcacacctagtccatctctttggcttgggattgaggcgggattgctgattgtacgcggccacgcagaaacagggtacagggtatattgggactggaggaacgggtgtaaaatccatagcacgtacagatcgacgatctctcccttgtcgttctccattttggcgggtttggtgttggggttttgacgggcgacggtgaggttggaggtggagggtttttctgccgcacattaaattgaagacctcaaatgatttgtgtgggtcatgtgaccctttatcgagggctggcgtggccgaagtggggtcgcgtgggtttaacggaagccgtactaaaggccgtggcaatttcaactcttaatgctcatagtatcgattgcgggatatctacctacggggtacatatggactgatcgtactatgggtaaatatatgtatgtatctatatatcttacaggttactcttttccctctcttttttcaacacgtcctttttccatccaacagccacctctcgtgcacttccttttttgaaccgcacaagaaccactctctcggactctcctcgcttagaagaccctttcagctcatgcccgggttcattcagacccaacacagatcgcccatcactggtcatgagaatagattttggggatatgcacttctctgtccatggaggagagccagaatgaacgaactcgacaagcgcttgacgacgcttctccatttcttccacggaagcatctgcacgaggctctctgtccaggaatcctgacaccaaatgtaaaagaaggaactgcggcgggaatagaataatttcagccttttgagcacgactaacccattccgaggcgggaagaaactgtgcctccgtaacctcgattccaccatcactcgttgggatttgatgctcctcgtgttcgccttctgctgggagttggtcgaggattttcttatccacgttgacgggtaaaggtaagaaatatagatacatctgagtagtgtatcgcttaggaatgttggttggcgtaacccagcgagtaaaagggattaattggcctgtagagtcagcgtgctgccctcgggtgtcaatgcgcagaatgggcacttacctatatcgggctcagcatcagcgctttgctgcttcaaccattcatcaaaagtggtcttgttctgatgaatgagtcgtctgccggcctctcgggtaggttcgtcgacggcaagcatcttcccggagctgcggtctttagctagaagaattccactctcttcaaagagttccctgatcgctgcacgtcggtaacttggggaatcttcatgccgtgctagatctccgggtggtgggcattccccatcttgattagacaagttgccaccaggaaagacatgtgcagatgcaaaagaggtagaggtcttcacgcgatgaagaagaaggacctcgttctttgaagatataagaagaacgctatataatagttagtacccaattcttttttgggggaatgcctgacatcgcgccgtgaatatctccctagtcaatgtgtcatgtggtcccttgcgcttacctagaactaggccgggacactgcgggttcactatcacgtttcgggctcgacatcttccgaggatttgaaggaagtgtagttgtgtattgtctcaaagcaggtttacagctcgggcgcaagggctggatcaaggcaatatgagatgcgcgagatgtttgaaaagcaaggccaacagcaaattgaagaaccaatcgctgtggtaggtgacaagaaagagatccttgacagataaaggacatcttaaatcttaaagcctatgaacggcttctcaatatagtaaaaaaagcaaagagtcgggagttcctcggtaccccgcatgaagcttgacctcatggagcttaaccgaatgcaacgccatgtgctcgggcaacctccagcacttttacaaaacctctacttgatgtttacggttggaatagattgagagaaaaataaaacgtgttggctcattaccagaaatggcgtaaaatcttcaaatcgtaaaactcctatcctgtacccttatttttaattttcaaggccccatcatccatctgggtgaccccgataatatatattcacgaagtccagtcaactcttagaagcttggatcttacgagtaaagcttcttgtcgtagctgtggagaccgtggacgttaccctcggtcatagcgctagcacttcgcatctcgaaacgcacagtgcccttgttgacaccgtcgtgcatatcggtcaggctcttgacaccaatatcctgcagggagtgctggacaccggcgatgaggtaaggaataaacttggtgacggatccgcggtcaaggacggagccagcgacaccctgggcaacaaggacgcggtccttctcggagaaatagcgagcagtaccagcgttgctggccttgctgtcctttccatcaccaccggccttcttatcctccatggcggcaatactgcccatgccacggtaggccttgacgagctggccctcgttgctgacgaagtactcaccgggagactcggtggtaccagcaagaagaccacccatcatgatggtgctagcacccatagcgagacccttgacgatgtggccgacgttctggataccaccatcggcgatacagggaacaccgaagcgagcggcaaatgttgcaacgctacgcacggaagcagcctggggacgaccaacagccataacctcctgggtgatacaggcactaccgctgcccatgccaattctcaggccatcgacaccggcggcaatcaaagcagcagcctgttcacgagtgacaacgttaccgccgataacgtcgacctcggggatagtcttcttaatgtacttgatcatctcgatctggtacatagagttaccctggctagagtccaggataacaatgtccaacccagcttccacaagaagctggaggcgcttcttgtcctcctcgcgagtaccaatagcagcggcagcgatcagctgcttagagtcggggagcttggaggcaagggggtagtggaggttcttcatcagatcagagcgggaaagcagggcgacgatgttgccgttaggatcgataataggaagctttcccttcttggaccgacgaaggacttcgttggcttcggctagggtggtgccggccggggcagtaacaagatccgtggccataacggcagtcacgggctcgtcgagaccagtgtggaactggatgtcacgcgaggtaaccattccaacgagcttggacttgagggttccgttctctatgttcaaacattagcatctgctgtcgaaagatcatgtgagggtaatatccaaaaagacaaattgctcagataaaatctggttctctacagtgcaactttcgttgctgcagtggaacgaaagttataattaaaagaggatggtcatcatgcaaagtggatgggcaggtgatgggagaagtagatgtggatatcttaccagtgacagggaagccaccgaagccccacttggccttcagctccttgacctcaccgacggtggccttgggagagatgacaacggggtccagaatgaaaccattctcgtatctcttaaccttacggaccatctctgcctgatcctcgggggagcagttgtggtggataacacccagaccaccgagcagggccatgtgaatagccatgttgtgctcggtgacagtgtccatgggtgaggacagaaggggagccttcagggagatacgcttggtaacaggggtatccaatgagacatcggaagcggggaagcctatatgggttagaaaaaaaaagaattttctatcttgactgcggggtccagcttaccgatgtaaccaggcagaatcaggaaatcattgtaggtcaatgcgccgtgcttgtcagagtcaagcagggtatcggcatcaagaccatcgagggtggtgtaggtatccaagacctcaacggccttggtgtagtcggcgatctcagccttcatggcagcaccaggtgcagcgtcgccggcggtgataggcatgatgaaaagaaggtaggtttaaattgaagactgagacacgaccgagtgagatattaatcaacagaaagaaacgttctgttgatggagaaagtcgagctttcccaaggaagagaagaagaagaaaaagttcgagcgaaaaattgtttccttttctctcccgtgcacggccaagccaagaaaaggcttggctattttgggtatagcgtactggcttttttcactgttcgcgcttctgattggcttgtaaacgagatccttcaaggcggtaagctttttatgcttatcattatacatcgatgcaggtacatacatcggtactattatgtggtgccatgtaacgtcgttgggtatgattatgatgtacagtcctcttgtcaaggttatttttccgatgagcgggacatgaatatcgattgccatacaatatataagacagcttttgaaggtggaagtgaaggtccaatgtgagttggctataattatcagggtgccattcttgatatttacatatgtatataaaaccacataacggaccaagatccttgttttattgacatggttggccttgcaacggatcagtaatcccactagttacctaccggcttcaagtcccgtacagtatgacgacagaatgatagtagcaaatgcaagctattaaaggcagcatgatttgattcaaattgtcatcaaacatcaattctcacttctgacttttgctatcgatatggcttcatctcctatgggtgaacatggcaccttcaaacctgcaccgggaccacagtctcagaacaagccggggtaagtaatgtttcacccgagcgaaatatatccactaagatgatgtgctagattggagagcaaaatgataaatcccagtgagtcgaccaaactggaaggccttcacggcttctcggaatatatgggttccgggaaattgaagggcaaaaatgctcttatcactggcggggagtatgtgcagcaagttcgggaacaaacttatttaggctaatcaatccttagttctgggattggaagatcagttgctattctgatggctagagagggcgcggatatcactatcgtttatttgccctcagaacagcttgacgcagagacaaccagaaagtctattgagcaagagaagaggagttgccttctcatcccagccgatttgagagatcgcaaattgtgccagcacgcagtggatgaacatgtgaagaagtcagccagcataaggttttgttcctggtattagcaaatgactgaccctgggagtctacagatacggcacggtcaatatacttgtcaacaatgcgtcggcacagtacctatgtacggaatttgagaacacagatctggataagactgaagacatcttcaaaaccaatatcatccagatgattgcgatgacgaagtttagtcttcctcatatggcacgaggtgattcgtgggtgctttcttctctaatctatatcatcatatactcacgcacttgctgcaggatcatcaatacttcttctatcgtgacttttcgtggctcgaaaaccatgattgattatgccgcaaccaagggagctgttatcggttttactaggtctttagcacaatccttgattccaaagggtattcgggtcaatgcagtcgcgtgaggatcatccataaattcctctttgaaatcacacactgaagcattccaaattacagtccaggtgcaatttatacaccaattcaagttgacactcgagatgcccaacagatggaaggatggggtggcggggctagcattggacgaccaggtgagcctagtgaggttgcaacaagcttcgtcttcttggccagtgcggacgcctctctatactgtgagtgatcaatatctcacaccttcaaatattcattattcttgttattgtggctaatatggggtaactatacatgtatagatgggcaagtgatgcattgttacccgcttggtgactaaatagtgtagggggtggtggaaatgttggagcactgtgctgagcatgtatttgccattggtatcaaatttgaattcaacgtgatatgaagtcagtacaggagccacggcttccctgcagtgagagccttgtcccatccctcatcattctgccagatagcgacgctctcgatctcccctctgcccagttttagtccattgtagagatgctaggctttatttcagcgaatgttaatttcagaccgacatatgcagcttactgggaaaagtccttcaccgggtcgaggggcagacactttcccgtctggggactcccagcggatatcttggaccacgcgatgatactcgatccgcaataaatagacaagtggttcctctgtgaaaaatgctttcaatgtgtttcccacctgatgcgccgttgagaggtggatgaaaccatcggcctcgtccagttcgctaaccgtgagccgctcagggattggttcgcgaactggtgcggtggaaggcacaatcttgtagatgtagcgaggttgagaaatcaacgaagccatgatgagatttatggagggaagcaagttaatgcaccgcgtctgtggtgatgatgagaagaaatcaaagttagtcaggtggtttcatttgttggcggggtcggttcaaccggcaacttgcctttcaaacgcgctgggattattgcgccattatttgtacttgtttacttatctctacttgttcaacactaaaatgaatttataacatatggaattttcaatgagtagttatcttcaatgctgagtggatagaaaaagattcaatcaagacttgcggggatatatcctgtagcatatccttggagaggttacagtactaagcatgatatttgtgaacgagaaaagccccagaaagaggcaagtctctcccaaactcaaccaaagcttgaaggaacagcaagtacaaagtacataattatgtatgttgtatattaattgacggtctatatagttaacttactgggtgacttccaaggttgaaagctgtgttcgtcgcacgggactaccacttttgccaagactgcagacatcctgataagtcagatattgggatttgaaggaatgttcggcagatcgattgattttctgtaagggacctttgcgatttcgaataattgcaaaatagaagtaagcaacagatctatgtccacctgggcacatgtgggactcgtcacaatctcttagttctgcatttcacgtgattcaagatcgacaagccacaatcacctgattgcgccatacccgatctggagatttgttgtgccccctgcgcccactttggggaatcttggtcgcacttgcacccccaccgtcaacaattccatcatcggggattcacgagtctagagcccattgacacaagtcgcgcatctattgattggattttcttcgcgtataagccatgggaggttgcccttgaacgctacccaatccagaacgtcttttccagaagaagtcttggagacctttaactcgcgcattccgcatttaccaccagagcagggatgcggtcaaaggagcgcgacatttttcaaaccatttttgcataccgtcctgagattaaatgatgtcgaatcaatttccatccctcaagcgggcccagacggaccttccctcacagtccaccagtccgttacgaaacgggtcgacagcgtccaccaactcgtctgcatattctgtcgcatcaagctcgtttattcctagccggactagcactgtctcctctaatgggtcggtatcaaacaaattgggtcactttcgagggaagagtgaggcaggcagtatgagctcagcaacgactgttacggacgcaatggaacgaggaagttggtccaatgcaggtacgacgtacgacaatattcgccgatctctacgaccactacaacaagtccctaatactccatcctcaactgcaaatactggcgggtaccgacattcacgaagccacacaattgatgaatcactcccgcggaaggactatcgaccaagtaccccagaatcgcgtcatcttaatctcaaagagaatcaggctccgcgtcaccaaacacacagtcacgaatctcagagccctccagcgcatatctctcctcgtcactggtctactgtgcccgaaacctcgcatccttcgtctccccaaaagacagtctctcatcccccacagctgactgctgcactgtccgcacccgagcttgaaaccctgcagaaatcatccaccggccatctcagaactctctcgaggtttgcaaagtccggtgaaaacgaatttagcgcagctgcagcctccgtagtaggcttgcaaggccgacgacgcctcaagcgagcggactcggtagtagggagaaatggcgcagtatctcccgaaaagccgaaggcgtcctcgtgggcggccgggaattggatggaccaacagcgacaattcatccaagcatacgagtatttgtgccatatcggagaagccaaacagtggatcgaagatgtcattcaaaagcaaatcccgccaatcgtccagctggaggaagggctgcgagacggcgtcactttggcggaggtggtacaagcaatgtatgccggcaaagcacttcgcattttccgacaccccaagttacaatatcgccattcagacaacatagccttgtttttccggttcctcgatgaggttcaattgccagagttatttcgatttgaactcatcgacttgtacgaaaagaaaaacattcccaaggtcatacactgcatccacgcgttgtcatggttgctcttcaaaaatggcatgctggacttccgaatgggtaacttggttggtcagcttgagtttgaacaccacgaactcgagaaaacccaaaaaggactggacaaggctggcgtgagcatgcccagctttgcaggtatggctgagaactttggcgcggagcctgaaccggaacccgttgaatcagaggaggatcgtattgatcgagagatacacgaaaatgaagcctcgatctgcgatttccaggctcaggttagaggagctatgatacgtttacagctcggcaacacgatgaacgatctgtgggactttgagccccttctcattgagctacagtcacgtctgcgtggagattgggcacgccaaattagtgaataccggctcagcatgctccagtttgcagtggggctgcaggctattagccgaggcttcattgtacgtcgcagtcagcaaggcgacgagcaatggcgaaaagcccaggaaacagatgttctgcacttccagagcttgattcggggatctagggctcgcgcccagactagtcacctacaaactcgcgcacgacaagaagagtttggcatcaagcagatacaggccgcgataagaggtacattgcaacgcatgaatcttggggaccaatacgaacagtctcgatatgctgaaaatgatgtgaaagcacttcaagctttgatccgcggtaccttacaacgaaaggagatcaatgctcgttcccaagagctaaaacaagctggcagttccgtcaagtcagttcaagcagctatccgtggtgccttacaacgaagagaaataaatgccttgtccgaagaggcgaagcaagttggaaagtccatcaagccgcttcaagctgctatccgtggtacgttgcaacgacggcagatgaataccctgtccaaagagacgaagcaggttggcggctcgatcgagtcgcttcaagctgccattcgtggcacgttgcaacgacaacagatgaatgccttgtcccaagaggtgaagcaagtcggcagttctatcaagtcgcttcaagctgccatccgtggtacattgcaacgaagacagatgaacgctcactcccatgaggtaaaactgacagaagcacccgtcaaatcgcttcaggctgtcattcgaggatcgatcacccgcaacaacttgtctcagatgaaggttctgctcaacaacgaaacgccccaaattgtctgcattcaatcaactctcagggctctgattgccagacaagcacaaactctgctgcttcaggcactagaggaaaccgaaaatgagtgtactgcactgcaagctatcgtgcgggccgctgtcgtgaggaaaaacacctcagctattcgcaacgagcttgcggaacatctattgccagtggtcgacctgcaagctattctcaggggacaagctctgagagaattattggatacccagaggaccgaattgctcgaagaagaaccttctatcttggaactacagtcccgatgccgtggcgtcattcacagacagtatctactcgcacagcggcatgaactgggccaggaggaacatgctattgttgaacttcaagcccttgcgcgtgctgctgtctcacgaatggaggttggtgacatattgtctcaccttgaggacaacgaggaagaagttgttcaactccaatctttaactcgggcaatgcttgcgcgggttgaagttggggagatcttgaccgatcttgaggcagaggaggacttcgtcacggacttccaagcacggatcagaggtcacattatctgcaaccgctttgaggaaagacgtcaacattacaatgaaaacatggagaaggtcatcaaggcccaaagtgttatccgagcccgcattcaagggcaggcttataaaagcctgacaagcggaaagaatccacctgttggaacggtcaagggcttcgtgcatcttctcaacgacagcgatttcgactttgacgaagagatagagttcgagcgcctgcgaaaggtggttgttcaacaagtgcgacagaacgagcttgctgaacaatacatcagtcaactcgatatcaagattgccctccttgtcaagaataagatcactctggatgaagtcgtcaagcaccaaaagcacttcggtggccacattggcaacttgctatccaacaccgaaatttcttccaaggacccctacgatctcaaggcccttaacaagacctcaaggaggaagttggaccagtatcaggtgtttttcttccttctccaaacccaatcgcagtacctggctcgcttgttccggcgattgcgtgaggtcaacacctcggacaaggaatatgagcggatccggcatttgatgatgggtctctttggatactcccagaaacggcgtgaggaatattatctcattaaactcttggcacgatccgccaaggaggacattgaaagcttcacatctcttgctgaatatttgcgctgcacctctttctggaacaagcttttcgcttcatatgccaagtcatcccgcgatcggaagttcatgcgcgacgtcttggggggtgtcgtgaaggagtctgttatcgacaacccagaccttgatttggagagtgatccaattcaaatctaccgttccgcaatcaacaacgaggagctgcaaaccggccaacgaagccgccgacacccggatcttcccagagaagaagcgattagagaccccgaaaccagagaaacgttcattcaacatttgcaagatcttcgtgacattgtcgatcaattattctcaggctttgaagacttcctataccgtatgccattcggtatcagatatcttgcacagcagatgtatcagaatctactagagagattctctgccgaggatccaggcttaattctccaggcggttggccactgggtatggaaaagctacttccagcctgctgtgctggagccagagaagtacggtgtgatcgatcggggcctcacccaagaacaaaagcgaaatcttggcgaaatctctaaggtcgttgctcagattgcatccggcagactatttggggcagataatgtttatcttcagccgctcaacaagtacatcggagagtcaatccagcgcctagggaatatctggggtcagatgatctcagtccaggatgcagagtcttatttcgacattgatgaattcaacgacctctatgctaaggccaaacccaccctgtacattaagatgtctgacatcttctcgattcaccagcttgtggcctctgagattaactatatgtgcccccaccctgatgacttcctcaaggaagttgtgcgagaacttggcaatgtcaagagtaacgagaacgaattgatgggcgtcagctctaccgagatcaatctcacattaaatcccaagttggcccagcttgaaggtaagcaattcagcaaagcccccgtttgttcatttttctaactctacatcccagaccccgaagccgatgtgaagacgctctttatggagactaagcgttgcatcctttacatcatccgagtccaaacaggttccaaccttatggatgttatgctcaagccgccgacagccgaagacgatgagcgatggcacactttggttcgggaagaactgagcacgaacaaccctcgccgaggcgcttactcggaagccaacagcttaattgacattggtaccatgagctattccgagctcaagggcattgcactcgaaaatattcttcgtcttgaacagactggcaagatcaatcgtcacaatcattatcaggatttgttgaatgcaattgccactgatatccgcaccaagcaccgtcggagaattcaacgagagcgtgaactcgagggtgctcggctgacctcccagaggctcagcggccaagccgtctacctggaccagcaactcaagacatacaacgactacattgagcaagccatgatcacgttacagaacaagaagggaaagaagcgattcctgatgccgttcaccaaacaatgggatcatcaacgagagctgcaaaaatccggcaagatattcaaatttggatcctacaaatactctgcgcgcaccctggcggaccgaggtgttctggtcgcctggaagggctacgccgagcggcagtgggatcgggtcgacttgaccatttcaagtaacgaagttggtgtgttcaccattgacgggagcagcggtgtcatgatgattcctggcgccaacgcacaggtaccgctggacgacttgctgcaggctcagttcaacaacacgcaattcatggacttttttgagggacagatgcgagtcaatgtcaaccttttcttgcatttgatcatgaagaagttctataacgagtgagaggcatggcttacggacttgatgagggatgaattgggtgcacattcttattgatattattatttgtctgttttttttcttctttcttattattgtctttgtttaagataccatgggtattttgttgatttcgatagcgatagcattcggtctatacgggcgaataacatgtacacagtatgataccattcagtatcaattgtaaaccaattcaattttccagaagacctcttaagtagaaagtagacttacgtagaataatcgtctgttgtattcgaagtatacagggcttggtcaggggttgccacgtgacgtggcgcattcaatcgggttgccagctggaaaccgggcatcttcctcccctccgactgtccacgttagtcctgagggatttttgattcttcctgtgcttggcttccaattgcctgtgctgctattatattttctctccgatcctcgtttctccatacttcccctgacgactaacagtcacccctcaccatggatttctccaacctcaaagatcaagtcagcaacttgtccttgtatgacctcaaggccggtgttcgcaaggtacagaatggtaagtctgaatcccgattggtccgagggcgttatgaacaagcccgaatcagcttgcatgtgtcttacaatttgcggaaactgatttggccgttccgtcatagctgttatgaactataccgagatggaatccaaggttcgtgtacaatcgctcacccctgcgcgaaacaacatggcctttcgcagggtgaaagcgaaaagatggtgcgatccaatgcttaccctagtcaggtccgggaagctacaaacaatgaaccctggggagcctcgaccacgttgatgcaggatatcgcgaatggaacgcatagctagtcagtccatgttatctgtcattacccgcaataatgcgcaagcgctgaccttctgttattacagccaattactcaatgagatcatgccccttatctacaagcgattcaccgacaaggctgcggaggaatggcgacaaatttacaaggtaagagaaccgtggttattcatgcgggtgtgcattgactaaaccttttttcctccgaatatagagtcttcagctcctcgaattccttgtcaagaacggttccgaacgagtcgtcgatgatgcacgatcccacatgtcgttgattcggatgctccggcagtttcactatatcgacataaacggcaaggatcagggtatcaatgtgcgcaaccggtcgtccgagctggtgaaattgctgggtgatgtggatcagattcggactgaaagaaagaaggccaagaacaaccgcaacaagttcagtggtttcgaaggtggcatgggtgccggggcgggcatgtccagctcaggttcgggccgttatggaggctttggcagcgatagtatggggtacggtggatacagtggaggtgtctacggtgacggcggcggctttggcggagaatctggcgggcaagctggcgttgacttccaggacaatggacgccggtccaaccgcttcgacgaatatgacgagtatgacgagggagatgccccagcgcgcccacgtgagtctatctcccgggcgaagccccaagcaaagaagcccgagccagctcctgcgcctgtagcagacctcttcgactttggcgacgacgagcctgttactaccacagcttccacctcgactggcaagcaacccgctggcagtgctctgaatatactagacccatccccagttgacgacgacgacttcgacgacttccagtctgcaactccggttatccagtcatcaagtcagtttgccattcctcctccagcttccactgccagcacaacttcaaacacccaattcgttgcgcctcagccaatttcggcctcacagggtgccaacatcaacggcctagttggattcacatcggccagccccgctccctcttccagcggattcgccactcccgtttcgcagatggccccgattcaacagcagaagccctccgggtaccaagctcccacacccaactacttcacctccgtcaacgtggcccaatcttctggatcctctcacggtgccacctcctccatgtcctcagtggcttcacccacagcgaataagccagcttcagcagctgccaagaagccctcgggtgatgttttcggttcattgtggtcgaccgccagcgccagcgctggcatccagaaaaccaacaccggcacaaacaagggccctaaccttgccagcatggccaaggaaaaggccagcgccggcatctggggcaccccagcaccctctagcacggcctccacgcccagccagccccagcacaagcaacagtctagctcggcctttgatgatctgcttggttgatcagctagcaaagcaactcgtcgctcttacccactgagcccatgctcgcttcttaattttgcgatatggagtcatgatttcagcattcatattcctgatttgatttgatctttgttttattctgccttccttcattgtttttgtatactctattccattcccatttcttctctcccctagttggttccctacttccctacctagctagctatacgtacttgatttcctctgcggggtggggatattctatcttagctgccgccgctcttatgagggcgctcagagtcaggctcatcgagtaaatttgtgtccggaagtcacgtgattattcagtgagatctgataaacgctcactaatcgcttcttagagtcatctatgaagcacctactttctgatggcccttaatcttcactatgctcctcttatttcttggggtgtatgatcttcttattccgctctcaaaaacagcgcaagcatgatgacgcaagactggaaggcacaggggtttctccattccctatcgcaacttcatacatcatgggcttcgtcctcggtgaaaccgcatgcattgcggtatgttccagatcacccgacagctaataatacatgaatgaaactcataaggggtgtgtaaaaggtagacaaaatagcaaagctagcggcaagtctcaccgaagatgctatggcatccgacgataatagctcagaactccacattcacaccaatccccatccctcagccaccagatcatcaaggacagcactataagcaaagaccccatcactcagatggaaaaagccggacaccccacctgattcaacgtcaacgattggggcgccgcacacaccatcagagatagccctattaacattcccaaaaaagaaatccaccgatctggtatcccattcttcaaatttgattccgcgatgaccagctggacgtttcggttgcatggtttgggtgccaatattcatcatgctaaagagccctgaactcatgccgtccacttcactccatgagccttgggagatttgggacatttctaggaggcgagtaggtggttcggcttgaaagtagcaggaattagtgaagctagatgaggcagcgggtgttagtttgacgagagcgatgtcaagcccaggtcggatatcgacgacctcgccgataagatctcctccattcacaatgggtggtatacttcctctgatgagagaaaaccatgattggtgactgtcagcatttcttcgcccgcgagattgcgaattttgataccacacgtggttgcagcgtttgtggattcggttgaagtacctgatagcccaaaaccactctcgattctacatcctggtgtaagaaccaaccgcctaaggtagtttgagtcatcttgtggtgcagcaccagcagccgataccagagatgggacaataaagggagggcgggtaaggcttctcatggtgctagaaaacggttgatctccgtggtggtagagtgctgttcggcctgccacgacccgggaagggatcgcttttcgtagttccggccatctccaaactcaagttcgaagatagtccaagccgggagaaacatagcagctctcacacgagcaagtggcgcgatggcagtaagcacagcaactgcctgacgcttagtcggattggttaattggggccaccggacagtgggacagggatcgggaacacgaggattcgaatatccagataaggggattggctccctaaacatctcaccgggacgcacgaatatgacaggcatcgttccaagggtcagtggtataggctggggtggagaggccgtctccatacaaataagccacgcggagatgtgcactgttccttccccgaacttattacggatccaggtccagtcctgacctgaggggtggcggaacttgtggttttgctcgtcccaaagcgtgaacggcgccatgtcattcaagtgacgtgcaccccagccgccgggattttcccagcgtttctgttctgggtgggaatgggggagcagatcccgaagcggactaacaggcgcattatcatatatgttggtgtagggtgagctttgctgaatacactgaacatgtggggataggcggatcggagatgccatcggagttgccattacatatgctgactgctgatggtacaagctatgggatggggtaagattatgtactattccattaccggactgaacgagggacttggtcacatgaccaaaccacctgacataggcaggagcataattacttgaccatagcagagtaggttgcgaaaatttggcctctcatcccacctcacgtaaaaatattcgtcccccgcgatctcttatatacgcgcggcaatacctcgtttctgcgcattttttgtttactagtcgcgctgaaaagcaaacagtctcatatttcactgaagagtggtactactttatgtacggcggtattcggaactttaatgtccgatccatttggcccgcgattatattagaaatattatactggagctcacctatatacctatcccttattcacccaatggattttgcgaggcaaaagctgggttgtggtgatgagcccgataccttatacgataggcgtgaatgccagggtgaatgccaggtatcagttttgtatatctctaggcaggttttgtctcatagtaaattagttatatagtacattggcatttgataaagtcgtgtgtagacatatgctaaatagaatgtatcttataataagtggcaattgaatagatttgaatcggcatgatgccgatgctcattgatgctggtataacgcgtgcgctgaaggaaactaaatacaggtgagggaaaacgatgggggataataagagacatttgtgagacggaagaaagaacagataaggcgacaatatggcgaaaaacttggggtatgtagtagaagaaagattcttgatcctcctcaatcccaggttatgctcccccgaagtgtatgattagaagacatgaattgagatcgtgagaaagggatgatatacgttaataaagaggaacttgcgatgggtgatagttcatcgcagtaatgggttgaacataaggctggaaagaaagaggtgggtttatatcagactaaacagtccgaagagaaggtaaaagagaaaaatccttttgagatggagctctgaaaggtcttagagattgggtaattcgggtttggcggatgatccaccaaggaggtgctgattgagtgctcatgaaacaaccttcccacatagtcaactgcatgtttcataccagagatcttcccaccctgacaggaaagtggaggttgccaagctttgctgatcgactgtcaggatttcatggcgggttgcaaccgaaacagataagccatctctccaggtgaatcgtgcacggagcaccgccaaggcttttcatggacgaacaaagccatccagggctgatattcaattgtatcaagtcttgctcagcgtgctagagcgtttgtcggcgcccccagccgctttaccggtcggagtcccagtattcgtcgcagattgagacgcatctgcgccttccgtcgaaactgcagcgggggaactatcatcagtggttttgtttccagactgagcgctcacagcaaatgaagcctgctccacctgggtaggagtagatatttgttcagactcggtggagtctagactaacgtctgcggccccggtgacgtcggggtttggttccccattcagcgacgtcaagcctccttcgatgtctcgcaaaagacgcacaaattcctccgggacaaggccattctcccctgtcttgggatcttctgcaaccagccagccctggccatgccggtacgaaacataaatcacctggccctcggtaagaggaagttcgttttcatgctctcgtgtgaagtcaaagagtgcgacggcttttccatgcatctcttcatccgggcagccaacggcaaactgataatctctagagtaccgattatcaccggggttttcatcttcggactcaaacccagggtcatgttcatagccctgctggccggccggggcgctatatcccatggttgaatagcggccttcatttgccggatatgtcacatactcaccacctggtccatcatctgacgtatctccatcatttacataataagtctcactgccatcggggttaatgccaacgagcattccgcgatcactgttcaccgcctggccagttccagacatgactctctcatctacaagaccatttatgtcagaagtcttcttgcgatgacgcgacgtcacaactgggctatgcaggtcttcatcctcgctgtatggtggtccatccccaaaggacatggctggcaactgttggtggacataggtaatctgaggttctatgcccgattggcctgttgaccatccgcgcgatatatcccaagaaggtgatggatcggagaggcgtcggtgttcacttgccggtgtggagaccccggaggcgcgaggaggaggaggcccgtaatgcaggggatgggtcgacgggtaggcgaagtctcgcacaagagcatatggaagacttgtatggaaaatggggaagacatgggagcctgggcgcgaacgattttgtgatgcaaatgagacattggaatacgtggagagccgatccttcggatgcgtcgatgaccgtttcaccgtcccatcggtgaggatgggtggcaggactgagaggttgtttgtggaaataatgttctgcgatgatgtgggagaagacatcatggttgacatggagaaagacccaggattgagttcgggatgatgaataacggggcggatcttagagaaggaaatgtggggttgttcatcggtcgcgtagttggcgctctagtttcgcattgcgattgatatggtccaggttattgaatttgcagtcgcagtcgcagacagctggttttcctttggttcaaacaagggaggtatatcttgtgatcggagatagaggagatattcggctcgaggacgatgtagtaagcgcccaagtcgtaaggggtcaaacccgattttaggttcgcgtaattcaaaccaggggcaacccttggatgtcaagcttttgaagcaaaaaaaaaggatattatccccaaggggctccggtgtggtggacggtgaatgggtgggtaatcggcaaacgacacgagggaggggggcaaatgtggtccgagtggaacgccgaaccgcgacggggaagatctcacgatgagaagacgatatcaacaagagaaagccggcgattttgcaagatttgcgtagtagaatatccgttcaagggctcaaggtgggattggcaaaatcgagactgttgttccagcggtttgtcccgcaatcttgagggtagggaattgctaaatatagtagcagaaaactgcagaaaggaccaatgtcagatacgaatgtaacggaggcacagcgcttatgcaggaaagaatgtgcaaaccacacggtaacaagtgttttggtcaaggccacatgggaaatgggaaatgggaaattagagggagaaatagactcgcgagtgaacgctcggagattgccatacctgtctaagttgtaggttgaactggagtaatgatcagcgcgtagttgattttgggatcgggggactgttggttgttgggacaatatgatttatccgatggactgcagcaaaggaagcagcgtgaatcagccaatatgcaaggcagccgcttgagagtcacagagttgggcgtgtgtgaatgggtgaagcttgaacccgtcgagcagtcacgtgccgcccagccttagcgcgtttcaagtctggtttcgtctattcccgtttgggactaaaggctatatataagattgttctacttcgatgcctccatgttctgttatgaatgcagggtatctgagacatagattcggtttacaacgggataattagtttacaaacaaagggattgtcatttcattcggatattcagtcgctttgttctatcttggatgtttggtctttcaacttcattttatgtgggttgactcccagccataaatacagtgcttgtgctgatctcccaatctgtcactgtgactgttttaggctgaacccctgtcgcatccaaagatgtgccaaaggtggtcggctgagaggatagctgagaggacggaacgccgagtgcatcgaactgcgaaggaatcgcagcattgttgagatcttggtcagtctcatagtcactcttgactgcctgcttgctgattgtggtcaccagatccacgtccatacaagttgtgtagatctcggcctttccattgggatacgtgggatcaacacctgcagcggtgggccaattccacacccaatagagtgtgtatggtttcccactgggagcattggagggcagtcgaatatcctgctgacaccagaggtctgctcccatcagtgggtctgctgtatgagtatacgtcgcttgtcgagtctctgagatttgccccgaattgacctggtagcaacggccatcgtcgtagttctgcaccgacagaagcactccccgtccatcacctcctgttccatctttggtccaggctccataaacatcaaggaacttctcgcctgtcttgggctgtgtggtgccatatacataaacggatccccggctcgcaggctttccgggctggttctgaggaagtgtcacatggccgttttcttggtagcgaagggcaattgccgcgccagcgctggcttcaagccgagggcttccctctgactgagtctgatcctgctgagtgtccttgcacatcttgtcggttggcagaatctgagttacatttgcccttgtgttgggtgggatcaagtaggtcattgcagtgtcgctaaagcccgatgtcgtgcgcaggtagtttcctcggggatatcctggagtaccgacgaaggttccattcggagcaatgagagtgagctcttccacccaagaatgagcgtgtgttggggtatacagagcaaagagcactatcaaaacaatgatcaacatcgtgatagtagttttggatatgtaggattcgaggttaaagtttgtaagaatgaagttttgtggacttgaaggggacgagataacggcgaccggcggcgtcaaatcgagtaggtattgcagtatctctttctttgggtataaagatttggaagaagctgggagtgtgcaagcgggaagtgccgtatttattgagtctagaagaacgatgaagcggccaggtcgaaggctacaacaatgggctttgtcgagatgaataggatcattggaatgatagacctgtgactatgagtgtgaatagacaatggctctattcttaattttacaccaaacacccccaggccgcagcgaaaataaggataagaatagtataaaaaggtttcaagggaagctgttacacataaagaaacccttgtccgacttcgagtctttgagtctaattggagaggctctataccctgtgccaacccgtcattgttacaatcaaggctgttaatagacaatacaaacccaatgcccccagggcctctagacaaagcaggggatgattgggtgagagagaagatatttagagtcgcagaatatttcgagacatgttcggttccgctcctggcgcgtagccgtgatatatgcaagactctaggtgctcgatcttccaagcttgcaagtgtgttacaggtctgcaggtccgttggcccagcaagcacggccattggctgattcgggccaccctgggcgcttcgccgtcagagtcgaaattaacgaagaccctctttagcgctttggctctttctggatattattctgtttgctttttgccatttcatatgaccacttgctatgatacctctggctctgaacgacttgtagatttatcaaagtatcacaaaatatatcagacattcaccaacatctcattaattaaaagggggcacggtgtgccaacagtatcttacttttttggagcctatctttttgagaagtctcagcttgttgaaaaaaggctgctatgtcgatgattttgcggagcgaagcgaagcaattaaaaaaaataaccctctccccttcccagggggggtcgaatggcccccggagggaacgcctcgaaaggagatcatgtgaccaggcgctctctctactgggtcgaaaaaaatagaaatccagtcggtgaaaaagtaatcgctgagaaacggcagaatagatccagccggcagaaaaaaaaaaagcaatcatctagtactctgtactctaaccctatccccttaacataagatcctaagatccttaagcagctcaaagatattaaatcaaaggagcatattattagagggggcgactcactctcctatttctgtctagttattaggtggtcaattactacgtccacgggtagccactcatataaaaggtacatataccccatattatgtactcaaccctttggctagttaaaggagaaataagagtatgaatcaagaataaatttatagttgaattgattggctaataaaaaaaatctcggatatcttatatatagaagtgacaaaatctctattatgtatattttatatttatgtaccttttgtgtgggtataccatataaaagatacctaaaatcccaaaacttccgttatgtggcaatcttctgttatgtgggacagacccatacctggaacaggtatgggggcggtaagacggctattcttatagtcagatcgggaaggcactacatacggggtattgtttgctatatattgctatataaatagatcctccccccaccgctgtctctctccccatccacttcaccattacctttggaatgctacccagtctttctccctgatcgaggccatccttgtgtagccatctctggaaaatgtctctggaaaatggcaaatccaatctcattctcagaactcctatgagaaatgcctcctccaatcaatgacgggtcctcacacatggcaaacagtgccatccctaggattgaatatgttggttcccttcgcccctagccaccttggtcaactacgaatactactgacatcatataggcgctttcatatatcccaagatcgatatcagctcttcatgactgttgccaagtatgacgagaaccatctcaagcacccgagcgataaggagcataacatgcaacccatcataactgtctcttcagggttgcagcccacctcaatgacattcgagcacatgatagctgttgatgagcagcccaagaatgtgttggtgaggttttgagtgccgtgttcaacacgaaacagttggatttaggtttcgcagattctaaatgcagagttaggctgccggagctaccattatctggaatcatgatacatccaagcttatcgggtagtcgaccagagctatccggaggatcataaaaaataagaggaacttcctatcgaggtggtgagagcaaaacggtcttaccgttcttgccggatcattttcctccccattatgggtcttcagtggtccctacaaatcctgcaaacccttgaccaactcacttagtaaaagcgataaattacaacatgatatttcaacaacggttgtctatatgagcttttccttctagtctaatgctttttatctgatatctagctacttactggagtttaaagggatttaataaattagtgactgagatatatatatttctagggttcagcgacgtatttttcgataccataataatgcaagttctcgatttattcaaaactgatatatgatactacaaatgcttatcaattgctatcggcgagtaataaaattaaaaaagagcgttggttgttgaaatatcatgttgtaatttgtcgcttttactatgtgttctgggctgcgcagctcgcccgggtgcgcagctcgaccgggaattacgttaggcctagtattcccttgcctgaacgactctattattttgctgttcgctcagcaaaataacctaggctaccccctacagtaggtcacattaggacagactttggttcgtcaacgctcagcaaactataacccgtatgcgtcaccaccccgagtggtcgcttataggtagctggtaatgtctgtttcatttgttcttgtccccctttatcatgaccaccccttatggcagttggttgttcccaaatctatgagcacatgattgtcgcaggctgaccctgacattgtaatctactaatacgattgcgaacacgctgatcaaaatacaggacaatcccaactacaggcttacataatgaatggggagtgcccagatgccccccaggcccaggtttcaggaggtgccacccggcgacccctggcttagggcccagtccatggggttcacttggtgatcaaaaaagcagcaaaaggggagtaccaacaagcatcagagagcaccaataccataggaaagccacttgaggccacccaaggcacccaaggcacctcagaaagtgagaagttctgcacattcccaagaccggagtaactcggcatttaccaagtcaacgatctaatctttttctctttttcacttggcaagctcggttaccgagtttattatggatatatggagtctgcaccgggtcaatccgagaagatgatttgactccgagttatcagatttttatcagatttttatcagatttctccgtagctccaccgggtggattccatctcactggtatgagagaaattgggtggactctttttctgacatggactcgcagattggatgcccagtcctccgtatatccctcgacttccctcttcagactaagggaaatgtggctgacgtggacggaacaaaacctcatttgaataatacagggctaataaccctgaacaaaacgagtggagcctttgttgcttctctcccacattctgttttgtatcacgtaaagatgtcaagatttgagcaatatagattgaatgtcttcctaaagattcctaattcaattcactatgtatagtgtgcaacatggtatgctgtgtcccatgtcccatgactatagttaaaggatcggcgtaaatataaacaaatgcctgtgcattcaatagctccaattccttgggttgtactttgtactttgtctgttgtaggcactcggtacctacctacttgggcttttgttcggtgggaattttctctaaagggtctactgcatcacccgcggacttgaattgccatttacaaatactatgttattcctccatatcaccctcttcaagccattccgctatatgtagttctttatgaaatattgcagcctggatcgtaatcgtggaatttcccctccatgtcagcttgactcgaggatccggcatattattgttctgcccattcttccaaggttcctaacgcttctattatttattatttattctttgttctcgttataaaataccaagattctccaataataaatcgcctcgctggaaacccgaccaattctccactagctgaagtcttggcgaccccgttgtcggcgatacttaattccagcggtctcgggcacctattatttcagcttcagggggcccttgcttttttttccctttacgacctccgattccaagggctgtgccttgagctttctttacttctcccctcggtacgtattatttttttggtttggaccttggtttctgcaactaagagaagaaaaaaacagtagcccggaatcctgtccagtcaacatcgacttgtgcagcccatatgcgctcctagaattagatcttaattcaaagattttctcctcaggattggttttggtgtaaaacatcatcccacgacggctttcctcgcaggttctggtccttgcggaccgtcttaaacacaacgccttcaacagacgtcctcaccgcttcctccgcgactagtcaacatggctacctcgttcatcaccaaacgccttcgctcaaacgaggaagagcagaatactcaacccagctggatccggcgtcaagttgtgtcaggcctccagtttatttctcaccgggcctgtgtgcaccctattcacactcttgtggtgatcgccatccttgccagcactacctatgtgggtctgctcgaaggcagcctgcttgataccccgaaagactcgttaagtgtcgcgggacaggtcgacaccgatgcccttctccagggaagtcgaaatctgcgactcggagaatcaacttcctggaagtggcaggcggaagatgcgtggactgacccccaggtgagcccatttcaccccaccgttcttcttgggcgtcgagaatgatatactgactcaatgaaatgttagaataagaagcctgctgcccagcacctggctctgacgaccctcatcttccctgattccaccaactctgattcaactgccccggcagctgatgatgtcccgattcctgccgatatctccgccaactcggtaccgtacaccccgaacctcttctcgcattttactcatgacgcttccctggtttacaccgtgccctttgaacaagtctccgaacttttgagagctgtgcaggagatccctgccccacccacggatgggaatgaggtggaatccaagaaatggatcatgagagctgctcgtggcccggtccacggatcccgcagagctgtaaagctctggatcgcggattcatggaattcctttgtggatctgatcaagcacgcggaaaccattgacattgttatcatggctcttggctacctctcgatgcacctgagtttcgtctcactcttcttctccatgcgacgattgggctccaacttttggcttggggctaccgtgctcctctctggcacctttgcattcctttttggactacacgtgaccactaggctgggcgtgcctatcaacctcctcttgctgtctgaaggtcttccattcttggttgtcaccattggatttgagaagccgattatgttcactcgggccgtcctgaaagcttccgtggacaatcgccgacctcttcccggcgctgcccctcgcccgctggcatcgagcacaccgaggtccatccaggactctatcgcagctgcgattaaggaccaaggttacgagatcgttcagcactactgcattgagattggtctattggctttgggtgcggcatctggcgtccagggtggactccagcagttctgcttcctcgcagctttgatcttgttctttgactgcgtgcttctcttcaccttctataccaccattctctgcatcaagctcgagatcactcggataaagcgtcacgtggcacttcgcaaggccttagaagaagatggcattacccacaccgttgccgagaatgtcgcttctagcaacgactggcctaacgccagatctggcgaggcggacaccagcatctttggccgcaagatcaagtcgagcaatgtgcgccggttcaagattatcatggttggtggtttgattttgatcaatgtcgtgaacatgtcagccattcctttccggaacaccggcaacggtggcctgctctcgcgtttctccaacgtcctgtctcctacccccatcgatcctttcaaagtggcagagaatggcctggatagtgtgtacgtggctgccaagagccagaagcaggagactattgttaccatcctttcgccgatcaagtacaagttggagtacccctcagttcactacgcagctcttaccgactctggttcgtttgacatcgagtacactgatcagttcttggatgccgtgggtggcaaggttctcgaaagtctgctcaagagcgtcgaagaccctgtcatcagcaaatggatcatcgccgctttgactctcagcatcatccttaacggatatcttttcaatgctgcccgttggagtatcaaggaccctgagacccttcccgagcctgtgatcgcaccgaaggtctaccccaagtttgaaccaaatgaacaacagtcaagaaggagcgtcgaagaatgcgagtctctgctcagggcaaagcgtgcgcccttgcttaccgatgaggagctgatcgatctttccctccgcggcaagcttccaggttacgcgctggaaaagtctatggaggatgagaacttgatgagtcgtgttgatgcctttactcgtgctgtgaagatccgcagatctgtggtctcccggactcctactacctctgctatcacttccgttttggaaaactccaagctcccctacctgaattacaactatggccttgtccacggtgcttgctgtgaaaacgttatcggatacttgccccttcctgttggtgtcgctggtcctctcaatatcgatggacaaaattactttatccccatggctactaccgaaggtgtcttggtggctagtacaagtcgtggctccaaggcaatcaacgccggtggtggtgcagtgactgtgctgaccggtgatggtatgactcgtggtccttgtgtaactttcccaaccttggcccgggctgccgctgctaaggtttggatcgattccgaggaaggccggagtatcatgacaacagctttcaactcgaccagtcgctttgcccgtctgcagagcatcaagactgcccttgccggaacctacctgtatatccgcttcaagactaccactggtgatgccatgggtatgaacatgatctctaaaggctgcgagaaggcactggacgttatgcataaggagtgtggtttcgatgacatgtccatcatttcgctttctggtaacttctgcacagataagaagtctgctgctatcaactggactgatggccgtggtaagtccgtcgtggcagaggctatcattcctggccatattgtcaagagtgtccttaagagcgacgtcgacgcactggttgagctgaacgtcagcaagaatttgatcggaagtgcgatggcgggcagcttgggtggcttcaacgctcatgcttctaacatcgtgtctgccattttcctggccactggtcaggatccggcccagaacgttgagagcagcagctgtatcacaaccatgaagaagtaagctttatcatccgccactttttgaccattgagatgctaataatgatttcctcaacagcaacaatggcaacctccagatcgctgtgtctatgccttccattgaggtaggcaccattggcggtggcactatccttgaagcgcaaggtgctatgctggatctcctgggtgtccgcggtgctcactcgacttaccccggcgaaaacgcacgccagttgtctcgtatcattgctgcctccgttctcgccggtgagctcagtctctgctctgcgctcgccgccggtcatctcgtcaaggcacacatggcccacaaccgtagcgcagctcccacacggtcctcaacccccgtgtcttctgccgttagcgccacccgtggcctttccatgacctccaaataaacgatgacatgactcactcctcctggcccgcagctgtaggccaatgtaaatgtgtggctacgacccatgattcttccgataccattcactttcaagactctttggcgtacctaccgctcgccttgtctttgcctctgcattataatgggagaccatctcaactgacagtaaaaaaaaaaaaaaattcaattactgacgctatccggtctccggacaggccggtattgaagaatcattcgatgccaggggatcagcaagatccaaatgaggcatactgaaggcatctcccttgggagcactataaccaatgcttcaaagcattcatgcgtgtattgaagctgttccacattgtgtacttagttgtttcggcatttttttttacattttacacttcccattcccatagatatgaccgaaagaatttatttgttttccaggcctagttctcaaataatacaaggtgggacccgtggactgtcggttacaacatacaacatacaaaattatacggtgtacaaaattatggggcaaggcaagggcctagaatcgtcaactcctgaattcttctcatttggatggttctattattaaatttgatatacggagtagaaggtaagtccatgtagatatgtcaaggtcaatgtctggatatgattttattgaacatgtttaaagttagctacattacttatagatatgtaattcctcgatacattctagtacatagatgtgtacgaagtagtaactatgtagtatgctgtgcccctggggagttcccctggcccgtggccttggcagggagaggtatagaatacaagtatcatatacgagtatagccacttttcgacttgactagtgatcttattattgatcaagctttaggaaaacgatgttcctggggttatgcagtcagccaagtaaaaggaatacataaaaaaaaggaaagaaaaataatgcgcatcagatctgagatcataccctcacgcataaatccctgtagatgcatacatatagtagcgctaatactgtacggccccggggagtaaggaactcgaagtaacagactggtattgccgtaagggaactgcggagagttcagttactaaaaccactttcgcactttcggtttgtcccttttccaccatatcagtccagtccttcactctttcggatctggtgctttcgctgttcgtattcttcgactatttacgactccctcgtggcgaatcacgactcctcacctacctccggttacattgtctcagattgggatcttagtggagaaatacaggggatttcgttttttttaccgtgacgaagtgaatgcctttatcgattatctgtgacagctggccccgtcggacagcgagtgtgaatattcaatagtgagaaatcagaacacccccagtttgagcctgatatgcatgggggttcgggagccatgtcgcctgtctctgttgatggtagcgaatggtcgggactaaatcagtatggaaagtcggacgggccattctcaccatcatcgcgagccaacctagccacacctccgacctccggcgtcccgagcgtaccgctaagtcccagtgggccacctccttcgatatcaccctccatccgaagcggtaacccatccccgcccagctcagtcgccgcaagatccagttccgggacactaggagacggcccgcgcgatggaagacgctatcgtcagatggaggagatcctgggccagcactacgtggtcctgaaaagattcctgaatggcacagcccgcgacgaccgtggcaagtcgaataaagcccgagataaactgctgcggctatcgccaacccagttccatgaactttccaccgatgtttacgacgaattgatccggcgacagcaggcctcgccgcctcctggacggccacctcgtacggacgtgcctccttatctccccgctcgaagcgacttccacgaaaagcgcaaccatgcccgccaaaagcttgctgcgctccaccacgtgcgcttccgagatttggcgaccgatgtcttctgtgagctggagcgccgcttcccgcatttcaccagccgagattaccgcgcccgaccgcctcccaatatgggccctggtagcgctcgcacctcgcaacagtctgctcggggtcctcccccgcatatgggccgcgggtacccgtctggtggtcccccaggcagtccgtttcctccgcgtgctggctctcttgggggcccaccgagtataaatggcgatggaccgtttcctcggtctttccagagcaatactatggtcccgaataagagcacgatggtcgaggatagcgatgatatggggccagatgatgaggatgatgctcggagtgatgcgttcgctctagatgctctgagccgacggggtactacaacgaccttgggtgagagtgagcggagattgttattagaaagccagacacaagtatcggttctccaagataagatcgaaaagttggaagaattagtccgcgccaaggatgaagagttggcccagtcatcacaagatgcagattcttccgggatcagtcataacgaacgccaggagtgggacgagttacgacatgatcttgagagtaaggtatcaaaagccgaggatctcaacagctcgcttcagctagagcttgagcgggttagaaccgagcacgagactgtggaacgagatcttcgcagtcagcttaatgactcttcccggggtgtcgatgatgcgggtctacaagcgcgctatgttgatctagagactcagcaccagaacttgcaggcagagttgcagcagcagaaacaggtgaccgacgaggtccgccgcgaggcagcggctttcctgacggaaatgaagactctttcagccgagagtcagtctaattgggagcgcgaagaacagctctcgcatgaggtgcacagactcgaggcagatgccaacgaatggaagcatcgttatgccaaggtcaaggcgcagctgcggcatcttcgcacgtcctctggtggtttcgccgactcgcggcccgacgcaagtcttgtcgccaaagagcatgagttggtgcaagccgacgggttggtcaaagatatccatgttactaagttccaggtatctgtggacgagctcctgcgagttgcgcgtttcgaggaatcgcatgtggtgctccaacacattaagatggtcattgtaacagttcgccatattctgcaggacgtggagtattcctcgatcccggtggatgggtcggctgctctgcgcgcaaaggtcaagggccaggtgtctacgacagcaaacaacatgatcaccgctacccgcaacttcgctagctctggtggtttatccccggtgtcgctccttgatgcagcggcctcacatctttgcaccgctattgttgacctgatacgggtggtgaagatccaggcatcgcctatagatgagctggaagatgaagattatgaggtggatgtacctcaagaccaattccccgactattttggtacatctggcagccaaaagcggatgagcaataactccgtctacagtgctattagtcgtccagatgactctcagtaccctgcgcagaatggcgcgactaatgacctcaatcatggctgggggcatgtgcaagaagatcatgaggtgttggaacttaaggtgggtcgaccggagaaagataataccgctcaacgaatgatttactgacggatgatcctagctctatgtcgaggaccagaccgatggcatggtccaacaaatccaggctttggtggccagtatccgagccgaggacaacctgcaaactgttcagacgcacgtatctgccatttcgaacgttgttgcgaatgtggtatccgctacagagcagttgatgcgcgaacgcagcggagacatcactttgcggcagacatctgaaccagtcatcgcggcattggaccagtgtcgcggccggttggcggccactgccggtgagggccaagacgccaccaccccggagcaattgcatgagctcacgaacaaactgcctcccattgcatttgagatcgctcggcagatcaaagacctcgttcagcggcttgaggctacatcggtggctactggcgaggaagatgacttccggtaaatgagcttaaccgaagtattgtttttcatcaggtgaactcggagctactcattttgtctttctttcccctcaaattcttctttatattccttcctctttgccccttgcttttcagcgactatttatctatggcaacgagcggacaatgtcgaaacgatgtcccgacatgtgtggcatttatgggctttcctgcccctttgtcatttctcctatattttcctattctttgtactttattttagcccttttgtattgatcatctaggtttttcggcctgatttcatgttgattcgtgcctctttattttatctcacgaccgcttgctggtgtcgggctatcatttctttgcatttggatgcatacaaaatgaaagtaccctgtacatcttcaacataatgactataccaataaatcaatgcaagtttccccctcgaaagatgcatgtcttcttgtagccaagattgctagttcggaagggatatcccggaagacattacataatctcggagctctagacgccttttggcgttgagcttcgtttttttccttctttctacttctttaattcgcattcctcatcatctatatcctttgtaagtgcgattggtcccttttcatctgaaggatagagaaaatatccactttgcttcagactctttcggagacatcattaggcaacagaggcagtgatgttttcccccttggaagtctggagaagctccaaagtggagcctcaggcagaaactgcacaagtggtctttaagtcaaccccagcaagctaaccccaaagtagcccggcacccgagttcacccgctccgccctgcccctcaccatgttctgccgactgaggtcaataaccccaccttcttccctcttctcttcttccctcttcaattgcacttctttccaccccgctgcccgatctttcgcttcatcaaccgccgctatgtccacccccaacactaccgctttcttcgaggtccagtacgcccctgctggctcctctacccgtaagttttcctgttattctcgtttccggcggggcagggagtttttgcctccgcgctccagcctcaccttgctgtctccaaccttcagctttcaatgctagcatcaaagcttggaggtttcacatcatgtctcagtaattggaattgaaattgatgctaactcctcattagccaagattggccgcatcaacttcaagctctaccccgacgaggtccctaagactgccaagaacttcgctgagctttgcaacgccaagcagggtgagggctacaagggctcttccttccaccgtgtcatcccccagttcatgctccagggtggtgacttcacccgtggcaacgtaagttttctaatcctgacaaccgcctaatgctcggtatctgattttgattttaccggaatagggtaccggtggccgctccatctacggcgagaagttccccgatgagaacttcgtccacaagcacacccgccctggtcttctgtccatggccaacgctggccccaacacgtaagtctcagtcttgtatcccggctggtctacatccagagaaccatactgaccgtttccctcttttctagaaacggctcccagttcttcatcaccaccgttgccacctcgtggctcgatggcaagcacgtcgtcttcggcgaggtcgctgataatgagtccctgaaggttgtcaaggagatcgaggccctcggctcctcctccggctccatccgctccgctgtcaagcccaccatcgtcaactgcggtggcaactaaaaagctcattctggagatttagttgggtgttgggaggatgaacgtctttcttttcgtcatggacttgcttctttcccaacgctctagtgcggcgtgggactagcataggtggctttcccttttgcgccttgtaatctaaagtttctaccaagctagctcatacattcctatctgtcgtggggacttaatgttcaatttgaggattagtagttttgtaagagcgacttttctagatattacctttgagccaagctcctaaaacctgcatgtcaacctaaacatatttcgagtcaatccacggcaaagcacgaaatcatccaggtgctcctattgccattccttcccaggtcttctcccagcaaagaaccccacgtatggtgtggtggttcgatcactcggcggggtctgcggctaactacatcaccttaccccgcgtgcggcaggttttttttttttagcggaaaacgtttccaccgcctccaatagataacctagtaccttggtagtcagatgatattagtaatgggtgatgcatactctactgtaagtctgtttcatttattgtgagagggcaattgagtagagagtaatcgagatagaagagatggttcatacgtcatggcattacaggtgagaacaaaagacaagaacagaaacaaggaggaataattgtggacacaagcaagtgcatattaccctctgccatttcgagacagagaaaacaaataccggggatatcagacgcatccagagatgctggtgtagaatcaaatcgtaattggaacgcaagtcaagacaacacaccatgcccaggcatttaaccacagcacttagtgacagacgtagcatctgacctgaagaagaaagaagccatgttagccctggtgaaagtatagtagttgaacgaaacaacttactccttattcaagtccaccggctcccaggagaagatgaacgcgcccaggaaggcaccaatgaagatacagatgatgatatacccattgaagtacatagcgagcagcatgatgatgtacgcaacagcaaactgcgtcatatgcagcagcgagcgcagagaatgctcaacaagcgacggacgatacggggcaagcaaagcatcctgtctctggccgccgacatcccgaatgcaattagccggcgcagcagcagagacagaagccttatttttcgacactccgttctggggagcatccgacacaggagtgatgatgtcgtcgtctgcggaggacctagcgtcgatctctgcgttgccgccgcagcagttgccgggcggcttggtggtgtctgtgtcttcttcgctgcgcagggggacgttggagatggattgcgcggtagaagagtccgacatgtagagtcttcgaaggcgggctcgacgcactatgaaggagtcgtattctcggcctagacggcggaggaactcaaggctcaatacgaggcagatcactccaatacaggagccggcgaacatgccgcgcgtcctgatgtgccatgttttggcgaggaagcctaggttggtttagttggctttatagccttgtgcagagggattatagctggggctgcgtacatgagtcgattgtataccagttccaaagcatctgatcatgactgtgagtaagcttgaatccatacaaggtagtgaatgtgcgattgatattagacggaccgatattttgcaactatgtcccacgtccgctttggtggcactggccatcgctgccgaggctgtggcagtggccgttgacatggtcatcccgcccatatccatgattgattgttgattggggaccttaggagcactggatcgagatagtatcgtgttgattgaaactgaagggaagcagtacaaaataaatgcaggagtagaatagaagagagaataggagatagatagaagaggggagcacttcaccgtcactctgccctaatgggagcaatatgagcaggtttatagatttggccctaaaaacttagcggcgaggtggtttgagcaaattctcggatttgggctgtaactggtaacattaaacgtaagacagagggtatcaacttgaactattctcccgtttgaatctcctttttgattttgtttgttttttgatttttcttttttttttgcgtcacccccgagatcctttgatgacaccttccaacaactcgcggatctgactgcacccatcgatcccgaccgccaacattgtctcaaggtacgtagcatgcaccttagactccatagtaagcacacacaccttcattgcctcttcatcgtcatccatattgttctcgccaacgggcaccgctgtcgtcgtcgcaacagtgagcgaaggcagttcctgttcttctggaagagataggtccagcagtgggtcaagctcgtcgtgtcgcgggtcacgcggtgtagaggcgctaccactcattcctgcagtacagccacagagtagtcctggcatagggattccggcgtccacgagcgctagggtacaggcattgatcgccgcggcgagcagtgatccatcggcagatagaacggagatatgaatgctgattgtgctgtggggatagaggtaggtgtggaggtgagactggaaggttgagcggatgattgtaccgattcgcgttgattgtctgtagtccccaggagattagcattggttgtatctagtctggtgctactgtgactatttccctatagcaggaaggtgcaatggggaagcgtaagagggtgcatacctatcacttccaccggctctccgcttgcgatctacgccggcaaacccagcgacgttgacatccacctccacaactgcatggccacttcctgcagcaccactatctcctcggcgaccctcggcagggccgtggacagagcacatgattgatgtgttgcccatggacaagtatgaggagcccgagctggcggggttggttgagatctgagcttggagcaggcggagttcattccagcgacggccatcaagacgaagccgcgtcagagggtatgtcgtcgaggtgtctagcggcatctttgcggctttctgataagaacgagagttgtcttgagcgaaaagagggtacgtcaagcgggaagtcaagctttattttgtgttttctgtgggcttaggtcagtagggcgttcctttatcgagcaatgacagacgtagaatattgtcttcgacttacgttgactttgtcgcatatgcaaagaatcgaatgccaaaccaatgagagcatctttttctctggttctcttgcacgtgaccatgtcgaccaactctataaatccagaaagaaccatttcaaccacttctttgagcatttaggagatatcaacagagacccaattctttttgagatagaataaaaagcagtttaccacgctctatattgaaggatactcaattgaagctttcttgggcgaacagtttcaaattcactacgtggccgttatcgcgtgccgtacttgacgctttgtcgcgacagtctggtactcccttcggcctacgctctgtcactatttgagtcgtattttcagaaatgcagagaacatggctaataacgaggatactgacgaggccatcatcattgattcagatgatgacgacttggaggtgacgcactatgcaactccgaccgctaggggtatgacacctcttcgacgcgtttgacagacagctcacattctctcaagacagattttccggtctgaaacacggggctgctacaccggttaaacctgaatcgtcgcgcactcatctttccgagtcatcaagtgctgtaaagatccagcccgtggacagcgatgaggataataccaacgatggcgagctagcgtacaagaagttcaaggaacgcaaatccctcaagcgcaaacaagatgctgcagcaactcgcaaagccaaggcgcccaggagagatgcaatcgttggtcgaataaaacaagagcggccaacgcctcggccaaagcggccgttgaaacaatggggcgaggtatcgtcagatgatgacctaatggagaatacattacctggatacctcaaaagccgccgcagccagttcgaccagaagctcgaacatctgaaagatcatggactgaagctaccacccacctatgaggatgtggacttctcagatgatgaacggcttgaagaactgcaagaacgacctgtctttccggataatacccgaaagcaggagtacaaggacatccaacttccctattcgatgggtattatacccgccccgatcgcccagtggttgcggcagtatcaagtggaaggagttgcctttcttcacgagctgtttgtataccaaaagggtggcgtcttaggagacgacatgggtcttggaaaaaccattcaggtcattgctttcttaaccgctgcctatggaaaaacaggagacgaacgggacgcaaagcgcatgcgaaagatacgcagatcggacgacagcgcttggtatccacgtacactcatcgtgtgcccgggaagccttatcgccaactggaaggctgagtttgcgtgctgggggtggtggcatgttgaaagctaccacggggataacaaggaccttgctctcgatgcggcgaagtcagggagggtggaagtcctgattacaacatataccacttatatgaacaacaaaaacgccgtcaatatgattgaatgggactgcgtcatcgcagatgagtgccacaagattaaggagcgcaagtcggggaccacacagtctatgaacgagatcaatgcgttatgtcggataggcctcaccggcacggctatccagaacaaatatgaagaattatggacccttctcaactggactaaccctggtgttctgggcccggtaagcacctggaaggcacaaatatcggagccactgaagatcggacaatcgcacgacgccactctgagcgagctcagccgagcacgaagaacagccaagaagctggttgagaatttacttccacaatttttcatcaggaggatgaagtccttgatcgcggatcagctgcccaaaaaggtcgatcgggttgtcttctgtcctctgactgagacacaagccgaggcctacgagaatttccttgacagtgacattgtcgattatatcaagacatctacagaaccatgcgattgtaggtcaggcaagaaggccggctggtgttgtcgccgctttatccccgatagggaccctccaacctggcaatcctatgtgttccctgctattaatgtgcttcaaaagctcagtaatcatctggcaattctaatcccacaaggagcagacccgaaggagaagcaggaaaaagatagagattatctggaacttgcgctgcctgaacaatgggaagacctttaccgctcgcgcgactcgatcgtcaattacgcgaaccctgagttttgcggcaagtggaaggttctacggaagttacttaagtggtggcattcgaatggggacaaagtcctcatcttctcgcatagcgtgcgtcttctcaagatgttgcaaatgttgtttcatcacactagctacaacgtcagctacctggatggatctatgagtttacctgaccgttcaaaggctgtagacgagttcaatgccgactcgcgacagtttgttttcctaatatcaaccaaggccggtggtgttgggttgaacatcacctcggcaaacaaggtggtagtcgttgatccaaactggaacccatcctacgacttgcaggcccaggatcgggcctaccgcataggacaacttcgcgatgtggaagtcttccggctcatatctgccggtacaattgaagaaatcgtctacgctcgacagatctacaagcagcaacaggcaaacattggatacaatgcaagctccgagcgtcggtacttcaaaggcgtccaagagaagaaagaccaaaagggtgaaatatttggactgaagaatttcttcggatatcagaacacaaacatcgttctgcgcgatatcgtcaacagaacaaatgtcgccgaaagccgtgcgggggtacaggtcgtggacatagacctcaaagctgaagaagaaggccacgactacaccgaccgaccaatgaaatccgaagacgaagcaatgagccaaatcgcggcgatgatctgcggcgaggacgaagaaaaagaccacaagcctcccgccggtcttccaatggcaacaccgcataagcacgaccccgttcaagcgattctggcaagcgcaggcgtggaatatacccatctcaataacgaagtgatcggttcctcgcgtgttgaggaagatctcagtcgtcgtgcggaacttgctccaaatgacacgacaggtgaccgtcaggtcttcatgtcctcgcagccttactctcagccaacggagcaacctgtgcgattcaagtatcatcctccgggggatgtcatacgtcgccagttttgtagtatggcgcggcggtttgggtacgctgatgctacggagtttgcgctcgttgttgagggcatgacccaggcgcagcggcgagcttgtctcgatcagtggtatcgagagagaagagagaaactactttctgcggatcaaaacactaaggaggagatcaaggacgaaaatgtttctaaggaggatatggatgaggatgaatggatcaaagatgacaagggtcccaaggaggatagtccgagtctttgagtggttttgctttcgttgttgttccttcttgcgcgatacccctttctggttgtataactagttgtataacatgcatgaaataatacgatactggaccacactcgctatatggaacctgtaaatcgttggtattaaaccattctcttagtatggctgtaggtaaatagatacccatgcaagatcacaacataggcggggaatcaaagccaagccaaagtccacaatgccggtaaattgggatatcgttcttgccaatccgccaatatctcagggaccttctcgtcaaagctctggcgggcagggccagtcccgtttgcccagccctcagagccatgaacaagatgctcagcaacagcagcctcattcagatgattggccagatcaagaatcgcctttccaccagtcaaggcctcctcgtggttatccttgatatcgacattgaagacatgaacggggtaattgagcgtgttgcccttattcatcaaatcgtcgacaacagcatcccaacagcgctcttcacaggtgatgatgacatcgacgactccaccctccgttccgatcgcacccttgtcgcccttggagaggttgtcgatgcgcgggacgccagggacccagtcctggaaccgctcgggcccccacttcagctggcggttgcggtcgagcatgttcaggatgccgttgccgcggtacagacgctcgtctttgctgcacaactcttcgtacatctggttgtaggaggtcgtgttgaagctgtacacgtttggttgggtgattgatgggccggggagacggacgagggagcctgtgccaaaggatatcacggggaaggctgttggggcaccggagagctggaggtgggcttccattgagcggttgttgtttgaggcgcagactgtgcagaacttgagcttgtacgagtctgtggctgcaccagccgggttggctgtttctagggcttgggctgctgaggccatgtcggtttgtgtggatgtctctggtggtggagggggaggaggaggttggggagttgaagtccccgagtttgttcggcggggatcatatgccattttgatggaagactatggagatgataatagagagagagagactaaggggttgttgtttctagagggattttggaagtcgatgatcatgggggttttttgagattacaatattctgttgactatcagacgcgttagcagctgatttgagattgtttttttgtgacatgaaatgtgataacacaagttcagaaaaaaagcgtatatgaatttatccgcatagcaaaagctcagacagctccaataatatattcatcaggttgagggaaggagaaggtgacacagcacacataccttgtagttatcactcattatccagttcaaatgattatggggccgtagccctgggagaggagagaagagcaattttggtgaaggttgaaaagcttcgttttgttagtgccctggattagtcatgtagttaccgcctgttattccgcctggatagaagagctaacggggtaatattctgccggacaaatatcattgaggtatcttgaatctgttgtaaacatcgtccttttacagatatctctatcttataaggcctctgtcacacttttcacttttgtttactcttagggtatccatcaatatttaacttctcaaagcttttgaattcctctatattcctgtccataacctctatcaacagatctctaccccacatctatcaaaaaggagactcaaatggcagcaaatagtactatcaaaccagccctgattgtggtggacatgcaagaggatttctgccctccagtgagttggataagtacactactaggtcacacatactaatcaacagtagcatgggtcactcgccgtgacaggaggccgcagcattgcctcgataatcaacactctacttgcaaagccgggatttgtcgtgcgcatcatgaccaaagactaccatccaaaggaccatatctcatttgccagtaatcacccagggcctgacaatcagcccttttcttcattcgtcacaatgaagaatcccgctcgaggaaaggaatcagaaacaaaaccacagcaactctggccagttcactgcgtggctggtacccccggcgcagaaattatcccagagattgacacctctagcgaacatctagttgttcgcaaaggcatgcgcccggaagtcgagatgtactctgtgtttgctgatgctttcggaaactgtgaccatggaaccaacgcacattcggtcagtctagatgttaccgcggctctcagggctcaaggcgttacagatgtatttgttgtgggcttggctggggattattgtgtcaaggctacagctcttgatgctgcgaaggttggattcaaaagctgggttgtcgaggagggaacaagatgtgtcgtgcctcctgcttgggattctgttaaggaagaacttgagactgcgggggtgtctattatctctatggacgaccctatcatcaaggagctaggagggaagagttgatatgtcttatttctcatcttgcttttaccacgcagttttcccttccaagtgtttatttttccgtgtcttgtgtctaatatggattcaagttctatgctaccggccttagatatctattgtgtagatattatgaaggtgctatagatagatactgtattttcacgtgaatgtgttactttaccctgtgtggcggtattctcaattcttgatttccacagtctgtggttaaattgaagaccacaaaccaccgatatgtatacttgaaacaattccaatgtccgtaatcagtcagtacaataagatcgccggtgggtacatgatcgacaagcaactgccagaaacgtcttgacttcataccccctttccgcactactgcagagtgacgtcgtgtcaaggggggattcaccactcagcatacaacatagaatatcatatttcactacaggccgaactagatcagttcaaaactcaatctgcgcgcaatgctgcactccaggcggccatcaatgcccgccccaatcggtaccctcgacgagaaatcgaccgacaccgatgaggcagccctacacttccacgatcacagccaggcctctggaagtctcccatattggctcgtcaatttacctcggtcgcaatggactgccgagtgtcctagttttctacgtgaccaatctccgaagaatatcaaatgcctctcaatccctgattgccggtatacccgacaggactgggaggaagtgaaggagatcataggtacagctgctggttgggtgattagtgatatacttaactaactacaacttgcataggaaccaaccggatcgaccggttccagcgggtcccaagcgagctgcgcaagtatctggaatacatggcgcatatcaaagcggagtatacatccgtgatgagatttgtggtcaaggaaaggctgggctggggggataattgggaagagatcaagcctagaggtggccctttcgaatacgagggtatggcgcaggtcaccgggtctagaacgcgtgaaatactaattgtctgtatagaggatatccgaatcatatacaatgactggccatatggtgttgccaaggatatcatccacttggtagtgtggaccaagttcgagctggaagatgacccaaccacagatgacctaatggcaagcacacgagcggccatagagagctatgtgcaggacacattttgctctcgggtaccacccgaacaggtatgggggcttagtcggcatgaagatgatgaaaggctgacaacataggtggtctggttcaagaactggaagtcactcaagtcggtccccgggattgaacacttccacgtcatgctccatcgtcccgatatggcatttgtcagggagatcacccgcggagatgtacctctgattgaacggctatgatgtctgtgtctgtgggttagagaagagagagaagagagggaggatagagggaagagggagagaaaagaaagattctcctttccttgggtataacttaggtaccaagcataagatacatatgcagcccaaggaacgggtacatcctgtagtccccgccaagccagatgcccctcactgacgatcttggggaatgagatgtaaaggagtgtattcatcttgaaggagaggtcagagaaatacgtcactagccctgagcatttgcatgtgtaatttgcatttcgcatatctttttggatatcttgttgtgtaatttttagtgtcgttcttagtgtctttttcaattttttccctttgaactacgcaaatccgtttttttgccctttttccacttctccatagtaaaaaaagcccgttcccgaaatttccgccccaagtcagctgtcttgggtttcagacgttctctttttgtgttttggttttctggttcttctttatattttcataaatgtttgaaagcttaaagggcttttcgtataattcacttccgaacgcagccatgcctgtcccgcatctccgccgtacctcccaggccagtgagtttgacccttcttatccctttgtcatacatccaatacattcaaagcatttcaacatggcaatcaacatggcaactaacgccaatctaggcagatcatctatggaagattctccggcaagtggggaggatgaggtggttgagccagagcagggaaatggtgcgtccaaaccctcgataccccccagacacacaactgacttgatatgcctgggcagttctttcacatatcatttctcagctacggcctggcgccgacctgagtcgggtcgtcttgccgacattcatcctcgagcctcggtctatgctagagcggatcaccaagtgcgttcacacccctccaagcagggagcttggagctacctaatatttagatatatcgattaacacaacggtcttactagcttcatggcgcaccctgaaacgctcctcccgatgtcagagatcgaggacccggtcgagcgctttgtctccgtggtcaaattttacctgagtggatggcacatcaaaccacagtatgtcgcccgctagctgtctgtctaggaacacatactaatacccacatagaggagtgaagaagccgctcaatcccattcttggagagacttttacctgctactgggactatcccgacggaacccgcgcctactacatctccgaacagacctcccaccacccgccaaagtcgagctatttcttcgcagcgccggaccataagattcgcattgatggaacactcaagccccgcagcaagtttttgggcaactccgcggccagtattatggaaggtattgccattctgcgcctgatgagccacggggataaagaaaagggtgaacgatagtatgttgcgccgctttctacggactttcaggcactaaccaaaaccagtattctaacccaacccaatatgtatgcgcgcggcattctattcggaaaaatgaagtatgagcttggcgatcacagctacgtgcgttgtcccgagaaccacctcgtggccgatatcgagttcaagaccaagggatatttctccggcacttataacgcaattgggggaactatcaagaatgaaaagaccggggaggtgttatatgaactctccggattgtggaatggggagatgtatctgaaagatgtccatgtacgctccgccttccgaggtttcttcccgattcaacgctgacccagaacagacccacaaacaagacgttttgttcgacgcgaggcacgcgaagcattcgcctccgttggtccgccccatagaccagcaaggagaccgggaatcgcagcggctatggcacaatacggttgaagcgattgtggcccggaaccatatacttgcaacgaacgaaaaaaccaagatcgaagaccgccaacgagacgagactgcgaagcgcgccgacgagggaatcgactggcaccctcgccttttccgtgccgtccaaggcggccctggtggcccggatgaaggcgaagaagacctcgactggataatcaatgctcaaatgtaagcacgaatgctccagcggttaacacaataactgacagtcccagcgacatgcaaaatccccaggtcgccaccgagcagatactatccatcgttcccatcgtccaaggtcagaaggagtcatcccaatttcaaataccgccgcatcatccccaccctatcgctcccgcgaactaggatatcaggcatatccctccacaaccagctaatgccgcacccgcagactccgagacgaaaacaactgtccaccagagcatcgtggaacggaaagatagtcaaacatcagaagaggagcagtttgtagacgcccaggaaacctcctaagtcaacccccaaagccccattgcgtccgactcccaacccccgggcccccaatccatgctatcaccgacccaatccaactcggtcggttgcgaaggtcgcctttttttctcactctcacatctgaatgatcccggagtattgtcacactccctctcttcctctcttcctatcttcctctcattctgccatgacgtagtcaacctgcgcagaaatccccagcacaaccacaactcgaggcgacggcacgacccattgtgatagccctctctgcccctctgatgtttcaacacagcgtttttctcggtcatcatgccgctcctattgctggatacccgatctgattttatttaaaaattcaaaaattttcaaaattatatctcaactgaacctgggcacatacatctctaagggatatggaagagatacgtagcaaggttttaatgcagcgttaaggagacataaaacaatagaacaaacaagagtcacgggaatctgaaaggattttatacacttaggacctggaatcttcaatctctgataaatctccccatttgctcaagtccgtagtattgactgatcgattaaatttgcgtcttctctgtccgttactatacaaagctctcctagaagagagggatatcacaatagatggcaaccacccatgccaatattaccatacaaagacaaccgaaactcccctccgttatccgaatacatacaaaacgccgcgtcaaaccattcttttgtcctaggaggacttgccgtcataaagccgcactgggaaagctcatgaatacagttcccccctggatccagctccacgctccagatcccgccgccgattaggccgcgggatagcaccagcagagccagtataagccaagccagaaccagccgccgccgccgatgcagcagacatcgacccaccgccctcatattcctccatctcctcctcaacccgaagcgtctcctcctcaatctccttctcggtatcctcacgcaaacccaatatgtccggggggataaagctcatctggacactaggcgcgcccttgatatacctcagctgctcatggacggcctcaacaaggccctccaggtacgcgcgaggattcttattatcaagctttcgcatctccgacaggggcgggaagagtgagaaatcagggccgaagtggttacggaaggcgacagattccgggatcacggggtcgatcatgttttctgcctcgagcaaaatcgaggtctcgtgcgcccacgcacgcgagacgttgcgcggggtgtagccaccgccgccaacgaccatcatgggcagcttgaaggtcttggcgtatgcgacacaggcgccgtgcgcgcgcacgttcaggttgaagcagcctagtcggtcgcagcccagactgtcggcgccgcattgtaggacgattgcgcctggttggtaggttttcatacatgcaccgattacctctttgaatagtgctatgtaggactcgtcatcgatgccgtcgttgagcgggacgttgatggcgtggtgggcgcctgggttgagtgggtgtgcggggcctgtgtcttcgcgtgcaccggtgcccgggaagaagttgtctttgtcgtatttgtgaaaggagactgtgagcacgcggtcggttgaccagaaggcctgctcaacgccgtcaccatggtgtacgtcgatgtcgatgtacatgacgcgcgggtggtggcggaggagctggagtgtgccgaggacaatatcgttgacgtagcagaagccgctggcttcggcctttttggcgtggtggaggccaccggaccagttgattgcaatgtcggattgattgttgcagagcttgcgcgcggcgtcgacagtgccgccggcgtatagcgagctgtagctgtacagtccgtcgaagatggggcagtcgtcgccgaaattgaagcgcaccacgttatctgcctgatcggggttgtccatgtcgccgggaatgatctgttggaggaagtcgaggtagtctctctcgtggaagtcggccatttcctcgtaggtcgctgcgcgcgcaagatacagatccatggcgtggtgcatgccgtatgccatgacgagctgtttagtaagtgtgaggcgccatggcttcattggatgtgactggccgaagtggtaaggctcgacggctggattggcatgccatgatacccggtaaccttgtggacgagctatttgtaggttttgaagctcggcgagggacttgtagtcgacggtgagggtcggggcgggcggtgcatattcttgaacgacggaggagcgagccatcgagggagtatttgggaaacgacagaggatcaaaggattggcgctaagttcattttagatgggccaaatggaattcgagatgaaaccgcaggaagttcatgactaagcgaatctgcggggtggccaaagatcgccatgtttagtctatgaaaggaaggaacagacaaacaggaaggagcaaagcacctaggcagttttcaattgaaacggaagatagaagagcttctcaattgacatcaattgcctacatcacaactataaattatactttgcctatagtgaaaactattctgtactgtcccggtagtgccccgcttgaattgctggagctcattgtagccctaggtctgcgtattcaacgttgctccgtttgagttcctcctgtgatgattgtggcattaggagatatcaggcgatccttggtatattccaaggttaattcacaataccgcaacaatcgatatctggtaatcacaactacaccgacgatcttcgctgaatcaataagtctacataggtatctaagctacccttgtgtttaggatgttgatgtaaaggatatggcacttcggggcgatatcggccgcgtggctctagataagtggagagtgcacatcatccagggattgtaattgcccgaaagaactcactggtggagaagtgatggtccaaggctggtatcacatgtcctaccgccggagagaaagctatttgcacggctcgttcctgaggtgaacatatatcagccccgagtcttcacttagacaataactatacggatatcggattagccggcaagccactacatcactactggttctgtttcttagtatacgacaacaatcatggctcttccatcggcagcaaccagcctgcggcgatcactgcaagatccccaagtattcatcacagccccaggagtatatgacggaatgtccgcacgactagcactggcagcaggcttcgacgcactatacatggtatgcaatgcaagatgaccaaggcatcctcatccaagccccgagctgacaccaaccagacaggtgccggaacagcagcctcagtacatggccaagcagacctcggaatctgcacgctgaacgacatgcgggcgaacgcggagatgctcgccaatctctcaccgcgaacaccgctgatcgccgacgccgacaccggctacggcgggccgatcatggtagcccgcacgacagaacaatacgcacggtccggcgtggcggccttccatatcgaagaccaggtacagacgaagcggtgcgggcacctctccggcaagcagatcgtcgacacgaagacctatatcagtcgcatccgggcggctgtgcaagcgcgcgagcgcataggtagcgatatcgtgatcattgcgcggacggactcgctgcagcagcacggctatgaagagagcttggcgcggctgcgggcggcgagggatgcgggcgcggacgtcgggttcttagagggcatctcttcgcgggaaatggctcgtcaggttgtagctgacctggcgccgtggcctttgctgttgaatatggtggaacatgggtccacgccttcgatttctgccaaggaggccaaggagattggtttccgtattatcatcttcccgcttgcgactttgggcccggctcttgtggctatgcgggaggcactggagaaattgaagagtgatggcttgcctggtctcgacaaggagttgactcctcagatgttattcagggtatgcgggctggatgatagcctcgagttggatgcggccgctggtggtgtggcgtttgagggtggcgtggatatcggagatgaatgaacggaagaccaccgcctaccagacccggtaccggagtgagatattgtgcacattgaacattggcaacttccccttaagagtatcggcctggacttatgtagtaccgtctccaccagtcgtatgactctattttcgcattcagccacattcattagtaggaagtagctgattctttgaagcgtttctcgaattatcatctaattaaatctactaaattttatatgtggctttcttttgtggttagggtaatttgacaggtagatttaatttcctataaccaataggacaaattgcagatcgaccgaaccgaggatcctcccgggtcgaccttggttttgtttatttaccccgagatttctacttcgtacggtttcctacaacaaggattttaagagtgaggaaatttagagtccaagtgtgtacatatgtattcaagggtcgtgggtacctgcattaagtgaggagtctgccagggactggctcctgcacgaattagccctaatgtttcaggaaacgcctgtggcaacaaaatgcccttggtgtaccgtaaatacggactcaaaaatacacgatataggtacgatgcactacttcctccgtacacctatggagccgtggcaagccaagcgcgcttaaagtttcaatgagtctaaacagatgaaaccgcttcacggccagccccagtttgccgagttggaaggtctggatccccgaggggccagtttctgcgtgccattatggagacaatcaggagactcgtcatgtgggtggggaagggctaagacgctaccggtgaatatatgaaatatgttgtaagtgtgtgccttacagaaaatatccatcggccgtgtagggggtctggccgcagatcaacggcagagattgacttttttatgcgcatatcattgggtccgatgggcagggcgaggacaatcctcattaattgcaacaagaattgtaatggaagaactaaggagtagataggcatgggttgggtagggacatagatgttagttgcccattgtccacgtatttgtacacgatgcggtgatgagttgtctccattaagattgccttgagattcgtaacacagtttagatccttgctgtgcccttcgccgattggtttatgtggagatttccggacgacggggatattaaagtacatgcgtaagtttttatgtacacgtatgttatacagaaaccttggtcatattgcttatagaagtatcaatgttgggctctggtgcagtgtatcgagatgactatccagcattccgatcacgcacgtgtttggcattaggcaactatacaacatagaacactatcaatcccaataataggacgcataataatagaacatacggggtacggagtactccgtatgcgaattatatagaaataataatacaacatactgaataggagaaatccccctatcccaagtcacgaatacctgcacagccgcgatgagaggcatagtatagagaagtacccagtaccaaggaaacagagtctgggccctgggcagcccaccaatcaaatcacccaaaacaacgcacggccaggaaccgccaggaaccagccaataataaatggcgtacccctgatattctggagccttttcgggtttgggttcaggtcccagcctgacccgttattgtgtaacttggtattgtactaatagtctctagtccccctagtccactttgttctcttcttctctcttcactctcacacacattcatttgaattgaattttcttctcgtcgagcgtccttttcgctcaagtcactcattttcaagttattcaattcccaagatgcatttctccaactccatgctgttgatgacggcgctgaccgctgggtcggctgtcgctcgtcttcatggccacgaccgccgtcacgcccaccccagagatgtcaacgtcgcagtccagcccgctgtcactgctgctgccgaggttgccaatgttgataagcgtggcgaggaggtcttcgctaccattgacggcaaactcgtctcctggatcaacaactggttcggcgacgagacctcgactgcctcctcggaggctgctgaggccaccgagtctgtcgctgctgccacttccactgctatttcctccgccgaggccacctcgaccgccagcgccaccgccgttgcctccagctcctccagctccagctcctccagctcttcctccagctcctccagcacctccagctcttctagctctagcaactgggccagctacccctccgatggcgtttactccaccaccggattcggtgcctccactgccagcaagcgcgttggcaccctcgactgggactacatcggcaacgtcggcagcccttggggtagcaacatcatccgtgtcgaggaggacactgccagcgagtacaagcacgttatccgattcgagaacgacaacgacaatgcctggaccgtcaccatgtggaactcgtacggccccaccggcggtctgaacggtttctggagccccaactccgctctgaccttcaccgttgagcccggccacagcaccttcgtcgccatcgatgacaactcccagggtggttggggtgccgccgagggcgaaggtctccctaccaacaccgtcggcgagtacgcctccacctggggtgaattcgacatgagcaacacccagaacgacggttactccggctgggatgtctcctgcatcatcgctgagcttgctgatctcgatattgctggtatgcagatttgcaaccacgagggtgcgaagtgctcctccatctccagcggtgcctccagcgttgtcagtgcctacacagccgccgaccagggcaagaccgacaaggccattgcccagtccgctggccccgtccgtcttgttgtcaacctgggctggtcgtcttaaatcgtccatgctctttttattttttatttttttttcagcacctcccatttctaacaatcttatcttctctaccgagatttcgtctttcttgcgcaaatggttcaacgccgaaggtgtctttgtatctttcccctgattcggtgtgtgcgtgcgcaggtcgcttgccccagcaaccatcctggccacacatccttccaccttcgagcggctcttcgacggctaccttttttttgccgttgacgttctcatacatatctttgtggtcatgattgcctccatcgtctttttctctgtacatataccatctgaagcatctgatttgagagttgatatcatttcctttatcatttcatctagaactggttactatatatactttatttacttaacggccattgggccccgatacctatggatatctaaatataccatccattcactattctgtctgttcatctcgccggatcattagtgtcgaggcctattcgtcagtcataaacctgaaacaaaccttatctatttcaagtctcacctaccttaaagctgatgtgcatgatccttcggcactatctgtatgtcttgcatgaaagctaccccttgttttgcatatcgaccgatgaaacctaaatgccaggcccttccagcttcaatacaacaagttgaatacaagtcaaaatactacgaggacactatttagggctcccatggttgaatgtacgagagatgtgaagtgccgagttagggcttgcgaggaatgccaggataccacattgatatttgacaagaatggatgtttccgaggttttttcgaggcctcgatgattttttccatcgccaaaggaatattgcgttctttggaataaattgagttcgatataaattccagaacaaaggagacgtttcaagtagaggaccaaaacaaagacctgcagttctgatgtgacgaggaaccgtacgaaggccaacacaatacaaaggatagaacgcaatgctatcgtacagtcttagctttcacccaaatgataaaacaaaataccgaccccgtaacatccacagaacaagcgtaaagacttcagcgcttagaacgcgcccaggaagtcagccgccgacccaggatcaagctgtagcacaccggcatcttcatcaagatcctcctcttcctggacacccccagtcgagaaagaaagcaagcccacatgaaccatatacccaacgagagcagccgtccccgcaacagcagtcgcaacagacagcaacatatccttgttactcgaatcggcatacgaagacaggacctgtttctccaccgcgctaaaccccgaatcagcctcaacgacctgcttcaaccgcctgttctggcgcacctcgcgcaagaacggcgtgttatcagccagcgtgttgaggagtgtagacccgacagcggcgacggagatgcgctccggtgcgcgccacggcagggcagctgtccccgtgggctggagagcatatttagcatcgacaggcgcgtcgccgaaacagcgactgcacatgcgctccgtgtacgccgccagcagcggggccttgatgcgcattgcgtcgcgcagccaggggaagactagcttcgggacgagcgccagcgacaggtagcccagcgcgagacagtccagcgaggaggggttgttgttgtcgtcggcggggagcaggcaggtcttggtgcgggcgagcatggcttcgagcggctcgaagaagtcggctgttagggcttccaggcggaactggtttgtttgcgcggtgcggccgaggagcttggagactgtgtcgcggggctgctggatcaggttgctggggatttggtcggatgctacggcggcggagtgctcgcgtttgcgctggtcttctagtgcttgcaggtctagtgaggagaggccgaggtgttccgtgcgggttttggcggcgccgtgcagcttaggtgggaggatccattggtttggccattggaggagagagccgtacgctggggatgtgttggcgtagtagttctggctggttacgtagaggtacaggtcgatgagggattggccgcgagattcgatgaaggaggagaagctgaggggaggggttattgttagtattttgtgcttctcacgccgttgtagaggtgggagttgcgtacgcaacgctatcggccctttgcactttgtctaggttttgatccaggttccatgctccctccgagtattggcggagatagtcgacgatgttctggaaccggctcacccagacggagccattctggagagcggggagctcgcctattggtaaatcatttgttagctgtctgattccggtgatgctttttttttttgttccggtcacgtcactgacctgttggggacacggatggatcgctgctcgcgatcagctcccacgagtctttagggaggacctcggcacagtatgcaattgcagcaaggcatggtgcgtcaattgagggcagcgaaaaggccgggccccatacatgcaattgtagtaccatggtggctttgcgcttggagaagaatggacatccgcgattgatttgggccggcgaatcacgtgtgtttgtcctcggcttgatacatggcttctataactacatgtcgagatacaatgtttattcacatcaatcgagcttggattgtttgtagatgtgatcttcatgaaatcagataaaaatccctcactcttctccaaaatggtccgttctcgtttaaccatagtacgatgtatatatagcacgtaccagggccatgccatcttcaacatccaagtcaaaatagaaataaataaaaacaataaagtgtcacgctaacccccaagcttcttggaagtcattattaaataaaataaaaaacaagatgtggcttgaattacgaactaggcaacgccgttccattctggcataatcattgataattagctcagtatctcgttttggatagattgccaaccttcccggattggaatgccagggattctcggccagggattctcgagacggcaaatcggacatgtatatctttcactgccccaaagcatactccctactcgacccgctactcccgaaggtccgggcatcaatctcactcagccgggtaaaaagtattgacgtcaaactcaacgggcctcagtcgtacgacgcagggcatctagaacattaagagcctcaatattcatattcaccgcctcgtggcacagctgagcaccggcaatagcgcccaacgcatccgtggtgtacttatttcccgcaaggttcctcctgcccaagacaggatccttggccgccgtatacatcacgagattcccattacaagactccatatctccggttatccgactatagtgatatggatacccaggggatgacctcattcggcgcacgtggctatacaagcccaggtgggccacggacttgtcaaccggtgccttggaagggtttcagggttaatttcagaagcacagacgtccccaagggcctgagacacgttgagtcaaaactttaggaatcgttagtttgattaaatatggagattgtcagggcgagcgttacggccggaagcttactttctcctaggtacttcctagattgtaacgcctgaagtgaaacaggaagggaaaaaagtcaatttgatacaaatccatggaaggcgtcgcggataacaacggatataccacaaaagtgtatcgggttgaggggtagaggcgggggcagacacttgggaacactatctgcgagatccattggacacagattgccgggatttcttcaatgacgacgacatgcaactttatcggtcgagtgatgggccaacggtgaaccaggataccagcacgcccacctgtggggatggtctaatgacaatcactgctcgactatggatgattggttgtaattggttagaagaagcagtctgagcatggagcatttgttggtccagctagtactgtactggaactagtaacaatagtgaggccaacctccactttgctatacaactcgtaacaggaaaatgcagggcacgtaccaaacctggaagcgctcggacggggccaagctcgtatcttccttccttctccgctcggccgtttagcgtttaatgatagtattacgagctaaatatacacacgctagggaaggtgtcgatatgtcctagtctggcgaatattggattccgtgtcgagttgaatagtatggtgtgatttgagactagggttgagtcgggtgcaatatggcatatgatacccgatatatatacggattgcacaatatatatgtaaggccatgtggccatgcatcgtactcgatgcggcacatgcgctgtaaaccataatgggaggctcgataaggatcgcgtcagatcaaggctacttcagatcttatgatggaagaagtgcatgggcaatctgcagatctctagattggtctatcgaccagtgagtcatagttgacgtgtatattcgacctcctcgtatctggggtgttgattaatgggtgaagtatgcgtcgattcgactaccgcgacacccgccttcgtgagatccctgctagcttcatgactagtgattgctgcgggatgctgcctgattagtgaaacgggtcaggtgggtgtcacccgcagtttcccatctcgtttatgcacgacatacgtgtggaccatacgcaattaagtaaatgcaacgttctagataaaagacaaattgctctgttgggtatactaagtctatgatacatgtcgattcggattggccagatgcaggaaagaaaggaaagtcagaaaacagaaagggaacaaaaacaggattaaaaaagaattccaggcagtcaagatgaacaggtcacaacggcaggaaaaagaaaagaaaaaaaaagacactgtgaccagcaaccagtgagcgaccgagttgatccgaggtaccaagacaggaggggttggccaattaatgcgcggcggctgaggagctgcaccttctccgcatctgcacgtcacagatggtcaaagatcgaacagctgaaacaaaagccccgcagacgaccggtgatcaacagtgtcgagagttgaagtgggacaaagagcaagaaatagaaaggctattaatgcacgaggggtagcgccggcgctaggtcccatagcgaacgagttaaggttgctgaagagcgagagaaccaagcaaaagagaattaaaaagtgtgtccgaggcccattcgaaacaagtttttcagcgcgcgtagagctgcgatggctcgcgaggcgtcgaagtaaaatgtcaagagatgtgaatggacggtggaagagcgagcgctctctttgtgttgtccgtctcaaaccccaactttaagcaagggcgtcctttgtttgggcggaacgtagtggaaattaggtgttgaaagtccgaatcgaaacaaaggatcgcaggtaagagccgaaactaggtcgaagtcgaggtcgtgagatccatgctgagggtccaggtcgtgggcggatctgggaggaccagaatgcgccagagtcatcatgttcgttgagaaaaggggactgtggactgtttatttcggcagcggaggcaaagggcccttaggaggaggaccggggcatggagggaactgagaggatccgatggaaggcattgtggttggaaggttggaggttggaggttggaggttgaaggttgaaggttgaaggttggaagttgggagttgaagttaggaggttgagagtcgatcgtagttctgacaacagactggaagactgatgggctagtatatgtagcaagatacgatgtgagtagagtagatttggatggagagaagaaggggaagaaaaaaagttaaccggagcaggactcttatagaaatcgtctgcctttcccccaacctttccggccaaccactaattacagactaaattagttcctaaaatccccatcggacatccctgccatgaacaggaggctgagtatccacctgatctgacgtagggaattttattgcgatttacttgctcgaattagcccgggtaacggatgaataatgcaccccaagtggaaatccaatggaaaattcccatttttttctagaagctctccactacttctgtggcttgtgtttcctgtgaaccactagtggaggagagcggaggaaaatgagacacagtaattagacatctatgccgtgctacctgagcaatatccatagtaccaatgcagtccagcatatatgggctcacttatgcagctcccaaatttatattcaggtttcacaacccccctctgcgtatatactcaatcatgaaaccacgcgagatgacaactagtaaagggcaatctcccgtgggcccaccgaggctccatagagacggtttcttgatgcggtgagaacgactttttttctatttttcttttttgaatatgtcatcttattagttgtgcaactgtacagagtactgccgtaattggaatatgataaacggcaaaggtccatgcacattcatcctgtatgactcaataggagagaacagcaagacgttagggcacaacacgtgcatgtttgcagatcccgagagcgaaggagcgttagcgggagagaaaaaaagcaaaggggaaaaaaggaaaatagaaaaagcaaaagaaaaaagaaaaagaaaaagaaaaagagaattttcattctttttagggtcaaacgggatggccgattcgtattgattacactaaaagggtgtgacagccgagttcccaagatgctgggattgtagaataaggataagcctgctcatccggcatcccaaacaacctgatatgacatatcagacacgcgctatttctgccagtttagcctgatacttatacgccatccagatagcaacaaacagggtggtacggtctcaggggccgacgagaaaagacggaaaaaaaaggataaataattccaaaataaataattcccaaaaataaaaataaaataaaataaaaaagcaagaggcaaaagcaaagcaggcttgaaatctcgaatcgaggacccatcctcaaccgtggtttctacccgtgctaccaaacaaataaagccgtgattgagacatgcaagaatagaaaagaactctttggggtaatgcatgtcagtcccttaacccacgggtttcgcatttacttctccgtaagcacttcggctattattacatttcattatatgcttcgtaccccgtacataattccttatcgtttgctcctcccgcttaggccctccggggctctaataacaatatgtaatacagataaaagccgttttgggtcgtttagcgtgtaccatcatctccgacggattacagagccgatcagcctccgcctatagtaggtgtggctgatagtccctaggtatgatcgtcttactgcagaggactgtgcattgcacatcatcatttggaaagcatgcagaatagcgtcgtacatctggagaaggatggatccttgtactccgtatgcaatatatgaccccagtccttatgtttattggctattggtgagcattgcatcgagaggggtttgtccaacttttccttcatcttcttagtggttacattgtgcacatcactgggcctggtgtttcacggtggaagatctacttcacccctggtgtggcgttcatggcgtgattattatgggtagcggttacttacttcgttgaatgtgtgtagtgtggtatgcactgaaggtcgaagtgtatataagtatatagtgtactccggacggactatgcagtactacttacctagaaattccctagcttcggggtgcttacaatcttccccggaaattacctggccctaacatatgtactgcaatggtcacccgttacattccgccatcattccctgtttttggcccttttgaaatcacggcaaatccaggcagagggattatattactgattgtactccgtactccgtacttctggaaatccacgcagatgcactccgccctatatagtaagcccgtgctaatctagaattctcacatgccctatgttgcaaatgcaggtataaaacatataacggtacccgggatttgcaaatgaaacccccgcatatactcaaaggggtaggtaaaaggaattacaaatgctatgataacaattggactccgtacggagtactcggtacgttactccgtagcaacagcataatttgactaggcctaccgcgtccgatgaaatgtacggagtccaaagtggggcaaagtggcaaagatacatctgtaccttggaaagctgtatgcgaccacacgggtgtacctgagctaagggtcggcgaaccaagaaaggggaaagaaaaaagtgggaaaagtggcaaaaaaaaagggcaaaacgcacatgggagaaaactctacccatgaactagcggaccgcagacttcaataaacgagcccaattaggcaaagtcagctccacttggatttccatctcaccgttccgcaccgttggaaataaaagctgtggagttgcgatttgaagtcggagatttatgacgagttcagcttgctactagtaaagagatcggaagttacccctgatcgtgctacgatcggtttgagatatctgatatggcctgtctattggctgttgatttagagccaagggattttaaagaagagatctgaggttgagtacacatacactataaaatatagttcaaccaaaaaaccctttttagccatgtgatttgtattaaattttcggtactgaggcttatgcccccgaacccagcacatcgggaccagaatacatacttccccattaagaaggtgttggttggggtcacgggacaagacggagacgggctgtttcaggtcaaggctgaagctccacttgagaatcttctagcttgccttctggaagttgcggcccgaggttgagagcccatagttaccacatagggttttcatatgtggaatcagaatgtctccgaagtaattggaatatttccatgcccttgtccgtgttctctgccgtgtcacgaatgcgaccgagacatgcaaaacgagaatcattacggagtacagagtaaaaaagtcaatatcacattatgtcttattgcatgcagatcatcgagatgtcactatttgcatgcacccctgtctcgtggttgtcatttccatctcagcggctctgtctgccggcaccgtgcctgaagaagtcatccggggagtctgacagcctgccacttgcgtgacctgtctgatcttcggaaacccacctgcccatcataaaataacattacacagtgcaattcatttcgcggtagtggcaaggtttaggctctcatcagggacacctagtctcgtagatcaaggagttgacagaccgcacgacatgggtccctgaacctatgattcaacaagatgaaacaaaatatctctcccgtttgcaacagggaccgatgaagcacaattttgtgacgtttgcagggagtttgaacatcacatcactcataatcgtattctgtgcttgacagtgcgggcagtgcgggcagtgtcacagggtcatgtgccactgatcatcccaccacggctgcccacagtacgaggttgggaaagcttgacagtaagcaaggtccctgtcagccacactgataattgccaggcccacaaacgctagctatctagcttgatcaatcgtcgtcaaccgacgcctgggcttgggttgaaatccattcttccatcagaggccgattcgactcagatgccgcagcacttggtctggctttgtcgcccttgcgggtgatcaatagacatagcacccatccatggataatgaagctctcataatgcgtgctaaaacggagcttcttttcgtcactgccagtcgtgtcttcaggtggcacctggccttccctggttgtcctccttctcttgctcgaccgacgtccattccctagggcaacttcatccgcagattcgggaatattatgcaattccagatcaggttcactgtcactctcgatcatgatttcgccatctgagttaaccttggcagctgtatcgcccgagacatggtctggtgccacctccatttgtacgtcttgatcttcattatccttcccctggaatgtcttgctgcgcgtgaggagcgaatggcgggtacgggattggcgaaggaagatggccacttcgaagtcatctaggtagtgtaagatacttgattcgttatacagagatagagaggtctataccttctataatgacatccttgactggcttgcccttcttgcgcaagaacaaccgctcattctcttcacgcagcttcggaaggaccgacggtcgaacggcagcgatgacgcgcgggaggacaggatcgcgagagtccaagagccatcgtgaatcgggtgggtattcgagataaatgcgacattccagtactgagtatttgctgatgcggaggtatcgtcgaataggtgccatgttcgaatgtgctgcgcaagggcgcggtcgagttccctatgacctcaagaccattgccaagcgctgttgccgccgacctctgattggcgatcgagacgcgtgcaaggggctgaaaggactcttgcctcaaggggctgtcaaccacgttccttcaaaaccttcgaatcattccagtcttcctatcctattccatacagaatgaaaagatggaacaacgaccacggaacacaggaaagacctcatttcctatacacgtgacttgatcaccgcgaccgcaatcggatactgacccccaaggtcctcaacacgctagtgttaggtaccgggtactttcggatgcaaccaaaattgtgtgggcgctcaagtacctggtaccggtccgatggagtagaaaaatcaatccttgacgtcttcgcactcccaaggtccccatggatcccctccagtgctacttcgtgattaatgtaatcaaaaacccgcaaattctgattcggttttgattctgtctttcctttaaaggaactcgttgatttattatctatacggttaggttccctcagaaaagcaagcctctatttccttctcgatatcttccgttcaatcagtatcaaagtcaggatctcctggtaattgcatgcatggttagtggatcaacgactcatctcgcctaccatcgaggaccttggggattgcagtcaagcctcgcacattctcccctcaactagatcacaaatccttctctcctccattggacaacttgcacaagtcgtgtgtattctgttcacttccattggctcctaaacacatccttctcgtcccacctctacacttccccatacttctcgtatcaccaataaaccgagatggaatctttttccactctcctcaagcgtgaggacgcttgtgattccgggaatgagttcgacggccggatgggcctgcggatctcttccgtctttgtgatcatggcgggctccatgtttggtgccttgttcccggtcttcgcccgtcgctttagcaagaatggtggatttcccaaatgggcctttttcgtcgccaagtacttcggatctggtgtgatcattgccactgctttcattcatctcttgggtccggcggaggaagccctgaaaaatgagtgcttgaccggtccaattactgagtacagctgggtggagggcatcatcctcatgaccattgttgtcctattctttgtggagctgatggttatgcgtttctcgcactttggccaaggtcatgtgcacgacgaggaaggcaatacccacacccaactcgatgatcactctattatcaacgaaaccaacgagccgaagactcacatgccaggcgaggatcaccttggtcatacccttgagcatcacgataacaacagcgactccgagaacgacatccaagcggttgaggattatgccgctcagcttacttcgatcttcatcctggagttcggcatcatcttccactctgttttcatcggtctcactcttgcagtgtcaggcgccgagttcattaccctttacattgtgcttgtcttccatcagacctttgaaggacttggtcttggtgctcgtctcgctacagttccctggcccaagtcgaagcgcaacactccctacttcctaggccttggcttcggaatctcgactccgattgccattgccattggcttgggtgttcgaaacagctacccgcctactggacgaaccacactcatcgtcaacggtatctttgactctatctccgctggcattctcatctacactgccctcgttgagcttatggcacacgagttcatgttcagcccctccatgcgccaggctcccctccgcgacgtgctgattgccttcttccttctttgtgccggagctgccctcatggcgttgcttggaaaatgggcttagaggggtctttgcttccatgatgatgagaaaagttatggggacactcttctctcctaataatgtgtcatgtctttgctttttctttgccagttttttttattatggtcagatattgtctgcatctgtgctatccacgggatccggagcagttttagccattcgtctatccggcgttattttagcgaatgtatcgccttcttaagttcatgaataataattccatcagaactattcaggaacagtcaaatagtagacacgtgcttatccgaggtataccaagccctaccccgaggtgaaccgtggataagcaattaggttaaattctataccaatcagaacaatcaaaagacgcctcaaaatacccctagcatccgcttaaccatttcctccatagggctgcttcctgactgggattccccgctccaactcgtacagcaggtggaaaatgggataaagaggagagaattacgaggggtgcgtgacaccctttgtttgttccctctttccttctgaaagggccacagttccaaccttttccaactcccatctctcaaggctgtcgaaatggcttcggcaagcgacttgaccgcgctccctaaggctgcgactcaagataatatcgaccaagttgactctgctccttcatcgggtatgtcgttgaagcaacaaagtctgtcagacctcttcactattgtgagtacttcatcctagcctattcataccagatttcttcttgctttccccgcactcgcggctcaagttagcgaatgacagactgaccaaagtggatactattcaatagtttgcaagcggcttcgctctgatcagcgatggataccagaacaatttgatgtgggtcgagcgattgtccccatgcacgactgtatctaaccacggaacatctcataggactatgaccaatgtccttctcaaaaaggaatatcctaaggagtacactaccacggccagcacgcgcgtttcgaatgctctacttgttggcgaagtcattgggcaggttgttattgggtacgcacgaaacaatgctgattaaggctatggacgagttctgatgactgatattctatactagactgacatgcgactatctcggccgtaagaccgccatcgtctttacaacccttatgatcgtcgtcggaggtatcctggccacggcctcgcatggcgttaccatcgatggtatgttctggatgatgacggtggcccgtggcgttgtcggattcggtaagtgaccctcgatatatttgccttgcttgtatatctcaaaactatcattccgagttgtgtactctactaatcatcctcaggcgccggtggcgagtatccagcctcttcaacttccgcctcggaagcagcaaacgatctaaccccgaagcaccgtggcccagcgttcatcatggtaaccaactttcccctgtcatttgggggcccattcgcggtgtcaatcttcttaatcgtactctcagtttgccagcagtcccactacagcaccgtgtggcgggtgtgctttggcataggatgcatctggccgctgtcggtgttttacttccggatccgcatgctgaactcggtgctgtaccgacgtggagcgatcaagaaacacgtaccctacatgctcgtgctgcggtattactggaaagcattgattgggacttgcggtgcttggtttctttacggtaagagacccccccagtacttacagacgtgtagttactaacatatatagactttgtcactttccccaacggtgtcttctccggtacaatcatctcttcggtcgtgcacaacggcacaatcctgcaaacaggcgaatggcagctcctcctcggcgcgatcgcgctgccgggcgtcttcctcggggccattctctgcgaccgccttggccgcaaacccatcatgatgattggattcagcggatacctgatctttggcctgattatcggctgcgcctatgaacgcgttactaagatcgtgcctcttttcgtcgtcttctatggactgatgcagagctcgggcaatttcggtccgggaaatatgctcggtttgatttcgtctgagtcgtatgctaccggtgtgcgagggacttgttatgggctctctgcggctattgggaaggcaggtgctgctatcggtacacaagcgtttcagcctataaagactcatctggggaacaagtggacttttattattgctgctatttgtggcgtggttgggatcttagtgacttacttctttgtgcctgatttgacgggcgaagatttgagggtgcgtgatgagaagttccgtgcttatctcgttgccaatggctgggatggtgatatgggcgaggacgatttgcaggcggctgctgatcaggtcatggacccgggttttcgtgatgttaaattcgtgaatcagacggtggcggcttagaattgcggtgcactgcaatcgtcaggcatggccgaaggtcgagaatggggatatcataatatccccatatggcttccaaacccagtttccatatctcaattgtttaggtagaaccactgtgggatattcgcatatttgtagtccacgataacacaatatcttcaaatcccgaagtctatagttacagccacctacgtatctccagtctgcttcctttggcgtcgtaatgtataccaattagtgccttgtgagtcccctctctcgtctagtccaaagagcaatgataaaacctagacaataagcaataaatcccttgtagaaatcaccaattgacaatcatggactgcaaccgcaaccatacatgtaagcttaaagcacagaccaacgctaaacctcggtccaatctccgcccatctgtccacatctctccaattcccctctccccaaaccaccccataaacacaaaatgcgtctcacctccatcctcgtcgcagccctcggctcactcgcagctgccgccgacctcggcatcgaagtaacccacgctgtcgaatgcacccgcaagaccgtcaacggcgacggagttgccatgcactaccgcggcacacttcagtccgacggatctgagttcgattccagctacaaccgcaaatcgcctttgaccttcaagctgggtaccggtcgtgttatcaaggggtaagttaaaagctgcccggggctgtttgtggatgtcaatctgcaattgctgcttattatccgttgttcgcgtggaagctaattcgtgtgttcgttgtatacagatgggaccagggcttgttggatatgtgcattggcgagaagcgcacgctgactatcccacccgagttcggatacggcgaccgcggtgtcgggccgattcccggcggtgcgacgttggtatttgagaccgagttggtcggtattgatggtgtgaaggatgagctttgagtgtgcggtgcttgatacctacgtatgtgactatctgggatggattttgatgacaaggccgtcatattcggctaagaacaaatatacctttttgcatgcgatttattctatgatatagcagaagggtatctcatttatgtggggtaagatgtacactgtatacaaaccggctgaacaagtacagcgaagtaaaacaacaataataaagtggaccatgtatcagtccatcgcgtccagagcattctcggtttggatatcatgctcggaaaccagaattcctaccagacactcgccaaggatcccctcccagttgacccacgggtggatctcctggaacaactgtgcagagtccttccccgcgcctcgaaggagttcacccttcccacctggatggtaaggggcgtagggcgagatattgtacacctttccatggtacgaggtccaggcatcacgacccttacgtccgtgctgctccttcagcattgacggtgtgacccgcaaaaggcctgggggaaggccttcgccgcggagcttgttcttcgggttcgctgctagcgctgcccagtcaaggggcgagaatcccggctccagaaccactttgcgcgatgacgactttttcaaggatacttgtgtcggggctagggtgctgctgctaagacgactgccgctcctcggtgcgcctaggccgcgctgggaggcggctgctgatggtggtggaccgagggagttgccgctgagccgtgggggttgaagtgtgcttgtgggggcgaggcggttcgcttgagttgctggtcggggccgtggtactgggggaggaggcattagggaagaagtgccggttgttgttgctctcgggggtatagatggttgtggttttggagggggtgcgagggatggctgcggtggcggtttgaactttggtgcctcatggtttgtcgaaggtcgttcctctgctgttccattcacggtttgtggaatggacggcatcgcggcaggttgcgatgtctcgcttccgccgctgtctaggctgaatgtggggaccgcaaggacggggagtggtacgctcgaggccgaagccttgggtgtgctctgggaatcctcctcctctgtctctattgatggcgtcgaggcccgtgggccatgcttccgctgcacaggctcgcttgcggtggcagcaaccggcgcgtcgggtttaggttccggagaggcaaaagaacgaggttcggcccagctgcgaggagggtaacggtagagaaagtagcccgttgttgcgataagcacacccacagctacccaacccataccgactaaatcagaaaggcagtgaaagtgagaaaagtagtccagaatgttgtccctgattagaatcacaatcttgcagattcgccgagaaaattggtccgtgcgctataaatatgcaacattcgagatatgcttaatagaaggttaaatactatttggtcaagtgatattcaataattttgttaattaattagactaattaaattgagacatttagagaaaaaattgttattttctacgctgtctacccccaagttccgaaaagaaccattgcagtcaaatatcagacattgctaggaaagaaactatctggggagtaaaggaagaactccggggaagccatcggggaagccattgaaagccaccaattggatatcggtagtaaataaaacagcaatcgaaaacagaacgcgttcatgatgtcagtgccccatcatctacatatatcgcgatggtatgcccttaggagagattgattctgtatgccaactgcgcaagcatggttgtggctcacaaagctctgagggaccagatgttccggaaatcaatttctacctcagacacagtcacacttcttgatgccggggctggtcaagtgagtgtcaaggcgcatagccctcgtacaattatacttatcaataatcaaatggcagtcccagggtggtaggaagcatcaagaggatcggagcacagtgatctttcccaatcattttccttcggaggtgaaagacgaagttgcattcttcgcaatctatgatggacagtaggaaaagcctcaaaatgcgtcctttacactagtctcgagctgaccaatatctccagtggttctggattggtttcggatcatgttaatggctgtttgcaccacttgatcggacagcatccggagttcgaacgaggtaattggcctgcggctatcaaagccgcattggcggaagaagacagcattatgttggataggttcaagcatgaatctgccgagcctgccatttcaggatcgacagtggcattgtgttgcattaatctcaccaagggcgagctggtcgtctccaatctgggcgattcgcatgttatcctggccgagcgggaccggaaaacagagcacccgtatcacatcgtgcgcactgtcgtcaactcgaggtggtttgagcgtggatactaacaaccacatactagcgacgtctcacagaggcccacaagccctccgaccccagcgagaagacccgaattgagaaagcaggcgggcaagtcaatgaccgcagcggtacagagcgcattggtgggttgagaaaaagaactggcctccaaattgaatattaactcttgagcgacaggttccttgaacatgtctcgagccctaggcgacctgcagtacaagaatccggtgaataatacctttacggacaactccgtgctggaccccgccgcgtcggctagcagccgaacggagtctcggggcaacttcctatccaatgacccctacatctcgcgacggacactgaacccagaccgccgttacctgctcctagtggtgtccgacggagttactgatcgattggacgacacaagcctggttcagcacgtgatgaagttgtcgatgcggggaaaacgagcgaatgagattgcacaagaaatcgccaccaatagtgcgaacaagcctcacagtgacaatgcaacgtgtattgtagcgatgctggatggaagggtatcgtgagatgtagaatattacctcaatgccacaagatatactccgtacttatagtcctagagtagttagccgagttgggcaaagttccacccggaaaatgttatgcagctgtgccactcatggcctaccaacggttcgcgccttccccaatgaagaaggtggtttggactattttggaattttggaatattattatttcctcatattaaaatctttcgactatttcttcttttcgattgttcctccgagactggggggaaagaaaaaaaaagaaaaaaaatgtatgcaaatcaatcgtggcgtatttagacggagaacccttggtggaatctacaaactcgaaggaaaacttggcttctccgcggcttccaagggttttgtactttcgtcccattaaatgatgcaatttgaattttatattgtataaactgaatctagaaccgcagtgcatatgcaccctctgcactccgtatcaaatgctacaatcggatcctccgtaacctcccccgccttccaagggtgccttatcgcttactgtcggtccctgttttatccaaccagacctcgggatccttcgtacaccaatggagctaccgttgaaagcagaggctccgacatgggggggcaggaccggtctgttggaaacctgtcaaaccactttaggcaggcgactcagtctcggggtggagctggcaaaaagaagcataagatccggctgtagccaccttccagaacggtcattcctgaagaggatctcccgagctcgttacatacaaatcgcccgtctatcccacgggttttccttcttcccattcaagtcagatttttccatttctgttgcgttcaggactatctttccatatattggatctctttgatcctgacagcaaccctcaaacatccgacatggcacccaaagaatggagcaacttccatgtgggaagagaatgtggccacctcaagtggtcccgtcgaaacgtccccaagttcaccatctcctccggtgagactgtctctttcgatgccatcgacagtagcaatggccaactcaacacatcatccgaggcctcagccatcaagacgttggatctcggcctggccaatcctgtcttcggcccgatctatatgaacgacgcccaacccggcgatgtcctcaaggtggaagtcctagaccttgaggttgctgactggggctggtccgccatcatcccgggcttcggtctgctggcagacgaattcccagagccagagatcaagatctgggagctgaaccgcgaagcaggcttcgcccaattcaaacacatgcggatccccctacgtcctttcctcggttgcatgggtctcgccccggccaacgacgaagaactctcgaccgtgccgcccacaaacgccggcggaaacatggactgccgagagctcagcgtcggctctaccgtcttcctccccgtccaaaccgccggcgccctcttcagctgcggtgacggtcacgctgcacagggccacggcgaggtctgcggcaccgccatcgaaaccccgatccgcgctaccctccgcttcgaactcctcaagaaccaaccctggatgactgctccccagttccagactccccctcgtgcccaaataccgaaccctcttcccgaccttggaacctatggtgctctcggtattgctcctgacctatacgaggctaccagaagtgctactcggagtcttatacaatggttggtgcagactaagggtctcactcgcagcgaggcatacatcattgctagtgttgctggtgacttgcatattgctgaagtggttaacgtgcccaactttgaggtggccatgaccctgcccttgggtatcttctcttgattttattgtcgttctttttcgaaatccttgattagtctcaaggcatatgttgacgtgataccctcctgagaatatttgtgatttcatttcggttgggcatatactggtgtgattggggtgatgtatttgcatgattcagacaagcgttactcaagcgagcattatattccgaatacggagtcttcttttgatcgagaaatagctattccatccgtatgtgccgttgcattggcacagtgccttttctatcctgggcctcttaactcgaagggcttgattctggaatcctcattgaacaaagtgatgtcctacagactgtaacgaggtccacctaaaggggaatattccgcttgatcccgggataacccttgatacgaatccaccaggatgtgggtactgcttcttaggcgtcgtgtactctgtcgtgacggtcccaaaatattaaaccagtggggtccggacatgtgtggatagccaaattggcccgtgcatcgatttatattgtctgtcatgtctgctgttagacactctggatgctaagctttgcgtgctattccaatattccgagtgtttgtccggcactagcttataagtagcaattcctccgtctaagtgagtatccgattcatttcatctcggatctcaggggggcacagattgaaattgaaatcagacgacttgcctacgtacctggtatcctctacaacttggtttctctaaccttgtcgacggacatgacgtaacatcgcttgatcttctaatattgtccacgcctcgccggtaacacaccagaaacattggagtcacataggaaagacgtatcggagttttatttttggaactatcttagagggagataaggttctgcaatcggcaggttcggtggacttgatcgagaaatacatccatagtaagaaggttaactagagtcatgcataagatgaatatagacccctagggcctaggcaaataagaattatgctcaagtgataagcgaagggtaaacactaaaacgaaaatggaagcgaagcccagcacaacactttatcggacctgccttttatggactaatggccgcgtctactactatcacccatcccgagaccctctcttccctacggaatacttggccttctggaaacaatgacggcagcgcactcccgaacttcgccacataataatgggccgtgcatccttgaaatggtcaggcatgtcccgcgttgctggagcgcttgtatcagataggcaggtcgggatccggcacggcgggagacatcgggcccactcctgaaggctgaatcaaaatatcgccaacagaagatgggaaggggctttgtgaacgagtcatgcgatgatacatccgaggtacaggaatataactatctcagtctttgtacaaaagtacaaaagtaccaattccacttggttagacttttccgccttggtcaaatgccaatgtgaaatgtattattagttacataatgaccagatggctgacgttaaggtatcatcctatgtgtcaatctggtgaatttgcgtatctcgtgctgttcttagtggcacttggactcgtttatatgccgaacgagtgatttgaagcctcacctgccaatctcggtaatttcatagtggagttaggtagaggggctgtcaggctgaactaaaggggtggtaaaatgaaagccttattcatgtatcaataaatattcccattagcatgaagcttaacatttggaagtgtcgctaaaaactcatgttgattactcttcttatatagtgaaaaaaagtacgaattttgagactcaagagcagcgcctacgcttttgctgcaagaataccatcagcatataccagaagactacgcaagtgaaaagtaggcatagctatgggtaggatgccacaaggttggacataagctccctctattctaaccgcaatcatccactctacagacgtctttggggcttgccgtctcacaactatcccctcaataccatctctagggctcgtatctgaattatcaagttttcacaatcgaagacaggtagttagcaagtactccgtaccaatccattaattcttcaaacagtgtcctcaatgtagagtggaagtgtcacatgacgtcgcgttttctcgcgtctccccctcacaaacacccgaggattggcaaacaccccacatgtcatggatccgattttagacggcttgaatcatgcccagcgggaagccgtcacttcatctggctcaatcctgcaagtgctcgcaccgccgggctcgggtaagacaaaaacattgaccgcacgcgtcgcgtacctcctctcgcaccacggataccaaccgcaagatgttatatgctgcacattcaccatcaaggccagccgtgagatgcgggagcggctcgcaaaactcattggagaaaaactcgaatcgcgcttgattctcggcacctttcattccatctgtcgccgctacttggtcaagtacggatacttgatcggtctgcggaaggggtttggcattgcggattcggatgatacccgcgcaattatcagagtatgagtagtacttttaaattatatcaatttgtttctattctctaattgtcactgcagagaaccattaaacgactgaagtctagcattgaagtcaaggcggcgcaaggccgaatttctcgacataaagcacatggactcagtcctgatgccctggctgacagagccaaagcagaggagttggagcttgttgatatctatcgtgactacgaatcagcgctggccgcctccaatctcttggattatgatgacctccttctgcggtgtggggatctgctccgagaccacccagaatgtgtctcaaatgtgcaggccgtcttggtggatgagttccaggacaccaacatcatacaatatgaactgatgaacctcttcgcatctaagaaccgacggatcaccatcgtcggagatccggatcaaagcatctacgggtttcgttctgcggagatccagaatctcaagcggatgcagcaccgatattcaaacacgacggttgtactgttggaagacaattaccgctctgcaggttctatcttgaatgcagcccaagaagtgattgagcaggatacgagccggcctgcaaaggcattgctagctacgcactccttcggaaccttgcccgtgctaagaagactcccaaatcccaacgcagaggcgcagtggatggtacttgagatcaagcgatgtgcagcgatgaccggcggtctactgcgcatgtctgactttgctgtcctgcttcggtcggcttcgctgtctacacaaatcgaaacagcttttggaagggcgggtataccgtacaagatggttggaggcagaaaattctttgaccgaactgaagtcaagattcttctcaattatatgagggtggtgagccatacgggacattcggacgcgttgatgaatattgtgaatgttccgccacgaagaattggcgatgagacaatcaagcaattgactagcggtgcggagaaggccaaaattcctctatgggacttcatcaaggatgtcatccaagggcgtcgttcgactgagaagaaactacaaaaagctgcagagcagggactctgcgttctaatcaatttgattgaagcctctagacagaagttgcaagagtgcgaggatgcatccgctccacgtgttctgattgagttcattgccgaacgcctctcattccaagaatatctcatcagagcatatcccctagacgaagacagtcgctgggcgaatgttaaagaattgatgcatcaagccagtgaagtcgcagcattcgaggaggaggttgataaagaaatggatctccctgaaatcgaaggtgtgcaacaacagcaggcacatcctggcgaggaggctctcactcggttcctggcgaatgtcgccttggctacggagatcacaaccaaagaagaagccaaagagggaaaccaaccgcaagagaaagtcacgatttcaactatccacgctgctaagggcctggagtggccagtcgtatttgttcctgcagtgtacaacgggagcattcctcactcgcgtgctgaggtaatagaagaagagagacgattgctgtatgtcgcgatgacaagagcgcaggccctgttatacctgagtgttcctattcgacaaccgcggttaggagaaggagaagctggtgccaccactttgacgccattccttcctcccaaattgaccaaatcgcgcttccggtcaacggggccgtctctccatgagaaggtggtgtatgcaattgccgatattctgcgtcgcccgcggccatctttagacgacatttacaaggggctcgagtttcttccatcgacgctggacgaccgatggacacccgagggcgaggaggaccgcagcaaattcgatggcacatctacctctcacgacgcgtctggcgagcccaatccaaagcgtcggcgggcagacatgaaccagggtccaaaatcgaccacctacatctcatcgaccgggtataccatgaacaactcgacagggtttacgattcctacaactggtctatcgggttttacgtctgcccgggattacatagcggccaaccccgaaccccccgcggagtcagcctcaaaggctgatgcagatgcagatgcagctgggacaaatagaccgaaaccgctcagcagcgcaagccgtaaagacggactcacacaggcaagcatatccaacttttttgcaggcccaggatcctcccagaagagggaaccagttctgcctcgctatccacagccaccaccgcagaaccaacgctcaggggcaagaagcattgtcccatctaccctctcctctcaccgtgttcagccacgaccacttattccaacaaggccgaccctggagcccacggaccccaatggttacacgtggctggcaactccatccaacccaacaaccctgaaagctgccaggatgtcgaagatgcaggaacagaacggcaatagtacatccgcaggcggaacagccggggcagacgaggtgaaacccgagagctccaccgggttccagccggtgtcgacgtttcacagcacgacgatgtcaatgatccaacaagcaccgcgacggacgttgggaattcggcggagcatgaacgggtggcaagaccggatgaagcgcgagggcggtggacaggcgagctgacacgatttacgatttcaggggaggctggttctagaatcctgacggggatgggttatgtttgtccacgggaccaggtcagaagggcagaaggggtcaggcaatccacacgcttcgcaagcccattgccggttcaggcgttgctagggaagccctcccggggtatacttagcttggaaagtgattgaccaggaaagggttgactccagggccagaatctcggtctagatggaatgacgcacatccgtgcactaccaactagaccatgacctgtttatgcattgctctatagggagatgtatatgtacctaagtttcataattattattttccccatgggatgacccctgtatgaactggggcgggcagatcttccgatggagcctaatacagattagccaggctgaggattatggacaaggaacagagtgtcgatttgcatacacaatgatcgagacgtaagattctggaccatagtggggttccaattacggtgaaagaatcaatagttagccagtagcatgtcgtacaacatagtatgatactatatacacgcactctgtacagccgccattgacgcatcctagcggtgtgggaagcgaggaatcccctcaacgtaacgatttattattatttggttagttatttgctattttagttacacgaccagtccgattctgtaaataggacgaagaatggctgactcatcattattggaaatagtaccggcacaaagccctagcaacttctctccttcatcactggctgccctactttcgatcgaccctctaggccaatcaatgcttcgatcgtggcagccattaccaggcaccaaatacgtcagggggagatgatccattcctagctcttgtcctcttttgggactagtgagctgctcgacgtatgttccccagagtgtagatcggggcgaagctcaatgcggaatggcttgctatacaaaaagaagtcgtcgccctcgaactatcacttcattatcaaccaaactacagcatatcaacaacatcactattgtcttctcttatatttttgtcttcctttataccttttatctataccttttgtctatatcttaattattgtccttataatctcagttcaacactgtgcctcacgctcgacgcgttctatacatatccgttcatctcttgatctttttacctttttactctctctctttgctctctacggagtacctctacctcttttaataccctaatatccctcttcctcgccatacgccttcatctttacctcctccaccctcaaactacatacaaaccattcctaccattcctccacaatgccacacaaagtgaacgactccaattcaacactagccagcagaggcagcaacaatgatcaggtggtggccaccgaagtccggagtatgtcaagtgcatcacatccctgtcccgatctccagattcagcccgagctaatgcagaccccagcaaccaatcccgtccgcaaacctccggtgatcgttcacaacaagggcggccgaatctacgatgagacgcggccatctgactgggacaaacaacgctggaagtagttgtcctttacagttcgaattgcctacgtccctatgcatctcaattgctacatctgcatacggggcgttcggctggagagcgagacgcgaataccaccattttacacgcgcgttacaaaggcgaaaagggggtccagactaggagaagagacgaaaaagcccagaaaaaaaggaagaaaagtgaggcggtgatcgaccaagatggttcgcggagatcattggacgccaaaacccccttttttcgctgcctctcgtcaccgcttgacgctttctctttcgcccctgaccagatcgggctgcttctacttttcggattcctcggattctcagggctttggtgccgtttcttcccttttttgacttgtccatttgcctctccccggatttttcgcgtctccactcttccccttgtatcattattctggagttcgtcttccttcattcctctactctctactccccttcccccttctactttctacattctacccttccaactctactggttactgttgaacacgtgttttcctctcggcgctgccaccaagcagctagctgcatggtcatgctgtgagggctaattgggttgacacccttctatttgtttcttttgtttcttgcgatgcatagcgtgggtattactggatctgctggacttggatttattgcgaatgagcgaaattgtattcttaagaggaatttgactgtcttattatctagatcttccctttatttgtgcttctttcacggagtactccataccgtaaacacggtgaacgctggccagaaacggccgctttgacatcgtattaggccgccgtcgtcggtctggcgtcaagtttagcaattaacacggctgccctggttaaatgcctcgtgttggccgtgcctccagggttgtatatacagttatccgactcttcttcaattctactggaagagggaaagagcgatgggaatacaatggggctcgaggaaacgaaccttccctgggagtttctttaaatcaggtaggaacgatgcacttccattgctttcctttgtccatgtgatctatcatatgcagtcacacgcatgtaggtctcgtcttctgacgacctatgcgatatttaatatgtggcattgattcatccgcaatacacccaccccctcgaatagaaagtcgatgctatcaaataaccaccttccattatcatccaaagatcccatagcatgtgtccaacatttcatccattcgaaattagttcgaattgtcacgtccgcccgatgcctgaaaatgagcacgagtcgtatcgatagacgccctgtcaaattgcggatcttctacgatggtagaccggtgtttggtgcaaagtgcgctagcatttcctatatgtgactgggcatacggagtactgtctcagaaattgccgtttgatgcaggcctcggtgtgtctaacagcgcctagaaatgaagcatcgaattcgggagagtaggtggtgcgatagatggcatgtcctcagctccacaaaccgtacattctattactgagctcctccataattgcggtggatgattgtaggtggaatgtggtagggttcaaccagcttcaccaacagccgcttccttatctccggctaacaccgaacgacttgaatattattcctagacccgagcgcttttggaataaagcatcaattttcaatcttattttaacaatgtctaatagactttcagatatttatagtcttcgttgtaaaaaaaaaagtggtcaatataatatatacagggcttcgatgacagtaaaatatatatatgagaccttgtccgagtggctggatatacattttgagacactagagctattggtggaaagtatctgggtatatgccactggcaggatatacttttattgtgaaaggcaatggatatgggactgaatttcagacaagagcagcgcagagagtgacatgccgttgacataggtacggagtagaaatatggctaccatgcagtagctcgcagaaaatcccaaaggagagcacaatacggagtaccctacaagaacaaataaagactacaatttaaagcatccaaaagttcactgaaaatgggatatatttcagcgccgagcggtataccgacaccccattctcaaattcacataagaaatgaaagaaaaaggcacctggcctgccgcctcccgtgatggatgacggacaggcgttcagggcatgtgtcaaaggctagatacaaaggaaggggagagcgagggaaaagaaaaggcatccgttgattccaaatatggactcggacacccttcctccccagaagacatataattttttccgggttttcacactttttttgcttttttttgtgacctccatgagaaacgaggcacattaaaaacgggtttgagggggggttttgaggggcggggattgggtgttgggggcgcaattgggaaggcagtcaagctgctaaggattgtggagcgcagggggaatggggatatcaaaaacgcagcaccaattggcgcgcagaaatacaaagggtcaaggtgtgcatggtattccttgacagagaagagaagttaatatgacgaggggagtgaaaaacatcaaactgtattcttgaaaaacaaataaatcaacatggctcgcgctcgcaatgctagatggtaagtcaagtgcaacggatgacccaaaactaatgggtatgggagcaaatgggtatgcaatttttggaacaggaagtgaagggctggtctcgactctggttccgcagaannnnnnnnnnnnnnnnnnnnnnnnnnnnnnnnnnnnnnnnnnnnnnnnnnnnnnnnnnnnnnnnnnnnnnnnnnnnnnnnnnnnnnnnnnnnnnnnnnnnnnnnnnnnnnnnnnnnnnnnnnnnnnnnnnnnnnnnnnnnnnnnnnnnnnnnnnnnnnnnnnnnnnnnnnnnnnnnnnnnnnnnnnnnnnnnnnnnnnnnnnnnnnnnnnnnnnnnnnnnnnnnnnnnnntcggaggccgaatgcaaagcgtaaaggacgaaagtggacatagtcgagttcgggggatatagcacaggtgaacagctggtatggcgcattgagtattaagatggaatatcgaggtagatcaatgcgcaatcggacgctccttggaggcattctatgaagatgagagaaatgaaatgaaatgctggaaatatgtgcaacggccaaatttcatttggtttgctggtcgttccgtcgtttcgtttacatcccaccctgatatgtctggcacattcccatatgggtaggtgccagagggaactgttggagtgctgcttgctgcgccatgtacatagcctcctgctgttgctggtatgcttcactgttcatgtattgcatctcagcggatggtgcgggggaaggggaacagccatggtgaccagtggccattccgcggctcatatcgtgattcgccatttgtgcatgggcatgcacaagcgcctcgttgtccggggtgatgggaggagtgaggtaaccgtgaggaatagctgtcaactgctgggacttctgaggggtggcaaggccaatctccccattgtacggcttggactcgataggagtctcgaccggaggggtgcaacgggcgtaggttgccaacgaagcctggcggttgaggaagtgttccatgaccttggagacccgagagtagtgagcggaagcgtacttgcgggcgaccacggtggagggctggtgcaactgttgagacaaggcaacgagagtcatcgagtcatactgcgatgaccaatgggtatgacggggctgaggccggttaagaatgcaacgtgacaatgcaagagcggcacgggcaagctcagacgatagcttggcgacaaagtcccggtggaacaaggcaatctccaggatgtacagagccatgtgttccacctcggggtcgtaagcatcatccaagacggcgtgctgcaagaaagcatccacagttgggtgtccaatggaccagccaagagtttggaggacatgccattccatctgggtgaacatatcgtcgtcgtaaagagagcagcacatcgacttcaactccttgatagtggggacgcgatccttcttgtcattgtacttggccgcgatgagtagagctgcacagccgaccaactggtagtgacgcttgtagaccacacgcttggagcagtatcggtctaaaagattgattgccaagaacaaggtggatgggaggagctggaacgcagtgtgggcctcgatcaagaagtcaagaaggtacggtcgcataaaccactggatctcggtttggatgtcaatggactcgacgtcgggcagggtttggttctatggcggagactaggttaacaacgtatagccttggagagaaaccaagggtctggtcactcacatccatttccaacatgtgactcaggacatcgtcccgaagctgctcgcttgtgagattagatagctcatccgccatgacgtattgacgctcacgagccatctgcttggcatgctcctgtttcgcttgccgttcttgccgaatgcgactttccatgccgtactcttcttccacgaagaacgtgggacaaggacggtagttgcgatggtaatccatgattgcggaagtacttggatcaaccgaagtatgaagcacaagttgacgtatgagctttgtattggcgagtttcaacgaaaggaagcctgaagaacgggtctatcaggcaacgacggaattaagagagtgacagtcgtgtattagtgtattggaatgaatgacggagatgttgtaacgattaatgaatggaccagctgaaacaatagttcgaactgggaaaggttggccgggaggtccgaggaggatgtcttcgaagggaaggctgaaggaaattaagattagcggaggccaatgtaagaaatcgattaaaagattgtaacgtcaaggtgacaaaagtaagagagtgtggaaaggaaaagcacaagaaggcagagtgcagagatgtatgctaatatccattcaggagacgaaaagggtcatccttctgagaaatactaacccagaaaagagccttcgggtagagggcacaatgcaacccttaccgtgacggcaagactggcatctaggcaggaatgatccggtgaattaggattctgttggataccaacgaagagatggagtacgagtcaacgtcttcacccctaggctagtgatgtggaatgtggagtaggagaacaaccctatgaagggggtcataatcatcagggggatgtcttggcaaaggaatggttagaactcacacttcacagattaacgagttgaatgaacaaggctcagtgaagagactgatatagtttctgagatggaagtggtgaaggatgaagtccacgtcaagagagacaagtggatttatatcaaatatgaagatgaacaaattctagatcaggcaacaatgtcagtcatattcattaatagttccatcgtgatagtcaaggctccaaagagcaatggcaatcaacgattgacgccaatcaacaattaagtgcaatgaggtatgtggtgccgcagcctgatcggcgccccaacatgcggtatgtccagtaagagtacgggattttcatcgaccccttaaacttcccacgccgggagatatagaagcagccacaagcgctggttggaccctgagattgcatgtcaagcattaagatatgcattcctcagttgtatctgagggcatgatctcccgtctgcatggacggcaatctttaccgctcaataaagagcaacccctccatatctggctctcggtgtgttgtctcgggtgggaaatgcaaaattggaggtaaatgaggttggggctgctggattgaacatggccctgaggccataccatgattatgttggtgggtcgatttttcatgcactcattggaagggttttttttttcgtgtggaaatttattgaatctcatggctcatgttgagaaaattcgagtatccgttgctcgtctatccatcggggcgttccgatcttgacaaccatgcacacctcaaagtaccaagaaaaaaacaggatttcttacccaagttttgaacgtcaatgtctgtctgatacccaaaaccaatttgtatcaaccaaaagtcaacctgaatgtgtttttcctacactgtcgctcgtctaaccggcaggagctggaacaggagggtccaaaaagtccgaggatcagggagggcaccgggcggacaagaacgaaggatcgccgtttgagttaacaaacgtcgaattggagggtcaagtgcgaaggtcaaatcgacttgacttgagtgctagtgcagcgggctggaggagatcgactggaatgtcgaaccgtaactcagccagtagaccagactcgtggtctccgcaagattggcaaggaggaaaagggggaagagaaaagggtatgaagaagagaaggagagaggtacaaggaggaggattttgactttctctctccaggcgggtggtgggaagagaaagaaggaaaaggaagaggttaagaagctgagaagacacggagatacacacggagagagctggttgtatggtaatccacgagacagagagtggaggctgaaggttgcgtacggtaaccgtatgatttccagaatcttaccgattgtacctctggtacccagcatgtatgccaggggaccggtaattttgataactagggcttcgtctctgcaaggacaggagttgaaacctacttgcttgaaaccggcagttacatatgtgttattttaaaaggtcggaggtttcaaacgtggaacaggcacaggtacagtatgcaagtgttgaagtagctacagtaaaatagcaaaatagcaaaatagcaaaatagcaaaatagcaaaatagtaaacagaaattactcgatagtattcatacctacaagcaatctcaaatgcgatgtatctacgaggttgcatatgctataactttgaaactcgaatattgcgttttcaaccgtatgccgcgacccagtcattttcctagactagtaatttgaaggacttctgatctccgacatttcgacatttcaactctcaactgaaccttcaacctttcacccatttcaaagcctaccatttccccgtaaatcgcctttgatcatagtacaatctccaattctccgaaattcaaccaccgcgtttccctatttctgatcagacaaataaagaaaaagtataaatggagccaagacaaccgcgagttccggccccaaaaaagctcctgatcgacaagtattaaggccaatcctcaaccattgttggctcgtcatccagcaccttggttactagtgctgcaatgggctggtgtggctctccctctaactccgtacgaggcctccgatacggtcgcgcgttctagggtctcctgcgcctgggcgttgactggtccagaagcctgggattgccctgttgacttcatttgggcttttccccattcgcgtacctcagcttgggctttcctgaattgataacccgagcctcctttgtcttgcatgaatctgactatcctgcgccgtccatgtggggatatttccaagcttcggttttcggtcgcaaaagcaggatctcgcccgtaatttggacctccacgtttccatttctttttcttgctggaattggtttaattaatctgactgtcactatgtatatagttcactaactgttttagacactgcgcatgtaatttactttctcgtatacagtatcactttacaccttcatccctacaacgtctgccgcctgtgacaccactggagatgcacttgattcgtccccaacttctcgacccgagataaggttcatagacgtctcatcaagattgactggtttagtcttgagaatgtcactttttactggacgcgtatattccccatgtcgatctgcgaatcaatccctggtactaaagtacacaattgcgactcggagctttttacttatctccccttacttcatccccttacaatgcacaatttgaatgagaaccctctgtaaggtccagggattaagctcagccactcaattgcatatcagaaatatcgatcatcatgcgactcggccgtttctcaatgacatgcacaggatgcgtacacaccaagtgactggatacgatcggtctatactattccggagcacggagtaaatgcagcttgatatacgacagcgcataaggctttacatctagcacggggtagtggatccatacgtttcacttgctcaacttcaaggaatgcgggttgaatcattggttagcgccttttcattcaaactggaaaacagttgccgaagcaatgggctatcgacggggtatttccacctcgtgcaaactaacagggaaacgaagggggaaaagataagcgatggccattgaagggtgctgtcgagagtcgggactgtacaacgtcgtaaggcaagggactgtcaaataagagaactgaatgatagacatggctgatatgcagaagcagatcacaaacacccttctacaaatttaggttcgtgttataaactcccatctcatagcatgccagggacttttgttgtcgcgccatagcagcagttaaatgaatcgccgaggctttgattggaataatatgtactctagataattgaacagagtacctcttcatccttgataacctgtcagctgcagaggaacacgcctagccttcatacttgcctcggtgagtctggcccgtatgttgcgtcaatcaaagacacccatatccaaacactctcattttaggctaaggtactccgggattccacttgatctgcatatatgatccatgccagtggatagcattatatacctaattatatacttctgttgcttgagtagttcgccccaaatggcggggatgacctgtactacccggtagatggtaataatatcaaaggacattattgggtgtaccacctgaacacaaacctgatacccgtactccgtatagcctcctaaatcctcgcagcaaggcaaacttgaagaaacaattggactaaacacgcccttttgtaaagcggtctaagggaaaagggggctcccatgcagcaaatacgtggtcgcaatggggcatatcccactgcagccgcgcacagtctcaggatcaaatcagtaagagatacgagttacttcgtgtccacaaagcttgcccggatggcttggaaactaggtacgacctggccgatgcttccgatgcgcccagccggcacgctactgtacctcctgaaaaggggaagaagagccttgcggtatgtcagcttgccattttcgtcccctgactcgtgtctcgccccatgtttcaagtaccgaccgtaggaagtcctctagaggatgagagtaagtctaaagcgcgcgcatatggcgatggacataatttgagtctggacctgggctgggaattctattggccccggactctttagcttcccgtggcggataagttgcaattttatctatttttgggtatgagtctgaacctcccatttattttagtcttgggcattttgctcgacatagttctttggatagagaattacttgttagaagtgcttgattggattcaaggagtgactgatccttgtttgtgaggtggttggtaaaacctcgctggcaaacacccatgcaagtcaagtcttcaaggaggcgtcacttgtctataaatgagagaaatttaaataacctgccatcgagtggtttactgcaagatctcacccggatgggcgccgaacatgatggtggtttcccttgctcatgactctgcaaatcaagagacagtaatataacccttcgatttccctccacgttgcttatttcacttgcagtccgcgcagtggatatttcattctgtaaggggaagatccttcccagacgtcaagccatctggaaatctgtttccaatgtagatcaatgttctttggcagatgttactcgtttgttcgagggcggtgtggactggatattaggtatctcatcaaatcatgtaccagttgcatgttctgcatcaaatatcatcactggtaactgatatatagggtattcatttccaagtggatattacaagcagtctatacacacaatacaagcgcgatctgattcatacttgatatcccatatcgatacattccatactcccgaggtccgtacagggtatctagagaccaatttccgagacttgcagtagtctagtataatacagcccacagaaaaatctaccaacgaacccggcaaaacgtaagagtggaatccgatcttttttcttcgcctcgcaatcgttccaccctaacctgagaaattaacgcgctccggcatcacacgcctgctaaaccatggaaccatggccaatgcctcggacgcagaacccatggacgtaaccagaactccacgttcaacagcggttattccagggcccgtgccggaatatatcaaccatggtactattgggaaagaacggaatccttaccgctctttgcgtcctgttcaccgtccattgaacattgcaatatggtctcaaagtacgtggtatggagccctagagtacatctgtacaaactcaccgttctcttccgccccgccatgtttgatagttttccgctccaccgtctgcctagatgtgcaaaaacacaggtggcggaattggctgttatcggatagcacggataccgtacggagtacgcacaaagaggttgggattgtggctctattctcggatatgtttctcacgtgtagagcaacgggtacagcgacggggggatttaataatagctaatcattgaataaacttagaatttaacgtacatagtcctatactgttgagattatccattggaattgaactgctagatatccaaatacatccccgaacctcaatttttcccatgcgtattaggccaaaaggctgcattcttgaccggtgaaaaattgacgtttcgtggcccctctgcggggagttatacaaatgccacaaaggtttttctgtgtttagtggaaacagctccactacacgggtttttctttcttcttttcttctttcttattccttaggttggagaagtttctaggtggttgacatggtgcagctcatatggaatactcggaaaccctgaaatgtataaagtatgttgtagtgcctcggatttacgtacccctaatttccgaaatcatctccgcaggatacatgtcgtcattcgcatgtataatcctcactttttcagtgctggcattttcaagacggtgaataattgtccagcatacagaatccttgcaaagctccaccccgaataagccctgaaggacgatgctaattactaacgcggatcggggattcgagacaagattacccttttaggtatggttcaacatacacagcttgactggggcagcggaggctcaacccatggttaggctgtttttttcactcccctattccccgccccttttctttagctttctttcaattcaatttgaaatcgccactgcatatcttatgtggccctcttcatagatagggactgtaggatacctccgaattccccaaattggatcaattgacctatgtactattcgatccggtttttcaagactcctccattccagacaggctgagacagcaaaggtaatcggagctgcaaggctgttcattacgtcgctaaacctgacgcggcttagggcataaaaccgagtggagaatacccgtagtgtaaggaaagaaaaggtccactttgaagctttacaatttcaatgtaccggttactgtacgtacaaaatacaaatgtacctcgaaacctgtccgaaaggggataaattgatttgtacaggatttgttgcctacgggctttgcacggtacgtaactgaatgcgaccgaactttgaacccaaccctaacgaacactcataaatagcatcttgcataagattacgattacacttgtgcgccatgtgtctgagtggcacccggcatagtttagtctatgccatcattgcccggctcacgtcccgcacttcttgctttctgtattgcggttcgctttattgcaatcgaccaaggtttgcaggaagatgtataacatacaaattgcctttccatcaacgcatgtctttgtgatatgtgtccaaaaaagggaatagttgattcccttctacagtgggcctagaacagacatggggttggccgctcggtcaccctctactaaaggcaatttggtttcatcttggcgcgaatcccagcaaactctcgtgtgcatcatcactgattccaaggtcgtgtttatattgccgatccggtatctttgttatccgaggcaaatctgacactggcctagataccctcggtcttaccaggaaagggtccaatggggaaggtgcgatggatgccaaattggagctaatcgtgaactataatatgtgagttcactaagcctatgatctgacctcatcatccccgcagcacgcgattccacgaggctgcgcaattaggggctaccggcttgacaaataatatcatccatgtcgcctatgtacaccatacatcacgtatcgggactgccgaagagttccactgggaccggagtcaaagatcgcggtccatctcagctggatactgtacatgtgtaaacctagcttgcaccgcaccggcctctgtaaatagagacaatcaagcacaagcatagggacaatttaattgagttcgatgaccccggttggcaattccttccaagccaaccacaagcaccggggataaaacagaacaaagcaccgaggacaacatgaacgtgatcatccaaatcaatgaaatgacatgacaagtgtgtgttgtatttcccggatatcaagtgaactatcgaatccatgcgcccgaattgggtccgagcccatgctgacaggggtctccaatatcctgggccgtccccgcagctgttgctgtaacgaagtggaatcccgcgacgcaactcgcacaatcaagactatttcctcggaaatgtttcatgatgacacggaaataccacacacactcgaggttgcataaggcttacaaacgattcgagctgcgccatgagggcccccgcagcagatgtcatacacaggtcgccttatccgcactttgattcgagatcgtccaatgaagacgtgccaattcatctcagcctcccctgttctttagctcgtccatgcccatccagtcatatgttcccattgcgattatatgtgggttgcacactgcagagccaagtaccgtcgcgacctatcagagagtttatctgcaagtgtctcaggagcccgatacatgagcacgcataacaggttactttctcatcagccacaacagactatgtcaagctaaatgatggctgcttctgacgtggcagcccgtcgatggtctccctgccctctgccgaagtaggtcataggaacctgtcgcacccatttgctattgcatgttactattggttgcagactgcggcgcgcgtggcgaacttcgtctactcgcgacatgttcagctgagcctgcattttcagggcagatcctccgctggctcccttacatctggcatggtaatctccatatacattggcctcgatagcacaatacacttcatgcggcccgctgaagtttagaactgggctacagctcggggttttagtttgtactggccgaaacttgctcgggtatccaatggttccgctgcacatttctgagctagactacgacgcgaactcaagttgcttatcggcaattgctccctggtcaatatgtgcatagagggttcagtatttgaccgcttcttatcggttggtcgttgcagttcactcgtctctatctatgatggggagttgcaatagggagctcgaagatatcctacaactttcgtggtgttgcacaaataaaatattactaagactgtttgctggacaagcaaggcacattggatatatagtggttgttgactacatacgttctgaattactcgatcacacttgtgtcaatcctatctcttgtacaaaatttatacatatttcgatgggatctatgtcctgacctgtatctaggtactaacccacctcaggaaacacctgtatttcaattggaaataaagtctactaagagcacatctaatcgatggaacaagttttcactacagagattatcatcgttattgtttgttcttctcatcatgtctccagatactggcccgattcgtaaggcactatatctcaatgacttacttacacgtgatctcgggaaaacctacccaactagtcaagatattccggccgctaaaaattatctacagaaaaaaaaagcggcagcgcaacagtcgcaaggaaagctttggcaccacgctataaccacctatttgtgtttaagagatgactgtctagaggctggttttacagcctgagctgaattattcttgaattgatcttcagcacctccattctgatttgcaccccgttcaaaactatccgaaacgagctctctggcttcgaagcccacatcttcaatcatggatatccaccgctgccgtttcgtttcttacaacccacaggcgatcaatgcacttgcattctcgcaccccccgtcagcagatctagctggacgtggcgtacccaccctccgactcgcgatcggtcgtgcgaacggtgatattgaaatatggaatccgatgcgcggcgcctggttccaggagaccgtgatgcgtggaggcaaggatagaagcattgaaggacttgcgtggacactggatccccaggaggatgggcctgatggcaccaaactaccaggaaagctgcgtctgtttagcattggatattccacggccgtcaccgagtgggatcttgagaatggccgcccgctgcgccactcaagtggaaactacggagagatttggtgtcttgctgcgcagcctcgctggcaggcgactaagggcaaagacgggaaggtggtttctcccgccgagggcgagtacacgggtcagcacctcgccgcaggatgtgcggatgggtcaattgtcatcttgtctactgccgataacgacctcaagttcttgcgcctgatgcgtccttcaacaaaaagagcgcgcgtcctgagcgttaccttccagaaccgcaataccattgtcgcgggttatgctgatagttctatccgtctctttgacattcgcacgggtaagatgctgcggacaatctccctgggcaaaggccccacgggtggcccgaaggaattgttggtttggtcggtcaaatgtctgccggatggcaccatcgtgtccggtgactcggctggtgaaattcggttctgggatgcaaagaactattctctcttccagcggatacagggccatcttgccgatacgcttgatatcgcagtgagtgccaatggagacactgttgtcagcggcggtgccgaccagcgaacggtcgtctaccgcaagaaggagggcgagaagggcgataagaaaggtcgctgggctgagattatgcaccgtcgctaccacacccatgacgttaaggcatttgctgtctatgaaacaaaggatatcagtatcgctgtgtctggaggtatgttgaccttggtccactatgaatttgagaggttcaagcaatgctaacttgtttcgtttaaaggtcccgatgcaacaccaatcattctccctcttcgtgaattcggaaaggaacaccaccgcaagctttcgagtctcccgcaaattcctcagctcacctccgcgccgtcagctcgtttgattatgagtttctgggatagagaagtgagcttgtggcgtgtgtctcgaggccctacgtccttgcatgagaacattgatggtcaacggcataggctcgttggtaaggttctgatacagggcgaggaaaacatctcctcggcgatgctgtcctcggatggcaagacgctcgctgttgcaaccattgccgaggttaaactgttttccctccgtcggagaaagggcgacgagaagggtgctctgcgcatccagaagatcgatgtacccaaggtactttccgatgaaggtgctcgccttgtgaccatttcccccgacggccgatggctttcaatcgttcgccccaacagcgacatctacatggcacggatccagcaaacctccgcatctaatgagaagccccaggtgatgccacagttcgcaaagctcaagagagctgcacgtcatgtacgacacgaaaaggcatcccacggaacattgggcgattacgagagaacgatacgatctgtggtgttttcagacgacagcaaggttctggcgagtggtgatatctctggttgtgtcgatacctgggtactaggcacagcgaccgcacccacgaacggtaccgtcaaacgtagcggggcttcggagtcggacgatgattcatctgatgatgaagacgacgacgacgttgtgattgagggcgagcgctggactaccgctgccactgaatcaccaatccctcgcatgaattccagcataactttgttgtccttccgtcctaagtccgcccccacacaaaagcttctcgccaatggcacgcatcagtctggcgaagatcggctgatggtcctcacaagtgagcaccagctcatcgaatttgatgctcgggatggcaaattgtccgactggtctagacgcaatcccaaggcatacctccccgcagagttccgaggcgttaaggaccgagctatgggctgcatgtgggatctctttgagggccgtgagcgcctctggctctatggagcatcatggctgtggatgtttgatctgctccaagacttcccctcccccgacgaggctgctaagaccgaagagggcaagaccgcaggtcagcttgtcaaggcgtcgaagcgcaagcgcgaagccctcgacgatgacgaggaagagcggaggaaacacaacaccggtgccggtgatcgtattcctcagacacagatggatgtccactttggcaccaaggtccgcaagatcgtcggcagcgatgaatcgcagggagaatggatcaccctggacaaggaacgtccccgcgtgccaggcgaagatgatgaggcctacgagtacgacgagacctttgcagccaccaatgagacaaccctcgccagtttaagacgtggagatgggactgcgatcgaaaccggaactccacaaaagggatcacagaagcacactggcgagaccaagaagcagctggtagaggccaatggtgcctcagctcagcctgcacgtcggtggtggcacacctataagtaccgtgatatcctcggcatcgtacctctcaacaccttgtcggatgacgattccgacgaccagagaccgagtggaactttggaagtcgcagtggtagagcgacctatgtgggacgttgaactgcctggccgctacgtcaaggactacgagtgaagcagagagatgtgaaagggctttctgtaaaaaaaatagaatgcagctgattcagatatgtaatttggtttgagcatacttggggagcgcatgttaccggcgccttatgtacagggattctgaattgatgattaccccaaaaacaatttgcctataactagtggacttgtatattccctgtaatgggatctaaatatctcaagtgaagtacaaaagtcacaaaggaacagaccaacgacgatccagaaccagtgcggggcctttaggcagagtgactttaacctccgaggtcaggctcaactctcacttgacctttaaaacttctgtacaccctgagccagctgatctttctgaaaagcctttgatccgctgccctacttgtctccgtgaatcccgaatctcatcccgatccgcttatcggcttatcgtctacacgtcagctccaaggctgtgaagtccgacgacacatcctcctccttccatagcccgtctgcaagggccagggatacttctatcatatatcgagaaaccctacatttgccagaacataaacgctcgaaagattcattaaggaggtcaacagcaggactgcagcataggtccttccaagtcgaagtcagggcggggccaactactgcatacattcgaagaaagcaggcaatcacgccaccccttttcaataaacggacttcctctatattcaagtgttctctgctgcttcgaactcacctctcaggccctcgactccgatctccgatccctacagaaacgcatcccacgcctgtccggcaataaccgcataactacagccatgggtctctcatacaacgtctacttgactgccaataaaatctttggatgtaagggatgcaagactcatcttgcagatttcaatgatattatgagtcgggtatgagaattcctcgaatcctatacacttccctactatgaataacctgttactaacccatgcctttcgactccctagaactttcgaggccagcacggaaaagcatacctcttcaataaagtcgtcaacgtcacacaaggcgaacctgtagagcgcaacatgacgacaggtcgacatctcgtgcgcgacatcgcctgcagacagtgcaaggaaacggtaggctggaagtacgacaaggcatacgagagcagcgagaaatacaaggagggcaagttcattctcgaggaggagctattctgtgtcgtctgttgatgggtgtgagactttccacctatcttcatgtgtgtcgaccttgatcttcgattcctgcacctgacaggccggctggtggttttatgataagaatgggattgcattctgtgagcatttcttgtatttttgttctttgaagactgattcttgcgacttgttttggtctatctttctcagctttggtgtttccgaaaggcgttgcgaggagtatttgcttttcttcattcggtttctttgggcccgatgaaattggaactagctgcacacttgcagagcaggacttgcatgtcacgtcggcctttctgatacgtcctttgaatacagtttgacggtttatctctctcccgcgtagcatcaaccatctttcggagtatatagtctgcttggaatggtagctataattccgttgtatccacaaatccgtacaacatactcctatgagaagaggagccagctccatctatatcccattttggcattttcagtggagatcaaccactgtagtgtatcagccccaccaggtgattcgcacagaagcccgaaactggagaaattagtccatagatttctttttaactcattcggatccgtctgcaatctgatcgttcgatgttgaagaaatttgacttggaaaatatccactattattacagctgactgtgaattccgccaccaaattccaaagtaggttgctgctctcatacttcgatcctctgtgaaagattgagatctgactattgttagaatgactcctgctccctcggattctggtatgatgcaggcggtcgtgtttcacgggccctacaaggtcgccgttgagcagaggcctattcccaaggttcaggacccggaggatgttatagtcaaggttggatatactgcgctttgtggaaggtgggattgatctatacttttcttgcgaaaaggcccatgctaattttcgtaatattctacagtgagctgcacatgttccgtggcgtggagcctgcaggaaaagatttcataatgggacatgaatttgtcggtaccattgtggaaatgggcagcgctgtcaagactctacagaagggtgaccgggttgtgactgcattcactacttcctggtaggttgtatgctcattatatgctggttctatattgcaattgtacgaatgttgcgctgacaccatgatagtggcgaatgcttctactgcaagcaagggtggtcttctcgctgtgataagaacggtctttttggatgtgacagcttggacggtggacaggccgaatacgtgagtttctaagcatgttatagctttgctctatatgctgatattaacaggcccgcatcccgaatgcggaaggttccgtcatgaaggcccccgagggcgttgacgagaaatatctggtgctcatgggagatattttccccacgggctggtttgcagcaaacaatgcattcaagaactcaaccccgcagcaaattgctgaacagacagtagtcctaattggatgtgggcctgtcggtctctgtgcgctcatcaatgctctggagtacaagcccaagcatattctggcggttgactcggttccgtcgagactggagcttgccaagtcgcttggtgccgagccgtggaacttccagctggaccgggctggtctagacaagcgtgttcaggagttgacaaatggacgtggtgccgatgccgtcattgaagtcgtcgggttgagccctgcattgcgcactggctttgaactgttgcggccttggggaactattagtagtgtgggtgtccacaatggagaggtaagtaggtctgtattggttctagtgttattgctaatgaacgcagatcccgtgggacggcaatgatgcctattccaagaacctcactgtccagatggggcgatgccctgttcggtctgttgctcctcgggctcttgaggtgctcaagaggaaccaacataagcttgggtgagtccatggtatagttatatgactgatatattggtgctgacaaagaacttttagcttcatgacagataagatcatgccgctctcgcaggcagtggagggctataagctatttgaagcgcaccaggtgcagaaagtgatattccaggctgataagtagagaagatgtagacagaaccaggtaatatagaatagaaagaagagtagaatatagaaagatgaagctgaagtcccccaaaaaaaaaaaggcagattttcatactcgggttctctccgcttaaagcaaaacaccaccactccaacttcttcaactctttcacatctccatcttcctcaccttcgtcccttttcttcttcctctcctcttctccttctcctcttctccctttctcccatcgactgcttttcctgttcaccttcttctccccctctcttgatccgagattctgccgctttcccctcccatccatttctccacttcctatctccctcttctgtgagtcctcactctttctagcagttggatcctattcacggactccctcacctgagaatttgcgcatagctacatatggcatgcgcacttctctttgtctcaattaccaaactgactttgccactatttgggtgtgaagtctctaccgtcccgcgaccgtacggtcttcaagaaaccttctatcccgccattcacttgaccttttcaaatcgctcaatcgctcctcctacctccatcgattatcgataaaaatggattccactgagattcaccaaactactgtcgtggacgagcccatgaccgataacttcaacgacaacctcgctgagcagggtgacctagaggcccccctcaagaccgaggaggagtatgctatcgctgagctgactctgcgtgctattgtctcctccaaggaggccggtgttatcatcggcaaggctggtaagaacgttgccgacctccgcgatgagactggtgtcaaagccggtgtgagcaaggtagttcccggtgtccatgaccgtgtcctgaccattactggtcaattgcgctcgcttgctcgcgcctatgcgatcgtggccaagggtcttttggagggtgccccgcagatgggcatgggtggtattgtctctaacaatgggacccaccgtaagtgatatcttttttttattgcccctcaatattttggacttggactggttatgctgttcggggaattaaagcaacccatacagagagtctggaaatccccattttgatctgagcttgttctaactctctccagccgttcgccttctaatctcccacaaccaaatgggtaccatcattggacgacagggcctgaagatcaagcacattcaggatgcatcgggtgttcgtatggtcgcgcaaaaggaaatgcttccccaatccacagagcgcattgtcgaggtccagggtacccccgagggcatcgagaaggctatctgggaaatcggcaaatgtctgcttgacgactggcagcgtggcaccggcactgttctctacaaccccgccgtgcgtgcttccctcagcgcctcgcagccactcaacaacaacccccctgctggaaatggctaccagggcaacaacaacaacagccgccagtacaaccgcaccggcaacggcgccgacttcagcgatggtggctataaccgccgatccaactcggatgctggaaaccgcggctaccccctagttacggaagatggcgaagagatccagacccagaacatcagcattcccgcggacatggttggatgcatcatcggccggggcggaaccaagatcacagagattcgccgaagctctggcgctcggatttcgatcgccaaggctcctcatgacgagaccggcgagcgcatgttcaccatcatgggaagtgctcaggccaatgaaaaggccctataccttctatacgagaacctggaagccgagaagactcgccgcagccagcttccccaggagtaaatcctgcgggatcatctctggtgttttgtgtgcggatgagacggtcctagcaggactcctttgtgttctctgaccttacgacttccttgaagacttgtcggtcacgatcagcggcggtcatgtgctagcgcttcttttatttcttttttattttctatttcattccaattgcttttctctgttgatcttcttcctcggctatcttttgaggttctagcctcgtcacacgtcgctttattcacaaaaaagacaaaagttcactgcgatggatggagggaatacatgcgtattagataccaagtttgtgtggtctttatcgaccattgtgcgttgaattgcatcgcgacccggctgtctctcgatcctatctctcaactttgtcaattacaacagcctcacacctccattccctccctcgcttcccccattcagctgaactgtcaccgcgatgtccctaatctctctttacaccttaccccgactcctgaaccacagacctctccgccactatcccggtccctacctccaccttgtccttctcatcgttccgccttgtacgtcgccaattcgctggcggggtatattgatccttgtctttcctctactcttatctcctcgacttctgtaccctgttctcgttcccttcctatccctgacttactgcaatgctaccaccttttaccaaccctcgaaaacgaaacctctaaataataaaaaaacgctcctcgtctcctaattacccttctttcatgtgcctcctcgctgcgtaccaccttggctcaagtatgaatatatggtgttgaatgtcaataggacattgccattatctgaatctcaagaaatatccagaaagacacctatatcctcctacattgtattatatttagaaagcaatagaattaatcaaaaagctcttgaatatcatttcattccattcaatcgttatgtaaatgttcgttgcgactcaggacaacaaaagaaacaagagaaaagacctgcgggcaacagacttagatacaaaaacgtgcccgcaagaaatgagagacgtgacaaaagaataaacagggaaaagaaaaagaaaaacaaggaacggtaaaccctagcgtgggatacacacatggaacagtgtgccacccggtagagtattatggacaagagacgccgccaatggtaggtttgtacatgaaatggcaagccaccggtagacatgatgatagtccacggtggtgagatggtgtttttgctgtcaggggtatttcccgcagacaaagatcacacagagaaatgtggacatttaatagaatgtgtaatgtgctggcagcgtgatgggaaaatacagaggagattcgtgggaatgcatagcgaaattttgtgaaccgtgcataggagggaaaacttcgaactgccgtggctgctgagacatgcataacaggcaaagtccgttcaaaagatggaatgaatgccgatgtcgaagcatatgtccaaagaaactcgctgcgtaagtgacgtaaccggatattttgacggttggcatgcatgatagtggggttcagccagaggatatcagagatttggacgttaatcgatgctgtcatcgaggtttgcattattgggggtagccggagcacgatttcgaagaccgaatcttcgggcccccaagctgttcgttcgcagtcgtggtgtttggattggtgtgtagctggttgccactttgcttgatggggtcgaaatcctggtctgggagggttccatttggagtgatcgcggactctcttcggctgaagatccctggacgttattggaagagaagctgggcgttaggccgtaacggcgagacccagcctggatgttggagcgggatatcgcaggagtgtacgtagcagggttcatgtagcttcggcggaatgagaaactcgacgagagagtcggtgtccgaggctgggatgactgcacctgcggctgggggaggtgggatggttgttggtattggtgtgatggttggtattgtggggagcgaggggagtatccgaagccgttatgttcctgctgcgcaccggaaatggagcgggacacagtgtgaccttgggagaatcgttgccgaggagggggtatggcttgcgcaggaagcgatgtgcgtatttctgtattgactctggaactcgaacgactatgtgaacttccggtctctccgttctcctcgccaatggtcagcctgcggctgcggagggaacttggcatgcgattgagacgactggctgggctagacatgccgggagattgtgttggactctgcttgatatcgttcgtgtttccagggctggcattgaccacggatgatcgacgtgcttcaaggcgactggacatgcgattcgtactatggcgccgctcaactccttcaggctcttggttcccgtttcgctgatacgttggtatggacatacgagcatcggctcctgcaccattcgataattggggctgcacgactgtctctcggctcgaggacggtcgggcactctttaactgctcatccgtcaaggctaggcagagctcggtcaggctacgacatacactgtccgctttgcggcgggcatgtcgttcgggcgaggagtatcctccattcacaacagagacactgcctgacggagcggtattgacgcctaacgcggtggaaaggttcaaagcatcggttatcgtcgcttcgaggcaggtgtacacttcaccgctcaaaacagcttttgccttggccaatgcggattgcaggatcggatgcgccgggttatgttcaatatctgcagctgagatgctggttttgcggcgttgctttggtgaggaggataaggtggtaatggtagtgtttgcagtccgcggtctctcgttcgtaggggtgtacatcgccgccgaagatgatgcgggcagtttgcctgtcagttccagcttcttgatgcgatctttgagatcatccaattcgtcccagacggtcgatggggccgtgatagacaacgtcgactcgcttccatcagcgcgcgatcgttctgtatcggctcgcggtcgcccgatcacttcggagtttgaagtttgccggctgcttcggattgtagagagccccgaatggcgattgatgcgcggatcattgagagaggaccgacgctccagctcctcggcagcagacggtgtgcgcggtgaagtttctgggctcgtgcggctgaagcggctgcgcggaacaccgacggcggatcgcgcactggatagggtactgtatcggaagcgagcagggtcgtctagaggatgggcggatgacgctagagtatgggtggcgctgtagggagcagtaggggaatcattctggaaatgcaaggggttgtcgagattgctataccgctgatcgggtgagggggtttgttctgtcgttggcgaccgtagactttggctagaataacccagccgtgactattatgttctcgttagccatcgggcagtcgcaagaaggggtcacgcggatagcacaaaagcgattcggaatgcgatcggctcaagacctgtttccttctcacttacccgtctgaaatctgagcgtcctatggagtcgcgccgaccggaatcggttctcgcaatattcagaaacacatcctcgttctttgggcggccctcgtcccccgaggacttgtcctcggccccccgatgagtaccgttgagactgccattgtgagagcgattattctcatttagggttctggtcgctccagaataagccagacttgatggcattgctcttttcacatcagggcgatcttggtgtaattcgtcctgtctgcgcctctttgaagcatagggagattcagaagcttgggggctgggtgagctgaagcttaagacggatcgtcgggcgcggtgcaataaggagcgtttggtggttagatcgggcgtttcatcagtggggccatggaagcgagtgtgcaacgacaaagaacgcgagagaggaaaatgtcggggaggttgggagtgctggtcatggtcatggccagaacgctgattgacctggttgggtcgcaaatggtcacgggaacccgcagtcatcgtgtacctgtacggagtacggagtacaacatacagagtacgatgaagtactgagtaccgtttgaggtgttcctacctcgcctgacaattctggggaaagctgggatggtatagttctgatggattggaaatatgcacaagccctagtcactgcagaatgtcagtaaggacttgaggacttgacctgtcagaaaatattgcgggtatatacttagtagtgtgggaaaatttcaatattgacaagctttttatttctattgattgggtttaaaacttggggtatccttttgacttgtgcatatgaaagttgatagaatttgacgtgaatgacctctatagacggggtatggacgatgctacctatatctatgtaacgatgtagatgctgtagtcgaatggcctacctcaaacccaaacatcaggaagaaggaaccgaacaaccagaacggaaaaaagaacggaaaagaaaaaatcaaaacaaacagggcaggaaccatggttcctctcagtcaggatccatggttactttgaaaccacccaaattgaattcgactgacaggttttaaaacgaaccaggtacgattcgatgtagttcactctatagaccctcgaggatgctagccaatggtctgtctaggccttcattggactatatctacaatataggcatgcccggatgtgctgcttcaattccaagatgcacaaatgtaaagtgggcagcttgggttaggaaaagtacttggcgcaagttgttttgctgttaattaacctgcttaatgctcaattaagtaatgaagtagtgtggcactgcctcaaccgtggaaggctagttagttatagctgcttttcttgagaaactgggctactagttaactacttaaatagagaaaataagcaaggctatgccaataaaggggtttattcagtgatctatatccttgcacggagtatacctgatctcgctactatcatttaatctggaatcctacggaacgcttggtcgaatgagatccatgtagcaatataagccgaatccttcgacgtctgggcactgccactcagcttagcctactatcgcgtgacaaatccattgtcgtgcatattgtggcaaacctcaacgttcaatacagagtagaccaatccggtattttgtttatattaatcattcaaccgaaatctatttgtggaataatccggagaactcgatatattgcaacggctagccgtaaccatatgttgcagtgctatttgcaatctgtaccccgtacctgtgtcagtaataagacaagaccaagagttcactagtagtcgaattgaacaagctgttctctactccgtactctatgcgacaaaccaatgtgtcaagtccgaaacacaaaagcatacgttataaacagctcatgtgcgattcaggacgtttatttttagaagccagtgaaacacgctcccttaggatcactacaccaaaaggggctcatctatctggaactcttctggcccaaaccagatgttttatagaatgatgtatgggaatatcttctccagactcggtatatcgccaaccgaagatccagtttcaggatcgttacgagaacccacgtggaaaaggccgatcattcgtcattcgaaaccaagtgggcctcaagcttcaataactctcctcagcctccatgggaataaacctggatgatgtaatgtagaatgtatattccgtgaaatcaaattccaaccgaattgactctgtttatatatatatatatatatatatatattctacgtacttcatagactatctagagacaagtaactgccaagacctgctagtcacccactagtgtcagtttggcgtgtttcagacagcgccaaaccagatccatggggtttcaggttgtgccttgtcctctcgatctccaccaatcagatccccctcagttcctatttagggactgccaatggtatgcccacaccatccatgggtcagccagcccaccgttcagccagaccgtgtgaatgattgaatgcaggtggacttgatagcgaactcatacgactgagaaactacatatagtcgaaccgataatagtggggtgatcgaggggaatttggaattcaccaaatcaactccctttcgggtcactacgcaccagcacatctccaccatatcccgtctcaatgtctcccccttgtcatctcggtcctgagccgtttggtaccatgtgtaacagatagtgagagcacgggaattgtcaatcttatccaactttaacagaacatactcggacgtatgtgggtattacatgtattttcctggaggttccaaaggccgaaagactattatctcacctgtaacatcatcgataatatacactaaggcaggtgatggcacacctgtagcctctcatcgtcggcggtttgacgcctgaacattccagggcggctaaatatagagcacggcgcagtgattggtgttgctctctccaactctctggatcccctctttttcgtgtattgtatgttacaggtgaaaatcgatctctaaataaaaccacaaagggtccaaaacccgtatactctcatttttctttctttcctttttctctttctacatcgattctgctttctctttcatcctctctccagttccctggaggaacccgcttggattctacattcatcgcctatattgtgatacattcgattacttctttgatctgagtcttggatctttcattccttcatcttccttggaaaatacacatacccttgtgatctggtatgtggatggccttcctatccaacctcttcattatactcgatctcgtgtggatgcctttccccttgtgatttgcatgatcggatcattagtcgcaaaacccttgcatttcagctgccctagattgaagctaaacgcccattcctcccccatagagatcccatttgcgcaggaagcaagtgcatcttcgataccccgaatgccaatctagcctcttctgagagccggattgaaaaaaaaaagaaacttttcctttcatactaccactcggacaatgccagtacaaactagccagtcctttccggacgcatttccttcttttatgtcggtgtttggtggtccccttccgcgatacaaagaagaagcaaacactatccaccctctacaatacccaacccatgtccctgtcaatacacgtctacttccttccccccaccgcgaaagtgtttcatctgtgacctcggcatctacggagtcctccccgaccaccaccatctcgccctttgattcgcccggcgggggtgacgtctctccgagctcgtccccggaatctccgtctgcgatgtccgtcgcatacccaaagttcatgccttcctcacggcccgtggaacttgcgtcgcgccttgcgcctgtttgcgaaccgcgcctgtcgccaccgaactctcataatacgcgccccgactccccaaatcggcgggcgcgcaatctcaagaacctgtcattgcgaatgccacctccatctcaggctcccccacctatcgctacttcgtcggtggtggagaccacggcaaaacaccattttgatgccccgctctctcccatcatcccgatcccttccaataacaagagcgcgaggcgacgcgccgccaatcttaccatccagacccccactttcaataaacccttatccggtatcgccaccgatgccgtgcccccaactccatccctacgtcatgcagaatcctcaccttcgcttgcatcgattacatcgccttcgttcgcaccccggggaggtatgaagcttccccggttaatgtcacatggtgcgcgccggttttctagtgaccctcccgatgatgctacgtcccctgtcaccctgaagccgattgatggatctggcttctcgcatcgagttcttgatggcctggaagaggaggatgaccacctcgactcgcgcgagtcgacccgcaagaaggatcgtggctacccggatgggcctatccggatccacgactctggcgtctacctgtatcttgaaccgacagcagaagaagcggccaaattcgatgtcgtgatcaacgtcgccaaagaagtggcgaacccgttcaatactagcaaggatgagcggagtgatacagtgatgagcgcatggcgaaacacctccatgtcctcgaaacgcttctcctgcagcgagccccagaccgcgatttcagaaatgtccttcaagtctgcctgggaattccagcccttggattccgagacggcaatccctactatttccacccctgcaaattccgtaccggagtacctccatgtcggttgggaccacaactccgaaattcttgaagacctcctcccgctctgtgagctgattgacgaccggatcgcggacggaaagaaagttctcgtgcattgccagctcggcgctagccgctcggcatcgctagtgattgcctacggattgtataaaaaccgacacttggatttcaactcgatgtacgaagcagtcaagggacgcagcaagtgggttggcccgaacatgagtctcatctaccagctcacagacttccgctctaaattgttgcggggatctacctctaagcccccgccccaggaatggttcgtccaaaccggccgacgaagctcagagcctcaggttgcacgagctgagcgctcagcgtccaatgaatcaaggccacccttccgtgggctgtcacagacaccttcagtcagttgcctctcaattccagaaacgagatcgatgcgtcccaatacaagcgacgacggtacctacacaaagttcaaatcctactctcccaagcggagtctgtccccccgacccctcccattccgacagaagttccagtccgtgggacctgcatttggccggcgagggttaccgcgtagcgtcagcagctgtgacccgctcgttcagagccatgtgtttctacgcgatgcgccagactccagcgatgatttgttttcgccgaggacaagcgcattcctctcgccaactcctttagcaccaccatcatttcaccggattgatcgctcaccttccatcccttacgccatagggtttgccaccgaaccggcagaccctcgctcgcctccatctagcggcgagcccctgatcatgagatctattgatgaattcttgtgatctccgcctttgtcctttgatacaggcctgaaacgattccacgacccgacatattttccatgtctctttcctgattgaagaccatctgaccaacccggggtcccgggtcgatgcaacccttctattctcttattaatttcttccactcatctaaatcagatgactggcttgatgatattcatgaccaaagcaggctttgctgtcgctcatcgccatttttcccaacttgcatacttactgcatatttctttttgtcatttggacctacgggtcttttcaacgccattactggtcatcatcgctcgaacttattctttcttttaccactggcgtcttgggtgtccaaaacggacaaatatgataccaaggccaggttctgaaaggttgaaacagacctgtctgcttcctttcggcctggtacctgtaatattatcggagggtcctatctctttggggtttctcttacctcccttggctttcgtctcactttcgcttgattgtctcgtgtcactctcctgtttttccatcttgtcaggcaagggatttgcttctgcacctttagtgtcagcattcgtgctgaagcttcgacccttgaaactcacggtatgctgggattatgggtgaaatatggcgtgataaataccccacttgcacattctcacaatagagatcgacgttaagcttgaattatttctcgtaaagctgtaaacatggaatccagtctagttagtttgtggctggctgttatattagaacggagatagcgataagctccgagaacctctccagagctccatcccaaattttccttgcgcattcctctccacgctcgcgacaatggctggagaatcccatccggcatacctctcacccagcgagctaggcacaaaagactagtatgtgtccttttcagccacacttccttcctttgctggacgggactccatgaaccccgctctacccctccacgaaagctgtatacatcaattgagccaccaattgatctaaagactgcatctgctatctaaaccaattctcaatcccaaactaacaaccccaacctagctgggaatcctactacgcccgcaccctagcgcacatctcacacgaagctccaaagaacaaccccaatgccaatgccaacccagaccaaaatgacgacgatgccgcatccaccacctccgacctaaacgaagaagacgaccccggcacatcctggttctccgaacacaacgccccgcaaaaagttctccgcttcctcacgcgcaagtccttccccctatcgccgcgcaatacagcgcacaagaaaggcgcccgccagccaagcgttctggatctgggcacggggaatgggagtatgcttgcgctgcttaggaagaggggtgggtatattgggcgtcttgttggcgttgattactcgcgccagagtgttgagcttgcgagggagttgcagcgtgtgagagggcattcggcttatcggagtgactctgaggatgaggatgaatctgaatctgatgatgaagaggaagaagaagcagaggctgaggctgaggaagatactggatctaaggacttgccgggacaagatacatccatccagttcgaggaatgggatatcctcggctcgaaggctgttctttctgagacgggtctcgaggtatcaccctcgtcctcgtctccctcggaggaaacacttccctggtttccatacgatcaaggcggctttgatatcgttctcgataaggggacgttcgatgctgtttcgcttgctgatgatgcgaagactacccgtgtctgtgagaggtaccctgatatcgcgcggcacttagtgcggcgcggtgggttcttgattgttactacctgcaactggactgaggaagagctggtgcactggttcactggtgagcggacgagtggggatcggttggtggtttggggccgtgttgagtatcctcggttccggtttggaggacatgagggccagggggtttgtacggtgtgtttccagaggcttggggacgcttgatatttgagcagacctgcggattaccatgcgaactataccctaagcagaaaaaaggtggagtgcagatagctagtatagcgatatgctgaatatagtactgaaacatttcaatcattcactatagactattgtatactcatctattctgagttcgtagtatcatcatgcaaggggagagatatcgctcaaaatgcacccaagaccatcatcagaaccaaaccaacgactctactcccctctcctcttgagaacagcaataacacaccacctcctctgattctccgtgccctccccttccctaatcggagcccactccctgcgaatctcaccgtcatcctccgaccttgcaatcaaatccctctcatagatcctctcaatcacaaagccattctcaagcgccgtctcaaagaacccggcaacaatcgcccgaccagtatggaacccagaaacgacccacaccttcccaccgggcgaaaggaaccactgcatcgtgcgcacaaggttctcatgctgcgcgcgcatccagtaacaatccgccgccacgattcgcgtaaaggcacctttgttcgccgtcgagaaggagtcatccaacaaaccccattggtgcgggtacactgatactgctttcacgaccgtaggcgagcgtctggccaggttgtactcaacattgaaagcgattgcgccgctgagcgcaggcgaggaggggtggtcggttgccacgaccctcgaggcgttggctagggcacagacgacggatgggagggcggcgcctgtaagtaatatgaatgcgttagtttggtttgggttagggggttgaagaggatgtatagcatcaacggccagtggccacttaccagcgcctagttccagcacactctcccccttgatcctccacaactcccggttctctctctgggcttctgtctcggtctcgcctggtgcggtgggtgtgtctgcttcctccacggccccggccacgaccattgctgcgctccagaggaaatgcgcgaagagcctgcgtccttcgtcgacttggttcacggagctgtctgcctcgggccgttgctggcttgagcttgggtagctggggaccatgatgttgaggtcgccataccgcggggagctgtagaggaggtgttggcctgggtcgccgtggaaggaaggtgcgtcgtctggaaagagatgggggaggaatgtaccgaagagatcttcgggtgattcgtcaaattcgcagtcggcgtcctcgttttggaattctggtgccggggcactggttgtgggtgtgctaggatgatgatggcgggggaggggccgtaaacgggaatgaagcattgttgtggtttgtgagggattttcgatttattgtttagtgaaattgagtggtctggtatgcaccgaggagaaccaagatttgtctggttgaaaaagtcaattgacctattatcagaggccgttgtgatccattccgagggatgcccaatctttaatttcttatctattgttgcgataagggcttgacgaaggtgtttgcattgtttgacggattagcctttcagccctggaggtccgaccacgtcatgccaacactggcgagtattatggagcatacggagtacaccttgtgagggtcacgggttgaaaggttgtctagttaaacccattgagaacaattcccacagctatagtagctcccgatagctctaataattagatcgacaccgacccaacttcctaacccaataatacggacaagaagaatgtcccgagtgtctcagccgcaggttaagaatggcgggccaggcaccttgggaatgtgccagaaacaggaaagatcaaggggcttcctactcctaagggcgccaaaaataatcccaagtgctcgtgcgcaagaaggcgtgacggtcggagtaatgatcctctcctgtaggcgttagcgcgcgagatggcgcgacctgatcgtagcaatgtggtgacctgagcgattacctaactgacacatgtcttccggggcccgggtgcctctagtgccggcttagtgataagccacgattcatctttgccacaaagatatttttaagtcgcacatgtactccatagttacagggcaacgacctagataggtatatgaattaagtgtatcggggtgtcgttaactacgccgtaattagttagcgaggtcgtagttaactaccttagttaatatctatcaggtgatgcgactgactaaggcctcatgacatcattgggcccaccccatccactcttccaagtactagaccggtcgatgctatgcaggtgatcgatacatggcaaaccggtcgtttccaagtcactgcactgcttgcggccatctcctatcaatacacattcgtcattgcccgggcgggaacccagtgacctgattggtacttgaatcaggagtccaactgtgccatcttgtgaccctagttgatcgtcaggcaactggcttttttttttttatatgtgttctttctattcggctatgtggcatacctccatatattaaagtactccgtatataatcttggaatagaattggaatgattttatatccaaagcctagacccatggcactatccttcagaaccagggcgcagacccttcccctgtacggaacgctatccgagcagggcccgatgttcaaagattacatatttcatattacatatttaacaagattatgcccaacatttgccatctcgaattcaccgggttgatactacaacgtacgtactctgaacatgtctttattcggataggtggatccactatgctatcgccatcacaggcattgcgaacacgcacagagacaacacacaatatagggcatatttaggggcatataatagactaataccacattatcgacaataatatagccctcccgtatagatatcttcgaatatattagcaataaaatacccaaactcgtatgtgtgaccggtgatcgctgcccccccgcatgctcaaagggaaaggcccccgcaaacctgagcgattttggctcataccggccctgactctttctctccttctttctcctcttttttttttcccttccacctttctttttttggatcacctcaccttttttctttattcgctctcattctctctcttcatatcatcttattctcgcattcattgctctcctctacctatacatcttcgacccggaattcggccccatttcaccctcacggaattgagggcagctcgtgttcaggaggattgtcaattccattggaagcttcctctcatttcttaccatggcctcgttcaaggtatgtatccagcatttctgccgcacatcttttttttaaagggggggccatactaatgtaccggcttctttttggccctgcacaggaattatccatgtcgcgtcctctccccaataccagccagcggcatcacacgcattccatctcgctcggtgctctcaatccaaaccaccgtgtaactcgccgaaagagcgttaccaccgctgccgccaatgctgccgcagtcgctgcctccatggagggcggggaggctacctcgctccccatgggtgcgcaccgccgcgccctaggaggccgcaagggactggagtccggttccatcggaaacgtatctggcttcagctcctacctctcccgcagcatcaacagctccaagcaggaatcatcggtcgcccgcaaaagttctccgggatcagacaactccgatggcaagcccgatgaccggaaccgccgagccagcgagggtgcccaactcaagaccgaagggaagcgtgcttcgacggccatacgttgcgatcgctgcgggaaagggtataagcatggcagctgcttgtccaagcatatgtgtgtatcccccctaccgctcggccgtcttcttctagctcgatcgggaatatgcaccatgtcggctctgtgcaggtcgccctcgtggttattcaacttcccttcatcactgcccccccttttttttcccatccctttcagcaacatttaattgaccaatttttttttttcgtggtatcttaggtgggaacacgacccagcatggtccgttacttcgaagcttctcatctccaagcatcagcaggttcaactgctggaggccgcctccgttttggtcaccatgaaccacgatgatccacccgatgagtccgccgagttggagtcggaattgtcgtctggatcgccgggcgccctgtcagaaatgcaggatggaatcagttcggctgagaccaccccacccccaatggactcggaggaagatgacgatttcgagatgtcgggtgtgccggcacagtggaccaaacgccccagcatcagcaacgcatccggtttctctcgttcctaccagtccattccgtccagctcgtacaacgagagtgctccgctgcactcgcctaccttctcccacttccgccactcgagcatcgacacccgtccctcaactgcggacacacggttacacgaggatgacgaggcggatcttgccgcggccatcggcctgtgcaatttcggcactcctcgcacggggcctctttccatgacccgcgacgtgccaccagtgcccccattgccggcgcgttacttggactcaagcagccacccgagcaaccagggtctctactcccctcaattgcgccctacagaagaggccgctcgccgagactccgaggccaacatcttcttctcccggtcgctcaacccgtcgctgtcgtacaaggtgtcggatgagcgtgaggtccggactactggtggtgatgaggaccaacaatcccgtcaacgtcgcaacgccgatgtggactttggtaaccgctccgcgccggccgacgatgacgatggcggtgtctttggccacatggaagagtaaatcccccagtactctccgcgccttcgcgtgggtcaaatcggcgtatgccgaacgatgaccccttcacgatctcatgtacgagcttgagcgaattttttgaaccttcttgtttacatgtttccaacctctccggatggagaatagagccgatgtccaataatcggtcagagctcttttctcaacggggtgtttcacaattctcgggaccttttttcaccaccttttgagatcccatgtatcaatcatgtctccttggtccgctttgttttctttatgttttgtcttgccacggcttattctggagacccctttaaacggcatactccgcatggccggcgcagattaccatccccatcaaatatttatatccatagggacgtgacataccactttcatgccctctatgcttctcgtttgtcttttcccctgttctgtttctctcacctcgcacatatataccaaacccacaaattctacgatccgctcccctacttttcccacatgtgcatctcgtccgttcttttctctctccgtctccttgcccatcctcttctatctctcgcctatggtctctgactcttgtgtacccaattgaccctcggacggggcatacaatgaatatatttcatgaacgtatactattctataatgtagatctacctgtcatttccgcatctgtccctgtgcctgtacatcataagcggggaatcaaaagacccactaaagggtacagttccatatttttgtcgaatctattttcgtcataggggaagacgtcgagtgcattcgagaacagaaagaaagaataccccctatagagtagttatttttgatcaaatacacagactaggccgtggggattacgcgagcttcgtggaattagcatgattgcaggtcgtgtgaccccaggatttatcactctctgaagagcagttacctcgctagcttccaatcccctaacactcatttctttagtcaagaccctccgcggccgacatgctcctgcatagcatcgtccttgttgccatttttaacgtgcccccatccgaaaatgttcgattttatcgccgcagtggacgtcgtttctcgacagaatctcgcgccaatatcgccacctacgactatcagattaggtttcctcatacgatgcagctaggattggtatagtcgcaatgcctcagaatttaggcataatgctcatatgagagttcgctttgaaagatagcatcgattctagtgatcagtacagataccctctctaagaacagtctatctattgcatacagatctattggcttggacactttgggaatttacgagagcgcagaacttcttcgacaactcccccatgtgaccgaagatgtggacattcgctcaaatagtaccacttaagcccatgtataggatggtattttctgtcgctagattcgggtgaaccaagtctgctaccgccagatccttgtgagcatcaatcagagatgatgagttacaaacaatcagaagccagtcattgacaggacctttgagtggcttccataagctgccggcaacgacaatgagcgctggaatcatcgaatacaaaaggtgtaggagtatcttacttgatccactggaagctaatctagactagatctgcctctttcccatctggccccgtatctcatctatcgttccttcacggcttgtgtctaggtttaggtttgagagactgcgctgagcgacaacacacatagcggtgcaatcttacctacatgagccactgtggctggctgatcatgctcatttccatctgatattggatatacagggtgcggttctcgtatctagaaaagcttgttagaaaccgaggtaggggagaaattgtacaccgtgacgaaaaacttccacccgactggcacggagatgggcactctctccgtcaaacgaaggtactttgtgacctcttctacccgagaaaatcgctgtactggagaaccgtgttgaatagtaaagccattgcgctcgagctgaaactggtcttcctgtcccctaatttcctcgccaggaataccgtcaattgtctgatgagtcatgttggtctgaaggcagccattgtgggtgggaatttgaatgaatagggccgctgttgccggtacaatctgtccggctttaggaagaacaggctgggatgaactgtcgaaaaaagattcatccatcggcatgatcattctttgcttatttgattcagtcgtagtgtgaatcgagagcaaggaaagcttcaaatctgatgtatcaacaagctcttttgctgaacctgagccattccaggctaccggcagattctctgcttatagcgcgacctgtacgctgtcggttcccgactcgcaggaagtcgatgcaagaatccctgtcccatcatcatcattacgtggctccacaaaagcccctgctttctctacaataacaccgttcattacgggatcactcaaacttttccgcttggtcatatctatcatctactggatgtgggcagggcaggggactcagccatctacgggtgtataacaagcttgagataaacctcttgcttcgtcgcaagttcaagccacatgtgtgtgatagtgattgtatatgcatggatatcaccccaaataagcgcccaggacgccacggctcaaaattcagtttgattgtcgtccaccaaatcagcctagtatacttactacatgctgtgattggttattctactgccactagatgtgcctctcaccctattatgcggatactaacatctcgacacacgtagctgtctataattggccatatcatcaccccaacaaatcaagtgccgaacaaaggatgtgattgatggccaacggcgtttaaaattgcagggtctgattggtgatagtccccacatcattccatctattccggggggaatggtacttttcgagagttttgtttggcccctgaccacgtatttattcgagtgtttctcctcaaaaaaaactcttcgacaagttctgtgaaatcccctattgaacaatcaaggacgacacatatcaaacggtatgtacgtttggcatcaactcatagacaaccctatctctaacatgagtgttgtagatttatcaacatgagctctctccaatgccatcttgacattaccaatgagcctggctcagaagatgagacaggcgaatctgtcacttccgaaggccaggttgagcaggaagccactcatttgcgaccctggaatggcttctggccacgccctcttaccgttctgaagccgggcggcatcatcccgattcagggcaactaaagagagtggttttagagtttaagggatgcgaaacacctctgagcagcggcagtaatctggagattttgtcgttggcgctatcagatcagtcattacagaatgagatgtttatccttgtcaatgatgcatgcattgtattccaatcgaagtgcatcctataaaagccaatgactcttcaatatgatttgcctcgaatttcatgaaaacattctccgacctgtttgacttcacaaggtctgcccaagggaatcaagtcatgagtaagacgaatctggaaagccccatttgccatcgcgggtcagcgtcttccccatgttgcggttgcataaatgtcaaccaacacgagcctctggcgttgttgtatcggaggtacgttggaacgtagtcaaaggccccattcaaatcatcatctggttggaatatattgtcgacatgtagccaggcctgaacttggtctaacagtggcactcaaccgaaaaaacagtggcaagggagggaatagtggctggtgggtcgaactatgctccatgaattagttcaaagccctatgattctatggtatcatagacagacctccaactctagcagtgcgaggaagttgttgtttagttgaaaggtgtgatcctcaaacactgggacaggtgccatggcggaagtgccttactataaagttactagttaatgactgtaatgtcgtctattgcaaataattcttcttgatctgttctaatggaatattccaaggtcaaaggaagtcagttctccgggttacgggctggcccgtatctcccccactacactacgcatgactgggcatccacgtggttggtataagcctttgcttttactaggcccactataactattagcagacctaatcgcctcattttattttttgggggtatcttagaccctaatatcgggctacagccattcacatataagacggttgcgtgcgttaggtgtgtccttgagcaatgagtataagttgttgaaccagttcattaagcagccaaggaattaaccaacacaataagtataagagagcaaaagcaagaaaaggcaacggggtattcacgctcgttctttgatcagcagcctccaccacagcctcctcctcctccacctcctcctcctccgcaaccaccgccgccaccactagatcctccgcagccgccaccggatccgcctgtatagaaaacatattaaaatctactgcaagtcgagattcataaagagactcaccacatcctccaccaccaccgcctcctgcgcagctacctgcggctacggcaccacctttggaaaaatcagtctcagtcaatacttctagaaaggtgacgaagcacttaccacacgtgccagagcaacaattcccagcggcacctacagtaacattcatgcaggcaggattacacgcgtatgaatcacagttgatggacgggtccatcatatatggtccatagtatggcaccataatggggtacccatatgcataaggcatgtagtatggataagcgtcaccctgctgattagaagctttggagccagatcgtttacggcgcttctcagcacgccgggcagccttctcgtagttgctctgtaggcgtaggtgttgcacagatttattccactcgacctgttggtacatgtttgttggccggacggcgttgtgtgaagagatgtgtgggttcttgtttgggtcggacgagatatcggggctatcgtgcaagaggtctgcagcggcttgggcccgagagactgagcgagcagtgatccaccggccatacaggtctggtgttcttgtcgcctcgcagtaccagcaggtacattcgctgtatatctcaccgtcggtgacacggcggtacattttgctagtccaggcaaagccgtccgagagttttccctcgtcgactttgtcgtcgtggtcgatgagcatacgaataccagcatattttccctttgacgtgctgtatttgtagtaccgcgatgggctgagttggtgggtgtgccatgccagatcaacatccagtgtgggcacggccatcttatctgggttgtcaatcataatctggaagaacacctcgtactttttaatcagccggtccatagtgttgaagactgtcggtgagtgcagccagtcgatttggtccattttctccacgaaggtgctttgtctgataacagcgcccacaaggtctagcgcgaagggaccgaggttatcccagtatcgagacatcattcttcggaattggatcttctcgccatacttgatacctttaaggtagacaccatgtgctttccacaaaagatttctgtcgcgaaacttcgactcaaatagctgcctcaagtggataatattcagacaccgatccactcggccatcagtgaatgccatcaagtccgttttggcagcctgtactattcgtgtggggaatagcatgtcccggagtgcccgcggattgggtttgacagatgggcccccctcggggattccataaagattggtgaacgacccgggcatagggagaccttcgtaaatcgttgcttccaggtcttttcgaaactttgccaccttgagccggccatggtcgatcatgtggtcacaaccgacgcatttcgtctcgaatgaataatcggcgaagccattgctaaatttgaaggcattggcaacaagtcccccaaagcgagcttctgtccactggacagcgttcactcgtccgcagcaggggcagtggacttgcgtagtcggcgggtcgtgcagattattccacttgaagttcattttctgctcgaacagctgctgggcttgttcagaaactgtatactccatcgtttggttgttgatgcagctgtttatcgcttcccatggaaatcctgtggcccatgtgctcatcttaccgtatcgaatgcaatcctcaaggaagttccggggattcaacgaatgagcatgccagaccatcaaaatatctgtaaagtaattagtcaatcgtctttttgccttcaaatcaacacattacctatcgggggtagattttccgtgctccatgcaactatcgtatcacaattaaggattctttcatagtcgatacactccaagtcattaatagttgccatcggtcttgaccgggggaggccaatagaccaccacttggtatatcgatcgactgcacgcgctgcatagacagcccagcgcttttcgcgaagacgagcccgcgcttcattcagtgaattcgggaatttttcagcttcagcatcgtggataccaaagatcccgtcatcactagagatggtatctcgcagatctgccagcacagccaagaacttgagatgcgcaacacactggtcgcgagttacggtagttgaagaagatggatgggaactcagatccagctggggcagttctaatggcggctgctgctcgacctggttggccgaataggaaggtggttgttcgctggaagatttgacttcagattgctggggtgcctctttggacactttatccgttgaaacacccatgttggcggttgatagagtaagtatgtcgtgagtgagtgtgttgagtcaagtctgagaggcggggtccggcggccctttatattagtttaatgatgaacacgtatctcattatccgaggacacccagataaagacaagtcggcatggcgctttgatcgaactcatgacctttcaaagcccctgaaacggacgaggtggactagatggacatagttacggacaacatgatggcaattgctactactaattggtctgaagtatcgaaagccttggctaagcctccacgaaatgtgaagatcgtggtaaattaacgagaccatcgtattcgtttatcatccgagccaataatccgagaacgttgtcttcaacttcataacggattggttcacgggcgtaatcgggcgcggttgcactgccttgctgccttggtggcttcgtatggagtagggcccaaggctgagtggagatgcgctgtacaacttacattatacattgtacacaagagtttctagtgtttttctagcgcccttttcatatgcttgtcctacgtacttgtggaattactctgtcctatgaaaagcgatatggataactctgacggctcatatccggtcacgtgctaggaagaccgagcccaggtcacgtggagaaaatgggagaatctccggtcaggtgatatgcccctccgagctgactcatcgatgttcccggaagaagtgcgctcaccgagtgggaacgagaaagttgagacggttttgttggagaaagacaagaaggaaaccggaataaccaaaccaaaaccaaactgcgcgtgtcaagaccaaaactttgtatctgcgaatccgtccgaatctctcccactgtctcaaaccgagatctcgatcagcaaaaacgtcattcagcctggcttctctcgggcgatcaaacggcatcggagagggccaggcccaaactcttgaaccgattacgaccattgataatgcttctattggcaccaatcccgtaatggcgggtgtaaatcagttgcctgtctcagttgccgccgatggcgtgcatggtcgcaaacgcaatatgaccattgcggggatcgacagttctccggggagtatcgaggatatggatgacaatgatgcgcgcgaggagaaaagacgtcagccagtgaagcgcgcctgcaatgaatgtcgacaacaaaaagtaggtctagcgtattaccgcaaaagtcctccagcttgactaaccttttcggattggacagctccgatgcgatgtcattcaagacccatggaccgattgttcacgatgccgtcggctgaggctcgattgtaaaatcgagtctaacttcaaacgtgtcggaaagcgcagccgcaatgcagaaatggagagagaaataatggagctcaggaagcagattgctactggccaaccagtccctggaatgtcacagcaacaagctttgaccgcgggacaattgacacccaagcaagaatcgagtcaagtcagtcccgcagtctaccaaacaccatcagctatgtccgcagatcagtacatgggatctcaagaagctgtagcatccctcctggaccttcgttcgggcttcgatggcaccaacttcgtgaggaacggtggacaaattagacgaattgaggacgttatggttgttcccgagaaagtggcagaactgtttaatatgtgagtccccatctggcaagtctctgtgattgatctaacttcttcccgtcagattcttcacgtactaccaccctttccttccatttttggaccgaaaccagtcacccgatgattatcatagttcctcttcgttacttttctggacaattcttagtgtcggtgcgcgacgctatctaggcgattcgaatttgttgaattcccttgctggtcctgtcagccggctggtctggagcactctagcagatatccctcaaagctatcatgttgtgaaagctctcgctctactatgttcatggccgttccctacaagcagcacctcaacggatccgaccttcatgctgtgtggaatgatggtacaagttgctatgcagcttggtctccacaggccttctcacactcaagacttcagtaaattccgagtggaacttatcgaggatgaattgagagacaaggtgcgaacttgggcgatttgcaatatcgttgctcaaaggtatgtaccaaaacctaatcaattgctgcttgtctttatctcatattttactgtgcagagtttccaccggctatggacagccatcatctactctttatgactggacgttatcctccagcgattcgttagacccgaacttcaagcttcctgacgatataaggccaagattggagatcgaaaagttctgcgacagggtcactcaagcactttacacaaatcgacgcgatcctgttggcttaaccagcgaccacgaacgttcaacaatgattgcctttctatcgcgagactttgaggagttggaagaacagcttaaatcgcagaatgactgtaagcttccgaatttcaagtggggatatattagatgcatgactaacgacatataggtattactgacttgttcctccgtgctgctaacctccatttgcacctttcggcattctttgacgagccgaccactaaaaattaccgcgaacgcgtcttttctctgtatgtcgcgacgacatcattcctcgaagttgtcctaaacctcgagaccgaggttggcccggtcatctcttacaccccgtactatgtctaccagatgatggttgccgccggttgcactcttttaaaactgtgcaagagcttctttgcctctcacatagacatggaatacaccaagaacctattcaaccgtacaatatgggccatccgaggagtgtcagcatccagcaacgaccttcccgaacgacttgctgaagtgttagctcagatgtggagattgggaggagctactcaacggactaacaatagtaccgatgttgacgactccctgcgactcaaagttcgctgccggatgagcatgtccttgctttacgactctgtgtggcgttggcgagaggatgccaggaccaaaggccgaaacattgaaggtcagtactcctttagaatataagatataaatcagaagtcgctaacctttgattctagcctatctgaaaaatccaacaaatcctgactcagcagctgattcttcggccacttcatctgtcgggcctgtacacacatctgcaatggcaccaggaatctctgggaatgatccaagccttgccccggcacccctgctatcccaggctagccttgggatccaacaacccacaggtcaagcaaacggactcccaagcggcttcattgaacctaattacgaagtcttcgatccgttgaactggctgcttgacggcctggtagacttgccttactcatactccacgatggggggagtagaatcccagggcatcgtatagattggcctgctaatattttctcggcgttattgccggttttttttctattttttgcgggcgtggcttgcgttacttgtatcattataccacatatttgatcgctgatacttcccagggagtttgtttatgttgatgttattttcatatccgtctatatttcttatgggtcccttgtacgatgtccttggttcttttccaatatgatgctatgtttggcctcaagtccctgtccagaaaaagccgacagatttagcctcatgcagttataaagtccggtacattatgtacgtatatcacaccgagttatttttgtcgcttctttttacgagcccatattcgctccgtagaagaaatttcatcctagcatggtgatattcttgcttttctttcatcatcctttttgctagacgaaacctatataatctcggtcatcctggcccttcttgtctatttcttctccttcccattgcttcttcagaatacataaaatggctttcctttatgacctcaattggatcgatgtggagcctcgcattttgactatagtactgtgcttacttgtttcctttctctttttctctgtggctgcggccgctttggtgtttacttcctatctaatggctaacgttggtgacctccccccgtctggtgatgattgtccaaagtacaaattcacaagatgctgatatgatttgctgaggcagaatcaagttcctttctctgtacgcaaagactgtttctcgatcttataccaacagtacaagtttgtcgtggacgggcctagtataataaagaaaggctatgaacaattcgcaaatggcttattcgaaatcccgcggacattccgctttggccaagtcatactatgccagccagaattgattgaagaactaagaaataaacggagtactcttgtctccccggagccatggattgatcaggtagggcttccgggtggattctctatgtttaggctaacaaatattatacagctcctccaggtttctcatgttatgcctggctatttccctaaggaaatgggatggccaaaaatcgctaagattacgcctggtttgattcgtgccacggtttataaacacttgcatcggtatatgcccgctatgaatcaggcaattatctcgcagctgcagaccctagagttcaaagacgggggtaagttcaggccactctatagctgagattgtctctaatttcttcaaacagaatgcgaaattggctgctttgatctggcatactcgatcgtagctcgcagtggcagctttgctattgtgggctcgcggctttctcaaaacgaggaatatcttaaagctgtcaaggaccacatccttgggatgatagtgaccactcgtgtacaatttcttgttccagatttcttgaaaccgtgagtgagatacttcattgatttcattttccatggactaagacacgaatagctacattggtgggctcatcgatcgcctcgccactcttgggactagttgggatatgcacgcctcgcgtaagattatgctaaaacacttcgatgcacgtgcagcagaatatcacgccgagatatccggtggcaagggacctagtgagactaatcttgacaaatcgaacactccggtacccctgtcttcccctccccctccatccaatgacaccatgactgaacgatctataggttgaaatcttccagtggctgtatgagagcagtgttcttcgggagcgatggacatatgcagagatgataggcgaaatgttgctgctgcaatttgcctttatctataccacgtcctatgtaagtgctctgtacgcatgtcataatcctggaatctgctaatttaaacaccaatagggactgtacggcgccctggctgagctagctcgacgacccgaatatatcgcacccctgcgtgaggaaattgatatgtttttctccgcaatgggaccaaccgttccagcctgtgatggcatggttttgatggatagtttcttgaaggagtgtcagcggctgcatcccccttcagcacgtatgtcgcgatcacccttgggtattgtattgtgcgtggctaatgcaatgatatgatattagtctctgcccatcgggtctgtgttagtgacctcaaactttccaacggttcgttcttgaaaacacactaccagcaaggaaacattgagctgatcaagtatggaatacaacaggaatcacactcaagcagggctcccatgtagccgtcccaagcggaatcatccaacgatcgagcgagcactatgcgaaccctgacgcgttcgacggtttccggttcgtcaagcgtgcagcagctggagccaaggactcccggcttgtcgacctgagcccagattatctggtttttggaatgggcgcacatgcctggtaagtcatgtttctggctggccattttattttcatgtcctggtttcaaacccaaccgcccgaatcccatcggctgacttttgctcgtgtttgtagccctggacgatggatggctagcgcgctcatgaagctcgccttcgcacatatcctggatcagtatgacgtactccttcctaattcggcctccctgcccttgactggctcgctgtcattcgaggagttttatgtgcccaactttggagtaaagatagctctgcgccagcgctagtaaggacatcacccgggtgtttgggtgcatgccaaagggagcagctagaatcttaataatgtttcgggaagattaatatttatttcatcatgttggacaatatacagcgcagcgtattctaccacttgaccataacaaaccaagccagtctgacacatcaacaaatacgttggttgccttggcgccttaaagcactatcagataagctgataagatttcgactcttatctccaactgtttcaacttcatctcttcctcgtcatccctcgaaatcatggcttcggcttcctcccagaaacctcgacctctactcatcccacataagcgcacccttttacccctaccaactaaggggcaaggccccaaagtatacaaagtcctcaatcctagcgccatccccgcagaaatgagcatcaaacaatcatacgaagaggccactcaagaaagacgtaaacacacaacttcaagcgcgcataacaaaagtacatttgaagacgaagaagactacgagccccagcccccactctttgaagtctcattctctatgccgccacagcccttcctcgacccaccgacttgggaagcgatgctcaaacacagccgtgagagactagcgacacagtcaacaaaagatgaaccgcgctcagcgtcggatcaggaagacgaatgggtagagcgaatgagacaacgagtggagcgcgagacggagtatgggtcaatggctattcggggccggtcaagtgtacgcgggcgtgggaagaggggaaaggggagaggcgatgtctactggggtggtagacattgattttgatgtgttcgggatgagcttgatgctttttagatacccccatatttggttagtaggccagatacgaccatttgaatagccggctgcctttaaaacacctagaatagttatgtagtatcacgctttcatagtacatcgtgtgtgctcctgtattaatacattacttaatggacacatttacatccgccctggagccaagagattattgcttcataggccatcttatgttacacaacgtgaaagcaaggggcagctcggagcccttattcggtcttgggctgattagactgatgaacaggctagaaattcgatacttacatatgctagaagtaaacaaaacaaattaatggtacatctgagaagtcaacaaaagtcgagacaaaggaggaataaaaacaatggaatcatcatcatgggttggttcatggttcataatcatcatagatctcactcatatcaaatgatcatctcgggacatcgaagcaatttcaaaaaaccaaaaaaaaaagcaaatgcatcgtgaaatcgtcgggcaagtgtgtttgaaatgcgtgaaacatatcgaatcatgaatgtgaggataatatgagacgcaacggagaaaaggacatcataagtcatctcatatccacctcagctgtagcactagatgccacgtagacagggccaccgatactccgtttgaggatttcccttcggacagcacgctttctctcgtctcgtctctgccgtacgcgtcgcagacgattccgcacattacgccatgacatcgtctggagtcgcagtccccagcgagagagagaccggaagggagtcggctttaagggggatcctgttcggaacatgccctgatcaaccaagctaccgttgctagtcaccccattgaacaggcgtttcatttctgggctgcggcgtgctagagcagccgggccgtcgaagatgatgtgccgctggggcaggcctagagagttgtttacaatcaaggattcatgggggcgcggcaaattgttccgcatcggcgggggttctttctctggggacccgggtacgtcatcccaaaatccacggggccgccaaaaaggatactgacgactgtccatttccagtcctgcggttcggttcttggccgatttcatggagaatgaccgcgctatagtattgaaggaatccgaccgagggcgtgcgctccaggtacgacggacggacctccatcgtcgaccgaggcctgtgttttcatcttgagcgtcatgtaacggaagcgcgggaaagggtctggtggatggtggcttgggtggagtgcgagggttctttaaaggcgagtcgacgttgaaggttgctgtttgtgatgggttgtccggcgtgcgagggggttggggatgatcataagaaatcccaagcgcctggaaaggtcgcctctcggaggcttgtacccgagggtcaacaagcagcagtgagttattgttgtgtgcgaacagactgaccgctgtagcctcttgaatttcaatgggtcccggcgaagacgatggaaccgagccttgggtgaaagggaaagatggaggacgcagggttgccatatcatctgagctagcaaagagggagcgcaaattgggagcttcgagtaggccattgcggtcaggcgaagccagaacgttgtgacgaggcgggggcaccggctgatgctcacggcgtttttgcatcttgaggtcaatggctaagttatggcttcgtagactctcggaagtaagggaagtcgcacgagaattattctggctcgttggtgcagaaagcgacgagcttcgggggggtactgcgggacgctccgtgggacaacctttagaatcggtctcgcgatatcgattcgatgttgaatcagagacggtgcgttttttctgccccaagatatccgtgcggcccgttgatgctgtcagaggacgacgagttgatagacgagaacccggtttggaagaaacatgactggtcggacgagacctgagagatgaacttctctccggtatgaccactacgttgatggtttcgatattgggctgtattggactgttgctagtcttgaccgggaacggcatctccgatgttccgcttcgaacatcatcagagatgcgagcagccttgtgaatcaggcggtgctgggattcagggagggacgcataagaggtacgctcagaccttgtgatgggagagctggcagaccgtagagagctcctcttttcggtatgccggagcattcgctgggctcgtttgggggagtcgattatcatggcctcaacggtggatgtcgaggagatgaccgacaaaggacgggcgtctggtccactaaatattgctggaccctccggtgatgacgacccaatattccgacggaactgctccactgaagtactttctttgacttcatgcgcaccatttgcacggtcctgcagacttttttccctcatcaaagaggcatccaggtgcttcaaatccagtgcttctctctcgggtgttgatttatagactgatttagtgaggttgtgattttgtgcagactttcgctttcctgctaacggtgttggcgacccatcgatggggtttgcggcccaatgcccatcaaaagactcgaatctagtgtcgcatccagtttcgccatgttgagaagaagcaggtgacggagatccttttatatttgaagggtgtgaaagatatacatttgaggtgggtggctttgatggttgccgcctttgtttcggtgtctgggccgtggtctgagacatgcggaccggggtgttcatatcttcttcggatgagatattctccaaagccgtttgaaatgaatcggctcgagacgacgaggagaaataattaaactggttcaaggtaggtcgcttattcgagtttgttcgaggaggcgtcacatccggggttggaggcttagaggcacggcgaggggtcaacatttgggatgttggaatatctgacagagaagaattcattttctggggtgttcgttcgtcagccacgagttcttcgtggcctgcacccgggggtgtcaagggaagcgacggcgtcgcagtatgtctcccagtctgatccggggaggccggttggataacttcgatgctgggaacgattacaccccgccgaggcagcatcttgtgagaccttaagagcggccgctcaaacgcttgcaaatcctccgatgaccccatcacttctacgcccggcatctcggaaacagcacaccacggagacctgaagcatccacggtcgcttttgtgaattcgatcgaagggtttagatatccttgggcatcatagtactgggtagaacgtttcgtttagagggtcgcaagggtcgcatcacgcacgagcacttcgcgaccagatgcgacctggtcaaagtcaacggatctactccgtaaagcccagaggctttgctttgtctctgtatgatgcagggggtcgccgatcgtccgaggtacattcgagtccactgcaaaggacagacaacagtccaatacggagaaaggagcatggatattttcacaactgaagactccgatctgtacaatgtgagctgtaagggtggggatggacgatattgacgagtggctggggagtccagtctcaaaccctcttatccccgtgtttcagccaagtatgaggcaataaataatcatccagacaacggggggataagagaataagagaattaaaaagagttcaaaaattctcgcatgaaaagattgaataatctgacgaaggggctaactacagattccaacctgtttcccgctgattagcgcctgtttcctattcaggtaatattgatgccttgcagcctcatctgcctcatttcattaagacttcatcacacccgtgatcacactgcagatcaaactagcttctagatctgatgctaccatggcttggggttgccttcttattaaggtagtttcagtgatagttattataggttcatccttaagtgtgaattagtggctgaactacatcctacaatgtacgatgtatatgctcgacctaatctaggaaatgagatcatgtggaaacttgaaattaaatatgtcaatattccctgggcatactccgtactccgtaggtgtctggggtctcacggctctatcagagcccttacttggcatggttggcccttgatgtagcatacattccagtcctggggagagaggaatgaaatgcacatccttatttcgcgctctcgcaaatgaagaactacggatgtcaagtaaccaagcacatcatatgtatgtttggattctcttttccgatggctctcatttgaggggatatgatcttcatttgaaagtgtacacctagctaatctcgtactgcgaatacatcaaggatgaacacggtagactttcgaaaacttgaaatagaatttatgcctctaccatatgaggaaatttcctattcgagatccattcacgccattgagcgtgggtggtcactgcatgctcatataatgagtggtaaccctagacgatggacctcccaaggtcgggattcctagatagttactaagcacggcattaggccggggccccggcacacggctaaacctaacgctgtacgctgttggacggtttctcttatatgacttgatctacatagccatgtggggccaaatgtaggtaatatgtcaagatattcctaatacggaatatgttgtatatcaatggagcttcatcccatatttatatcctcctcacttccaaggctggtatgctttcgtagataaagtagataaagcattccaggaaagggttccaaggtcgagatccatcttcatactggggctctccggatgattaggagactagaagcatagcggatgttctcagatgggcaccataggttggttaaagcaatataaatctgtgaatttgtgaatctatgaatccagaattctacagatccaataatcccaagcatgtggcaacgggtgatgacgatatcaatatccacacaagccagggttgtaagacttttggaatcaggtcaaaccagcatttgatgtgaaatattaccttgacaaggtagtattgtctaggaatattccaagaaatcgaattgcctatacaggttaggagttaggaggtctggcctctggtctctggtatcaagtctctggggtatatccaaaagaaagaacatcccacagactatgcaatgaagatatcagaataatatactttgaatatagatagattgcccattaccgtggatcagtggcgtaccatgacgtcctgcgaggatggtggacttgtctggtcttggcagatgacatcgcagggaaagatctctcatttcgtcatagttctcccccgccatcatcttctctctctcctttttttcttggtctgtaggtttctggtcttgcttttctctctattcctcttgtttttgtgatttttcaaactccatcagtggagtaaatccatccttcgacttgtttgaaacgcttcccccattgaaaatccctgcttcaatcgccgacacccttctcttcgatctctctgttttcctttcttttccgaaatcaaactaagacatccaagacatctgtttacgaatcgcgattcttcttcgatatcatgagtacaatacagaatatcaagaatttcatccggcatggcaagcaggcccgccttgtcacccctcattccgagccgacgaccgacgtttccactatccatgcagagccacaacgccaaccgataggtcaatattcacctgcactcgaggcttttggccctgaaggcagagccaatgccctccagaaacctgattctcaaatcagacaggatcgctctgtcgaaatcgaacgtctagtggcagaggagaacttgaaccgatcaaagatgcccaaataccctggcctagagcgctggatcttggtagagaagatgggcgacggcgccttcagtaacgtttatcgggccaaggatacgacaacggaatatggcgaggtggccatcaaggtcgtccgcaaatttgaaatgaatagcaatcaggtaggttctaccgcgaggtgccttgctcttcttgttttccttgtggtttttgtgttttccttccttcatcgttacatggtttgcaatctgtctataaacatggccaatacgttatgtagaacgatcctcactatccaacggtcaaaaaaatccccgaggcggcggaggtgcgcatacaattctttttctcacgctcggcttacttcatggcaacttgcgtctgccggcgaaatgatacactaccctatggcattgcctttttacatggttgtgcatcaatctcgtttcgtcattactgactagtcatttttaacagcgggcaaatattctcaaagaggttcagattatgcgcaatctcgaccatcccaacatcgtcaagttgattgatttttccgagtcgcggcaatattactacatcgtcctcgaactttgccccgggggtgaattattccaccagattgtccgattgacgtatttcagcgaaaatcttagccgccacgtcatccgccaggttgcggaagcgattgaatatctacacgagacatcgggtgtcgttcatcggtttgtcatcctgtctgtagcgatttgcgcttgtgaaagctaacattctcatgaagtgacattaaaccggaaaacctcctgttctatccaattcccaacgttcccagcaagaatcccaaacctcaacaaccaggcgacgaagacaaagaagatgagggagaattcgtccctggagttggtgcgggtggtattggtaagattaagcttgcagatttcggtctgtccaaggtgatttgggatagccagacgatgacgccttgcggtaccgtcggatatacagcaccagaaatcgtcaaggacgagcgttactccaaaagtgtggacatgtgggccatgggttgtgtgctctacacacttctctgtggattccctccgttctatgacgagagcatccaagtccttaccgagaaagtggcgcgcggccaatacacttttttgtcaccttggtgggatgatatttccaagtcagcccaagatctgatctcgcatctcctcaccgtggacccggaaaagcggtacaccatcaaggagttccttgcacacccctggatccagggtaccgatgaggagactaccgctgccgcagacgcaccccctctagcaacgccctacctccataccgaaaaaggcccgcagcagctcgactcctccagcgccgaacacgggccctaccagcccgccagtgcccgtttcctcgatcaaccatccgttgcagcagaccggcgcatggacttccgatctccgggcgccttcaacctccgtgaagtctttgatgttggctatgcagtgcacagacaagaagaggaaacaaagcgtcgtgtgattgcgcgccaatccaaccgcagtggtacggcaggattccagtcggcactgggtgctctcaacgaagattatgacgacgaacccgaatacagcaacaacctcggaggccaaccactcgctaaagtggccactcgccaaggtgacatggccggaatggaagccaagctccgatccacgaacctcggcgctcaaagcagcgctgcacaagcacgacaactgccccaccagtcaaagcctaaacagggctacgggatgcatgacgctgctgtcgcgagtgctgcaaagagctctattcgcaagcatcagcagccgttcgagcttactctgagtggttccacattgctagagaagcgtggccgtcgtaatcaaccggtggcttaaacaggatgtatttcttccattggggtcatgatgtgatgtcttcataacgtctttacactttgttgatgagcgatattttcagatatttttatctcttgtgtttttgtttcatggccattttcttctttgttcgttattttctttttctcgagctctttgcgcgttatctgatcggtcccggcgaggaacctgcacgctacatagtcacaattggaaaatgggtgaagtgggttttctttttcgctttctcttgattatccgggagcttgcttggactggaatggagttctggcattttcttctttttctctttgctgtcgttatcataactaagggttacgtccatatttgtcaaggattggataagcatatttttcaacattgcaaggttggaaccttgaaaggtttcacgtatttcatataatcttcctttgagtagcagtctccatctagtcttttcttatagtactgacgtagaaacttattcccggccgctggtctattaagccgaagggcgaggtactataaagctatgtacttgatttcctccgccaaggcttcctatcttagctgtcgcccatttcttgggggcgctcagagtcaggctcactgagtagatttcagtcggggctcagattcagtgagctgctcagtgctcagataaatcatgtgatggaccactcaggcgcaaaatcagggcataaccagttgatcgattaacgagattgaatttggtaatatgataagaggtggtattctgccaagagagaaagaaaaagaaaaaagaaacgaaagaactcaagcggggagatcacgaataattccagcttttttctgcgcaacgtacagatgggcatttccgggcgaggtggcaaagaataaatagtcacgcatggccttccctgagaggcgtacatctcccggactgtctggcttcacaatagcacgctcttcaaaccagggggtaagtggcacaaaggcagaagtgagaatttgcatgtcaataaccattgaatgctggaaagccgggccattggcggttgttacttgcactacgcctcgcatggctccaatgtggagtaccatgttgaactggagtgcctggagatcggaagagaagagggtaagcacgttgcttccagtatcattgcatactaagaaaggccgtgtcaagtttccgatgccaccatatctgggagatatcctgatctgagcatgtagctaggttttgttagttaatgacctcaattaatcgttgacgtaactcggattgatatacctggtgcatatggagggtgttcgaataagcgaatgtttctgaaacagactgggccatttgctgcggctaatattcatagcacatgattagccaaagactcttgacaataccatatagggttggttatatgatatttgcctggaactcatgttgcgacatcatttgctgataatctaatgtctgaatatgttattagtatgagccagtataatatatagccaataggtcgaaggatattcaacaacatacctcgcaccatctgattcctatcttagccgcatcttcccacgagtccttgtcgactcgttgtccatcgataaggtagactgggggatcggatcgttggcgtggtccgagctcgccactttcatacaggcgaatgagggcttcggcattcacacgctgggcttcgccgaaatcagtctgcagacaagctttgagttgctcgacgcgctcttctggctgcagaatgttggggatcgccggacgactgagctgctgatactctaatgtctgaatatgttataagtgtgagccagtatgatatatagccaataggtcgaaggatattcaacaacatacctcgcaccatctgattcctgtcttagccgcatcttcccacgagtccttgtcgactcgttgtccatcgataaggtagactgggggatcggatcgttggcgtggtccgagctcgccactttcatacaggcgaatgagggcttcggcattcacacgctgggcttcgccgaaatcagtctgcagacaagctttgagttgctcgacgcgctcttctggctgcagaatgttggggatcgccggacgactgagctgctgatactctaatgtctgaatatgttataagtgtgagccagtatgatatatagccaataggtcgaaggatattcaacaacatacctcgcaccatctgattcctgtcttagccgcatcttcccacgagtccttcgccgaaatcagtctgcaaacaagctttgagttgctcgacgcgctcttctggctgcagaatgtagggtatcggacacggacatgcaggactgaattggggatgtggatctggcatattggagatggttggtggaaaatgtggaaaatgtgggattgtgtgggttagaggaaagtggtggggctcgcttatcctagtctggttagcgtgtcacatgtctttcattggataataataccttaccgcctacatcaccgccttcacaaaccatcttcaataatagtacgaccaaccattgatctcagactatatggcttttttagtgtatttctttggtatcttatttggtgtattttatacttatctagcttttttagtacttatgtgagcactgagagagcttctcccattcctcatggccgtctttcgcatccccaatttaaacgaggctgaggtcgtggcacaggtcgtggcactagtcatacagaaaggctgaactctcttctgaaaaataccgctcgttcaaggcacagacagaataccagtaagtgagctttaagggatcgctccagatgtccagtgggcgaaagccacttttacccactgagcaaggtaaatccgaaagtggcagaggaagtcaagtacataggtagacaaagaccagtggtggctttttttttataggccaagtacattttatgagttcgtgatttgacctggaatttaagagagaaaaacacaaacttggtatcttgattggtatctatgttcaagttcagaggccacctgggaatggccactggatgatgatatatatgacaagaacactctatccggtccatatattccccccgagtgctttgagcatgtcaatccattggtcgaatcattcagatcgcaatggcaagggaacggattcgtgatatatgggtgcggtgtccgttttcattttgtcgagttctcatcttgcactttccaacacaagcagaaggctgtgtgaaaatcgacaatatgcaagacattttggcaaaccgaagagatttaatccgcttcttaaagggtctgcttaccccgagtctcaatgggtagaagacacatagctacaaaagaagccagaatcaacccgccggacgcatagatgggcgagttggggttcgcactaccggcatatatagcgacaaggggagcacagagaccagtgatacggttcaagcagctggagataccagtgccagtaccgcggttcggagcagggaaggtctcgggggtgtaggcgaacaggacaccgtacataatgttctggaagaaggcctcgagagaactgcataaaagctggatgtctgagttcgtagatacggtaaagcagaacagcaacacaccggtgatcaaggtggagattgccatggtgcccttgcgaccaatgtacttgagctcgaccgtccagcaagccagaagagagccaggaagaccaacgatagaggtgatggcgtaattgcggtaagtgatgtagttcgagttggtctcaccaccggatttggagaggtactgcggcaggaaagcgttgaagagagggtaacccatgccgatggtggcccagcagaaccagagcagaacggtattccagcccatgcgcttgttagcgaacaggggcgcaatgcgctccattgaaaatttggagaagaaacggcccacgatttgagagtaagggagccctgtctctttctcgtgcacctcgacatgaccaccaatttcgttgaggatctcgctggtcaaccaggtcttagtgccgttcttgtgggcaatgccatgaatagcggcgacggcttcttcctggcggccacgggagagcaggaacttgggcgactcgtacaagtggaaacagaagaaacgtaggatgaacatgacaaaagtgatggcacccagagtgagaaccaggtagcgccagcccatgttgttctccttggtgcaaccttcatagctagtgcagctgaagttaggaatgaaagcccatgcaagcagactgccgattagttggccaaaaggccaccagatactcaacatggtcaacatgttgccggagacaaaggggaggaactccaggaaaagagcaccatcgacaggcaggttaccacctacaccaagacccaagcaagcgaacagagcacatgtactgcatttatgatcagcgcaaaattcaaaatgagttattctcatgaagacttacccaatccaagtagggccaccaccggcagccagaccaaaggcaccagccataaatagagtggtgttaaaagcaagacgacgaccaacaatatcagacgcaataccccagaatgaggcaccaatacagagacctaagaataaagcacaagtggtaaaacgcacccacgtatcggagagtccgaattcgtaggagataggggtcagcgtcagggcaactccctacacatggttagatttgatttgtgtgatttgtttgatttcgatctcctacctgaagccaaaggttgtctgctgtccaaccaaaaccacaaaggaagaacagctcccattgataccggcccatgccgatatcctgcagggctctgttgatcacctttgccttgcctgtgtcgtcgagttagatcaaacccccaatttcagggagttttcatacgggaactagtgtgaaaatgtgggatgaacatacggtcataggcagagtcatgggtagccgtggaaatatcagactcgatttctgcacgaagggcttcgagggtcagatgagttggatctttggagccagcagcaccattctccgaggaagacgagcggtccgagctctggctggactccttgtctatcttttccgagagggagtggacaggcgcatcggcgagtggtatgacaacgctgggaaatgtcggactatcctttttgaaagggttaaatttttcgagtcccataatgacggttttatatggcgctttggaatatagttttcagtcgcctgggatttgctgcttcctgtctggtatgtcgcttttcgcttgttctataccgtgaatgtatcgctgggaattcgatgagaggtcgacggtagatctacagatgtgggaaggagttgcaatggggtcatatatcgtaaatccgggggcaattcgctgtgggccgaaagtgtcgcaaggacaatggtcgagatatactgctgtcagggtttgcaaatgggcttgtcgctatcgatgctgggtttgtcgcagtcgcagtcgatgagacagttgtctccagggtagtgcaagcttgctactgaagagcggaagtacctcgtgcgcggcctttgttgaaatggatttcttttctctcgcaaggtgatgatgaatgatataaatgatccgagggcatgaaccagaggttctgccacagggatataagataaaaagctaagagacgaagctctagcaagatatatgaaggaattaaggcaagctgggggtagctataccttgtccaagatgttttgagaggtagcgaggggaaagttgcgaattgacaaaagaggaaagaagggaaaatggcgaggtgggattccagagttgctatatactattagggcaatatgcttccttttttttctttttcttttatattaccattggttctctagtacgagatttcatcactggtcaacgccgaaaagtgggactgccaggaaaaggtgtgatgacattctgatattctgctatggtctgtaatttgaacaaatctgaacatttgcccgcctttggcctcgccgagtgcatataaattagaatgaagacatacttggcagttggacctgatatgtttccaggtttggaaaccgccctaccacctgccgtaactagaatgagctttctataatgtctatctccccttatttttctgtggttgggctttcatagctgtaattaaagcatatcctcgtactctattggtaaattcaacactcatcttttatgagcagtaccagcagaatccaaggtggtcaaaaagaaaattgtacataagaggttccactatggcgtattatattagtaaaattgttgatgttagttaataattcacagctgcacagggaatagctcaaaaggaatactcaaagacctgtagcacggtacttctaatgttcttgcgatctaggattgaacgccaccgaggtaaatccgatatactattcagcctcaagggtcttcaacttctacctttatacatatccggctactctgtatgcaaaattcaaatggtcctatatagtcatcacagatatatttaccaacatatcaaacattagaaaaggtcgaaataatgaacacatttgactctaccctgacccgagacctcattggccttcatgatccaccagaaaaattttgcagtaagacagaccactctatccgtacccgtacctctcactagtactcttgttttgggcgaagtattgagaatacggagatcaagaaccgcatgcgtgctccgcttgaacgtcaccctctacgttgcccttcttacctctctcccaagatattcaagatgttttagttctacagtataataatataacagcaatcctggatccttgcgaataccaaaaataacgttaaaatcttgtacaacatagaataagaaaacaaaaaatggttgaactcaccaacgttgaggatcatgaatcttggcgggcgcatccatgccgcattcagaccagggggaatccttgctctcggccaatcacagcacttgaatactcccgtaacctccaaggctccttcccggataacttactgcttgccattttgggagtgttgtgcatacggcctctagcattacctgctcggaaactgcttatgttcttgacttggagagactctacacggctcaatactgcagagaataggtggctctcggttatgtgtcgaacattcttaacatccggtttttgttccctttcaatacctttcttgcagagtggataagtcaatccgaaaatttggagggtcaggaacgactccactaagaatagcttttacctttaattccttgtgttggatcactacggtccggtttataacatacaacatacaaacaaatcccctgcaccggcccggcgattgtcgtacatggtttgtcccttttaatatgcgaaactggtaaccagctagagtacaccacttggtagcggcttgcgatgtatataccagccaaagggttgtgcgtgatttctctgagttatactgagtaccttgtagggcactgcaagagatttcaggtactcgcaagcttaggcggaatgaaaatactactcctaccaataaagccgattctaggcccgccaagacttccacacatatgttgtaatgaaggcctaatcgggcaagatattcggcattcattacagtcaatcgtatgaggcatcagaaatagccacggcatagggaatgataaactcgatgggatttgatctctagataccctatggtgatacactttgtagcctatttccagactccggtgtcatgcatgagcggttctgccctataaactacatagattcatggcttatattttatatacatattgtcttgatataaaatctgcatatgtgaggattcgtcctttgctaataaaacactagagttcctcggtgcgtctgagcaaccattcaaggtggcgataagccacacgaggctggtactgcggttgcatgtgaccagcctggtaactctgagcccacatcagaccacgctcatagtgctgaacacccatgataccctgagaaccatcgagactagacgcaccgttctccgcaaagacatcggcgtacaagaggtccggaattttgatatcgatgggagtgtgtggcttcttttggaaaccgaggtggccgttccaggtcatattctggatggctaggagcgtaccgttggtgataataaccatgtcaaagtcaccgtttgcaatgagaacgcggttagtagcctcgatgacctgcggcaagacgtgctcgatcgggttcgccgaaatgtcgccttcttgctccgggccggagtcgccaccgacatacacgggctcgagggaacacccgctccaggtctcattgggcgcgtgtagcgctcgcttgacatctgcgcgatcgaagtagacgcttgctccaggcgcttgatagtcgagcgaggtggggaaggcgagaacgtcccagaggagcgggcacatctggttgatctcgtagaggttgaagcatgggttgatgtggaagatttcatcgtagacgaggtcaaacagatcacagtcgtcggccaagctgctggataacatgggcggctggactttgggtggcgggaaagtgaggtacttgtcgatgaactcctcgtatccgcaggatttgtgcttcttttcgagctctgccatgaatgattcgttgaagttaaacaggtttgcgttttgctggacgaagggcacaacgggcacttcttcctgcacggagtcgaactgtccaatgcacgggtcgtatgccagcgcgcctgggtaagtagtcagaatttgcatccaagcctcttgaatattcgcgataactcaccatctaggtcgaaatactccttgtctttttcgtcgagcatcgcagctgagatgtagggcacgtaacgtccagcataactctcaccagtgacatagatcttgaagttcttaattccaaaaatcttctggaagttcttgaagaacttgacaaagtcctctgctgtctcttcttgtgaaacagcagttggtgtgccgacggagtagcctgttccgataggctggtcgaccctgcgagatgttaacagggtttggggttcatatgcatgacaattactcaccacaacacattggttaggttgacccaagcataagggttctctaccggggcaaaagtaccaggttgccatatgaaacgaccagtctcttgcaagaaactctccatcgaactgcatccagggccaccgttgagccagatggtcacttcgtctacgggctcgttgatggtaggctggaaaatgaagaagagcgatctggagctattgttcatatcaattggcaccagaccagaatacatctcgccgatatcaaatgaaacatccggcagggagtcgaccaggtaatctataggtctattagagattttgctgctgacaatgatatagctcgacactcacgcttagtcttcttgctcaagaagcggtaatctttgtccgatttcgcatgtttctggttacgagcctcaactgcccgtttggccttctcttgtggtgcacgagctatctctgcaaagcgaccgtgtttggaggcagtcgcaagatccgatcccagcgaaagggccaggagagcagatgacaggactgacttgagtaacatcctggaccggtgggtatgaatgggccagagggcagatgggatgtgtctctttttttgtctcggggagaggacgcagctatatactacccccgaaaggccctaccaatagccccccgaccggtgcactcggtatctgtaggcccatttaatttaataaaaggctaccttgccagaccaagtgcttccaagtggatgattggaagaaatccttagctccaggccggatgcttcttctgcgccacctgggcacgaccccttgttcgtatccactgttatcgcatcccggggtcgaccccaggatggtaggctcacctgtgtatcttgctgctacttcttttgtccctggtctaggtataacgccggtggtttgtctgcgatgttgggcagttataaaaacgctaatcgcatgaatggttgctctaataattcggtcgcattgtgcatagctatcattgggaccggatgagcgacggattccggcgagatcgacgtttatctctcactttgggataacaaactccgtgagcgaaaagcgggggcagctcgcgattggtctggtgtgcttcttgtcccggataagcatcgcgtagcctggaacagttgtattggtctgatagagaaatcttcataattattcatatgttgtacgtactgctcaaaacctcacatatgaacatcatctgacttatctcctttggtggatagattcggcataccggggaagaatactgccaggtgagatccgtatatgagccgaggttcccgcagctcttaggtataatttagatcctaggcatgccaagctttccaccaatagtagctcgaaagcacttgttctaacaggcctcctttcactgaatagcatcagctgatgtgatcaaaatactcgatagacatgttccttttttgagataaataagggtccttctactccgtagtgtttgtttgtttaacgtagtctcaaaagcgaaaacaaaaaaaaaaaaaagaaaaaaaagtggactcgcggggaatcgaaccccggaccactcccatgctaagggagtattataccactaaaccacaagcccagtttgatggaagaggctgccttttaaatactgatgagcctacacaataattcttgcgctagactactcagcagacaagattctatgctagtcaagtaagactaaggttgcatttttaaatattacatgtttcatgcttacacacttctagaatttccagcctggggaggttatatgagattcacatacattaaatggccgatgataaaaacctgatcgtggttatatatatatatctacctgcatcaccatccgattgcgtgcgattccatgtatagtacatcaaccttctactttttctttagaattgtagtaatgtattcaagtataaaccaactaactagtaaagtcatgtctacttacgaatagttaatgttatgcccggatgtagctaagtatatgcgctccgcatgcgtttcgaatgtctcgcggagttcggaagttcggaagttcggagttttaccaccattcatagctatagccgacaaatacattgaatcatcccgtatagattgtcattctatatgatgccaacaaaaagaaccgtcagtaatgtatatcaatcaagctatgttgttcaattgagagcaccgagtgatagttctgaagtcccccatcatttagtcggtgtagaacaacatgtatagacaaataatatccccaaggcgtcgggtatggatctaagcacgatagatccacttccttccctgccaattatcacgtaccccgaaaatttctcttctttaattattacacttaaactccaatgggattgattccgcggaaaattattagcctgggcacttttgcatatgagtcttttggaagtttcgatttctaatatgtactgcccctccttcaaatactttctcctacaatatcatcctggatcctcaacctcagagatctaggacttcattaccccttaatgcaacaaagagaatataatagctgctctctccacatagaatgtctaccaatgtcgggtctgccggcggcaagaccggcgatcatgaattcgatattttgaacaccaaccagagcgccacatcctttgaccagaagactactgctcacatggtcaatgagaagtttgacacggaggctgcaccagagcaagaacccagcctagatgatgtataccggacagcatccaccgtggcaccatctcagagatcagccagaagagaccccattagtcgagcgactacagacgctgaagggaacatctaccccgagggaggactcgaagcctggctggtagtgctgggcagcttcctcggtctctttggatcgttgggcctggtcaacaccattgccacatttcaagcatatatccaaacccatcaactaaaggaatacagctcaggaaccaatggctggattttcggaatgtttgcctttctcactttcttctgtggagtgcaggtcggtcccatctttgatgctcgaggcccacgtattcttgtcttcgtgggttccgtgtttgaaatggccatgatcatcctgctcggcttctgcactgaatactggcactttatgatggtcatcggtgtactgggtggagtgggagcgtccctcattttcacaccggcggtctcggcgattggccactatttctatgagaaacgtggagttgcgactggcgttgctgccactggcggctctgtcggaggcattgttttccctctgattctagaagctctattccccaagattggctgggcctgggccactcgggttgttgcgttgatctgtctggttgtgctatcaattgcaaacctcttgatcaggtctcgactcccgcagaagccattttccaaggagaacgtgcttcctgacttccgcatctttcgagacccgcggttcgtacttactaccgccagcgtcttctttattgagtggggtcttttcgtgccaattagctacatctcatcctacgccctcgaccatggtttctctagcaagttctcataccagataattgccgtcttgaatgccggctcattctttgggcgatggctgccaggattctttgccgattttcttggtcgctttaacactttgatcgcgacggtagcgctctgcgtgctctgtaacgcctgcctgtggcttcccgctggagatagtatgcctctgctgatcgtttacgctgttatttttggattctcaagcggcagcaatatcagcctgacgccagtctgtgtcggccaactctgcaaaaccgaacactatggccggtattacgcaactgcctataccatagtgagcttcgggtgagttttttttttacttgtgatgtcacttgcgtatctataactgacatacgtttgccaccagaactctcaccggaatccctattgcaggtgagatcctggcacgctgtgatgggtcttactggggccttatcacctttaccgtatgctgctatgcggctggtcttgcatgctgtaccgccgtgaaggtcattgaagttggctggcgtcaccctctcgcgatctattaaatgtttggattcggtatccgggaccccgatgctggttgatctaataatctcgacacgatttcatgatttcaaagatgagcatagacagaaaagtcctttcccccttcggcttgcattttatatccggcgtccatgaccgagtgatttgttatacatatgtggttgctagtaatgtctatatttatcaatctgtgattgcaattctatcgttagccaactagtcggatgcaatttataaaatttccgacatgatcggttcggcccttcagctgtactcgaactggtagctagaaataaaataatttgccgccattgaggcaatataaaaaaatataagggttggtaactcagggtcaggttccctgcagggctgaacagggcagaacacgtcgcataagatatccgacaggcaccggagctatgtaaacatctggtcacaatgatgcctttgtaccttaaccaaccatggatttcaccactgggaatgatttccaataggagcagactcagctcttaccatggaaactacaaagccatcgaaagcttaacaaaaaacaagcatcgacatcaccccaggccagtccctgtcgctgctatgacatcaaatggccattaatccatcaccattgagtcttctagcctctcgctacatatacaacgttaatctcgcatctcctcctcaacatccttttgcactcgggactttgctttcctttcaatcgcctcgaactctctggtgagcatttgcttcgttgctcaactcgctatctaagaagtcctgacggccttctacaccagctcatccatcaaaaccacagcacccggaaccaccggcaaacttgcatcggccacatttgctcaatcgtcctgcatatacttgcgctggtccgaatcatgttttcaacaagatgcttggttctgctagcctgctccttgactcttctacggggtgtcgtggctgtcccggcggatgtggcgctagagcagcccggccttgaggatcgtcgtcgagaggagcgtgactttggactgcaggagcgccacggccatcctgagcttgagagctcgctcctttctattctaaccgagaagttagctacgaagaccgccccaggaggaggaggaggaggaggtgctactaccgtccccggtgaaggtggcgctactaccgtccctggtggaggaggtggtaccacggtccctggggaaggtggcggtactaccgttcctggcggaggtacagttcctggcggaggtggcgctactaccgctcctggcggaggtacagtcccgggcggaggtggccccactaccgcccctggtggaggtacagtccctggcggaggcggtgctactaccgtccctggcggaggtggcggtactacagtgcctggcggaggaggtgagaaatctactacattattttctgcaagcactattcttactctccctgatactcaaggcggaacttcacccggtggaggtacgactgctactccaactgggggcactgaaacttctcccactggcggtgctactacgacaaccggacctgctcctggcggcaatgttagtctcccccccacaagcggcagcgtcgggccacccagcggccccgcttcctctcccggcggaaccactcaatacatccatcccctagtggaacccctcacccgtcctctcctgaagtagtaactgaaaccactaacactagccagacttctcccactaccagtgagcagccaagcaccacttctcccacgggtggcggtggtgtatctccttccccatctcccagtgttaccactggaggcggagttccaccggtttgccccactccttctacatctagggaaacgacagtcgtcccagtgacggtcacctgtcccgccgtcgtcgtgagcaccgccaccaccaccgtcaccgtcacatctggtccggccttgtcgggaccaacaggttgtccttgccccactgaaggtcctggtggaggtcctggaccgggtcccggaacaggcactactggaggccctggagcaggtactagcgaagtgtccccaagtggcactgcgacagcttcaacgacgaccactagcgaggtctccccaactcacagcgtgacagccccaacgaccacctctagcgaagtctcctcaagccacagcgtgacagtctcacccactagaaccggtaccctgactcggaccctgacccagacccggacatcgacgccccttgtaccaactactagatcccgtaccacagtcaccaccactacaccaggtaccctcgtgactttgcctacaacatcacatgtagctcccggaacaccaggtgcgtcacgtgttactccacgagaatttatcagtcaagatgttgttcgccgacaattttttagcaacgccacagcaacccccctcttcactaacacgagtactccctcgaatgccacgacgagtgcagtgaacatcacccgtattgcgacggagactgctaccgaacccgcgcccgctttcctgcctcgcttctaccgtggacggatacgtgtttaaattgtttggctgagttgggaagaattgactgagatattggttggttggtcgttggaaaatttagatcggtttggttattgccagtttttgatattttttctatagtttgagaggagtttaatgtatttggtggtaatatgatgttgctggtgttcaatgtatggcctcgggttttgtttcttctaccattgacgcaagtgtctggaaaccactgctagagaatacattgacactttaagacatgaggcttattatacttgtttgtgacaagtcatgatctactctctcgaatctatagaaaatacatgtaacgatcgcttgttttgaatgacgtacagaaggaacaaactacgttatgtgagaaacgaggacgggattctatcattggtttttcttctctaaaatcaaaacacatatagaagcagtagcaatgcaccagaaccgaaaacccttcaaacccttcaaacccctgtcaggtctatagctcacactagatttccgcctccaatagagcctgacctatctgtgacggcgacgactattttgccgctcaaactcttcctcgtcagaaatctcttcgacatccgggtcccactgagcaggttgttgcaaaacggtggggatgcagctgatcagatcatcggcaacgtcctggtcggtctcccggtcgttatgcttgcggagaatcctgattgagataggtatgacaagctcaaggttacggcacagccgctcaaactggggatcacgttctacaactgcacttgagatagatatgtcaatttcgccagcaatctcctcttctaaggtggaaatgacatcgttacgacgatgtggtccatggcgaagatagtagattgcatcgtgcagacatgacaagacgaaaatacgtcgctcgttatatggatcatcggctagtacgcgctcaagatcatggcgaggcatcgtaggcgaacaccagactggtaatggagaagccggttgatgtgtgacttgcaagtgaagtttgttgacgattcctggaagcgaggtgcgacaaatagttggattgcccgatgcagaatccgatgtgtcttcggtatgtttgtataagaacttgagaaggtggtgggaatcgaaattatttatgcatttgcacggagtagagttagcactgattcgatttcatggttaacgtgtttgacaaagacagcaatgacgacaaaacattttatttttattctctcaaagaagaaaaggaatattgaggctttgattaaatttcgggagacaagaaagaaactcttcgcctccgtcatactcacaaagacactatttatatcttattaaaagagaggatacagtccatgacagggaaggagcaagaaaccggcgggctttttcgcagttgcataggagtcaggatactgagagactggaaatagccccaaagcattcgtaacactaatcccataatctccatgcaagtattatgctgcaggtattggttctgacactttcgtcatgtttaaattcgtacgtcaaatggatggactcgataaacaaagagaagagtacaaagagtaaaccaaaaaagaaaaataccggtgaccatatgccatcaaataaagaataaactgccagtgttctcattgcgtctttctgaagaatccatagatgttacttgtccgctaagtccatcagtaaggatttcgacagatttggacatttttcatatcacttctcaatactctccctaatctatgattctttttcctagctaggcaaataaaattttggtatacactgagtgacatatcggcaccttttataaatattgtatctctcgtctgacggaggcccgatgtttcatggcgttcaagattgagccggaatcgttttccgttgcttacatgtaatgtactatgtagttacttctcccaacccagtccctgcgatataacggagtaattaaataaaccacaccctaccagactttcaacaatatcaactactccggaccgctatatatactccgttgactctaattatctcttatcagttgcgccgataaagccgacacgctccacaatgacttgggccaatgacgcaacgacctgcctgattgggattagcggatgtttggcatctccacatgatccaatacgagcccgtcccccgcgtttgcttttcagggagcacatatgagatcgacaatctcgccgaatgatacggggtgttcgagcatatctacaacgtactatgtacatagccgaactaggctgccatgctgtctatatcagatttggctatccgcggttgccggggccacgacggggcgatggtccaagtggagggacaccgtgtaacacctccacagtgcataagtacttgccccggttggagttgcctagaacggctagcgacatcaaaccttggaatggacgccgaggacgagataagcgtgacaatcaattggccccggggatcatcgagctcaggtatatgagcccccgttcctcagccctgcagaatgagtgcatttctacttcgtactcattatttcctcgattgctgacacctttacaataaaccaagatctcgctttcattacttttccctccatcaactcgtggaccatcaccacttcaactctacttagatggcggttgtctttatctctcactgtccccaacggcttcattggcattcttatactatatctctgtgtcaggccattcgcagagctagtagaaaaagtacccggacgtctaaacccgttcgctaagaacaattgtcgctgtccaagaaaacgtagtgacaaaccaagaacaagaacaatgtcaatcgaaatcgtcccgctcgttgagaacgacatacctgatgctgtaaactgtgtgcagaaagcgtttgccgatgatccctattttcgctgggcgtttgatgatccatccaaggtatgagatatcttattttgcgatgtacccaaacgacttcgttgtggctgtgagaaaaacatacaaaaagaaataaaatcatgaaacaaaacgaagtcgatgtcgaaccaagtaataacagggtttgacagttcaacatccaacgaaacgcagcctccctcgctgcccatttccaatatggtatcaactgcgactgccccatttctgtcgcgaagatcactcgcgctgcaaatgaaagcaagagcgatgacgacattcgcataccagttggtactgtggttggtgttgcctggtggtactcaccacaagcgccttccatgccagaaacctggtctgtttgggcacaaggctggcttctttccttccgacagcttatgaacaatatccgcttccttggtcgtggtggtctgaatgtgcaccggtattggatttggaagcaagtgcagcaaactgcacacgatgccatttggcaggacccccgcgggtactacttttgcaatgtcgtctgcgtcgcttcggaggcgcgtggtatgggagtgggaaagatgctcatggataatgtcatggacaaggccgaccgggagaatatgccgtgctatctcgagagctccaaggggtatccgaacgtgggtatttatgaaagaatgggctttgaactagtcaaggagattgaatgtgtggacggaggggatgtttgcaaggtgtgccctcttggctgtaattttccatgtcaaatgactgacgcactaatccagttatattgcatgattcgcaaacccaagtccaaagaataaggctgtgataaattttccgatactgttcattaacacagatacacagggagattgagtgacatggctcgattagtatttgaatcaagcatttcggtgactgtcatctttgattgctttaacaacgtgagcgagatgatggaaataatcgaatatagcttttctaaagcttcgttttcccagagctaatttcttttccaatcggcgtctcttttgtcttgggtttcggtcggggaatgccacaaccggttatgaaggcctctttcactttctactgcatctcagaagactttatctgagaattcattggcgctcaccgtcattttgtattaggaatatggcttgttttgctgctgtaaagacaaagttgagagcgagagaggcacatcaacaaccatctattttcataaatcgatctttccaagccatgggcgagggtgcaatgcctctgtagaaccctcggaccccaactggaaagcagtcgaatatgaatatccacttccgggtctgcctgaattaggcttcaatctctctcaggtcaacgcctattctcagagcatgagtgagcttctacacgtcgttcgatactgtcgacaaacgcctgtgaagtgatagcctaggtgagcgcttatgatgtctctatttttagaatcagttcaactatatacatatggaagacaaccttggaaggagacaggcctcagcccatgtcgcccttatgatcaagcccattttcctagcacccccatcagcaccagcccactgatgaaggaaataccaccggttagaacttttcctaactttgcattcaacatttcacctccctcaatgacccagtcacgcgcccacatatcaacgacaccaacccacaccagaataccagcagacagcgcgtccaatgttcctagtgcaatcaaagtgccccgcgaattaccattgaaggtgtgaagaacaccaagcccaatagccatgccaataggtgtgatcaaggcaaatgctagcgccatggacgctttgttagggaatatagctccggggagggttgcaatacgagcaccgagtgccaacccttcaaagaattgatggaacacaatcaccacaagaagtgtcttgtagaatgagtcaccagcaacgacaagggtgaggccaatcaaaatactgtggaacaggataccagcttccatgacaacgaccgaaaatttactgtcgggtccggtaaggtcgaacgagccgtgattgtgactaagagaagccaacgtggactgttgctgttgcgccgaagagtgttcatgctgtcccttctgctgagtttgctgagactcggacggtatggtttctgcggagatattcttgctgtggcgagcaacaataatccggtggccaatgtattccagcaagaaagcaatgaatatacctgccacgactaccgcggaggttgtggcttcgtactcgagttctcccaaacattcgttggtaaacatgaggttcgcatgtgtgtatagctaaggaaaagcagtcagcaagtgatacgtgtgtcaaagttgaaattgcttacatggatgaaacccgtggcgatgatgatgccagttccgaattgtttgatgacggtcgagattaccccattgatagaggcaaatggaagcttcatcaggagaataggggcaaagacaccaattgaactagtgacaaggacaacgaacaatgtgccaatcctcagagggatatcgtagtctcttgcttggacagtacacgttgaaccagtactagtttcctctgatgcacctgtactcgtgcagtgtctagaatagccaaagtcaataacgcctaaatttggaaggattattacaaacttactcgacgccagcgtggaagtggcagttttgtgaagcttcgcttgaggattcctcctggtcatcttcactgtcttcggtctcggtctcggattccgttccttctgcttgaatcaggacatcgtttccgtctccatccatgcagtatctttgaattttgtagtttagtatattgtcacaaatatgcgtacctgtggacttacgactggcttccgtgagagtgacacccagtgtattgtgctggtactccggttgtaggggtagatgaggccgaaaccagaacttcttggccatctccatcaatgcagtaaatgcttgagccatgagtatgacaaccagttacagatgatgattgtgctgatgttgttgctgtagctgcatatactctggcaatgcccagtgatagaaggaagggccgaaaaatgcgcatgatgaagctagtgctttacccttttgcaaataagaacgttgggattgaggttggaattaggatcgatgcaagaaacctgccacaagtgaggagttttcaatcaatggacactgggagcactccgctctaaaaagccgcataatatatgaaaaagcaccatacataggtgtctcacccccaaggttctcgatgccaagcggaagacctttccaccctttcgccaagagcaggcctgagcttgcgattcgggctttgtccggagaatatcgcccactaaacccttgtactctcaaggtacctcccgcccaagtgtcttggcgaccctccaccgagcctttgtcttggcatcaatctgagattttcagctctgattgctggagagcaagatttttagcgagaaaagcgctcgagtgagctctcaaggtcccctctcagcaggtcgcaccatctgtatattgagaaaaatggagaagacatcccactttctcttctagtgttgccttggattggatcgcaggcatagcgaaaatgcgcccaccaaaagccacacttggcaaatagttgagaaaaaccaaaatggtcgaatacggaagctttggggaacttcgtaaaaatggtataaaagctgctcctatcgtggatagaaacttacttctacaatttcaacttttcaatcaatccacctcgattatacgaaaatgcgcttcttgaatctcattctctctgcagcagttgctgctgctctccccacccccgagagctccgaaggcaatcaatcccagcccttctctcagaatggacttgcaccttgggatgccggcgctgtgaatgaatttcccatccattcgagctgcaatgcaacccagcgtcgccagattgcgcaaggtcttaacgagactattgctattgccgaacatgctaagaaccatatcttgagatggggaaatgagagtacgatctacaagaagtttttcggtggtcgcccaaccatggaaaccatcggtgcattcgatgtcgtggtcaatggggataggaaagaccttttgttccgatgtgacaacccagatggaaattgcgacattgaaggtattggatcttgctctgtgttagcgatgacttactaaacatttgaactaaataggctatgccggacactggcgaggcgaaaatggcactcatgagacagtcatctgcgacttgagctaccaaacccgtcgttccctctcaactatgtgcggccttggatatacagtctcgcaatctgaaaccaataccttctgggctaccgatctcctgcaccgcctatatcatgttcctgccatcggacagaactgggtagaccatttcgcagacggatatgaagcggtcgttgacatggcgaagacgaatgcgacgctgtcaacccatgattcggagagccttcagtattttgcactagaggtatatgcttacgacattgctgtgccgggagttggctgtgcaggtgtccaacatacgcacgatgaagctgatgaagctgatgctcaaacaacatccgcggctgtgactagtcagtcaactcctactgcaacaaccaccgatgccccttcgacaacctcctcagtacctgcggtgagtcgctctctggttgcattgtggtgatcagaaactgatttgaatagaactgccatacacatgacggaggcgtgctccactgcacttgatatttcttacggtgaaatcactcaggcatcgagacaaagatcaaacattggcgggataatagtcctgacgtgaaggaaattgatgggtgatatatgatatcaggagagaggaaaggggttctatgggcccaaggcatcagcctcagcagatttacggattgtaatgtattatggtctatattattactgagcttatttgctacttactatgcgttgaataaataaacatgtatccaatttctacggtttgtatttggctctcgtggttttgtttattaagcatagtggatctaggggtaagaattttttcgcagtgagttgttgctatcttgacttcacccttgccttgcccctcatatcgtagcagctatcatttttgaggagttgttaggcttggggtaaactacatagtccatctttgataagtaatactggcctattagtgagtgagtggcgaggctgggttgcatactgaggtcgctatagatactaactggcatgatcatgaggtagttatactttgccggtattactctcaacatccgcctgatgtgtaaaaccccatagtaaaataaagtctaaagtctaataagaagcttaattggccgaagtatgacatttctctgtagttacttctccattattgtacatgatgcaggtgagcgattcttgagtatttgagtgccatccaaagatacttcgaggttcgtaggcaagtcaacgtcaatgctgcgagtgagccggcgaatgaatatatattcatgtgatcaatagtctctcaaatctcctatcatatttaaagggatttgggttggacgtacgtgtattttgttctacattctatgtttttataaggaacatcgtcaagatatatatcaataccattacggattagattattttgctccaacctaacatggcctatcatagaaaaacgcccaaggaaagtgatcaaaaaccacttctctatctcattgaacaaatctattgaattagttgtagccgaatataagaatttctagcttcctggtaagctttgatagagggagggctgtagacatctactcaacagtttgcccagaaatttggaaattagattatgttgatttatgactttatgatgctacttagtctactgcaggctgccggtgtgaattgtacaatgtcagccagcttgtaccgcctccaggatgtgacctacaatatcctccaggatgtgacctacaatatatgaaccatgccgggatagagacagcccgattttaaatacgcccctgtcgccctgtagtctgttctaccgagagataccaacaacagcgtttcctcaaatgctagtactagggtggagcccacacccaagtgggaaacagggttacaatgtcaaacagagcctatggagagaggacgtggaacaggggatcgcatgatcgaccgataagaatgccgttcgagcaaagatttaccaatggtagggttcttttgctgcaggggaatataatttacactataaggggcattggaatgcttgtagacacacgagatgccaatctaggggtgaaaaacaaccctcgagccaatgagggcattgtatccctacagaaatgattcagttcccccacagggtgttcctgaatgtacctaggaccctttaaaacaatccagattgctgttgccgtggagttgccccaaaacccgtccaggtgcgcttcaagaggaaaccaccactcatccatttttatctcaaaatatccttttgacgggcacacattcgcccctcgactatttaaataattatattccttattgtgataagtccgagtgatgagactgtcgcggtccgcctggacttggagtgcattccaggttgatacggcattgtttatgtacggcagtgtccccactgttgccattcccgttgaggcaatcacaacaccagcactcaagaccaaagaaccacgcccagtaaaacgatccaagtctaaacgaaaaagcctgaagaggtcactgtccaagatcttttgatctgcgaactcgatatcctcccttcctagccacatttggctgatcgctatgagtttgcacggacttggagtgattggggcccaggtggccgcatcgatcaaaagcaacgacgagaaaatccctgacacgcccaagttcgcgcccccacgatgctccattacatcctcgcctggggctcacagccaggagtttgatccatcgattggtgcaaagccatgttcgcctttctatcctcattcaagtccaacaatctcacatgaacaactcaccttcgaaacaaagaacgccaatcggagaagccatatgagagatatcgaaagcctgggaccgtacgcgagctgccgaacggatagtccccggcgatcgaagttgtgggaggaagagaacaagccattgacatggctgcagaccctgaccaataaacaacgaatggcactgaaggcagtcgtggctgtggtaacagtggggactatgattgcgatagcattgggcatcactgcggcggtgggaggagcaggatggaaagccagtgctaaaaaaacggcggttggtgtatgagtgagttatctcttcgagtctctttcacctattgggttggatccaccgctgacaggacatgcaacttcaaggttcgacgttacttttgattcggggcgacgagcagcccgatcaccattcattgtgattcacttgccgagctctccgacctaaactaattactcttttctttcttgctgcttgaggatgttatggagaattggagtttaggagcatttgaggttatcgcactcgtccaggggcatgtcacattccgacatgaacaaaatcctacgggtaatgaattggacatgtcatgaactggccggaactgctgtatcatatccttagttatttctttttacccccctattcatttgaatacgacctgtgcatgagttgtcatttgtagctcttgaacttgaaaaatgggagcgaaaacgtaagctaggtcggaccgacctcgggactaagcgggatagtgtaaatccgacccgtgaccccactagcgctataaaagactgcaaacttttcggccccttcttccttttcttttcttcttcatcgaaaaaaagcaactgagcctgccacgaccattgtcctgtcttacgacatccccacgacgatgtgttgccttcggtcctacggacttcggtcttacgggactgatcggctcaggagatagatgatcctcgataggaagttcgtttcccctctgtgtcctcttcagtgagggcggtgggatttgaatgtcgaagacgggacacattccttcgcgtcaactctgttccagtagttgagagcgagagtaacgaccaacgcattgattcatgtgatggtttactattcatagaattacataggagaacggaagatatccaatccaaacaatgcataaatgctaccagtctcagagtcacagtgcaatgttcatgtaatgtcgagtgagctagacctaatactcggtattgacttgacatcactaggaatccatgccatatgctatccggtcgcacggtggtttaaccgaacgaaggacatggacaagatcgtccatatttgagtctgtttgggatgagtcgaacatgactatggcatcaattccgaacgacgagtgcaaatttgtcaatcaaaatgtcccggaccaaccaaggggcttgctcgatctctgaatgcccctacccaggtggtgatctcacccctctcaccctgcggaatgcagtatcaccgcatttttaggggattgcatggcagatgtttacgatctgaccacgatcgaggggtattctcttacttgttggtattattttcattccttacgacattctaatggtattaccctcgccttggcctcatgtcaggatgcagttcctgttgatgcaacggcattcccgcctgcttgttgagctggcgatcatgaatgcgacgaaactactaaaggtgtgaaaatttcctgacgatggattactattcattgcttcaaaggagaatattccatcaatcgagccattcttttatcccgctccagtagcactcgtttccagtcactcttttaactcctacgcgcaagagcatacgtctttttccagtaacatcccccaagcaacgcaatcatgaagggctttatcggtggaatccctgtggcattgctggcagttgctgcccaggccaagtttgctgaacgtgtatgtcatcctactctcaatatgccgatcctccagctaacccaatgtatagcacgagcatgacttccatccccaggctggtgggactgctatcggtggaccttcaggcaatgatgatttccgcccccagactggtgctaccgccgtcaatggacattctggccatggtgacttccatccccaggctggcggtaccgcgatcggtgggccttctgggaatgatggcgacgatggctttgtcagcccctactctgccaatatcaagaccgataccaaggtgaaccagtggaacaaggatgaccactccatcaagctgaagcacaccgatgtgtatccccgccctcccgtggcccctgtgccgtttggccacccgggtgtccccagcggaccccaggtccctggaatgggacctttcggcaagggaaagcgtggtgctccaggtggaactgcaatcggcggcccctcaggcaatgatgagggacagagctttgatatgtctgtgactggtattttcaacaccgaggtcgaggatgtcaacaaggatgatcattccatcgatgtcaagaacaagcatgtccaccctgttgccgttgtgcaccctccccctcaattcaatggaccccctcgtggcggctaccgtggtcctgctggtccgccttccgctggcttcaacactcctccaggggccttcgggaagcgcttcgggcctcctcacgcaggtggcaccgccattggcggcccctctggcaacgatggtggacagagtttcagcgctccgacttacattcagaccgacactaacgtcaaggagcacaacgaggacgaccattctatcaagctgaaacatgaggatatctacccacgtcctcatggccatggcttcgttcccttccgtcgctccgagaaccatggacctcctggtcacggcggggctccacctccgggtcacttcgagcctcacgctgagcctcatttcgagcctcacacggagtctcacttcgagcctcactccgagccccactacgagcctcacccggaacctcacttcgagaatcaccctgagccacacttcgagaaccacccggaacctcactatgcgcctcattacagccccagctatgagcctcactatgagccccacaccacagtggagcatgagcttacttcgttgaaaaataacaacaacggcccctcggctggcagtatcgcttttggtcgccgcgggttccctggcggcccgggtggtcctggtggacctcgtggccctggtnnnnnnnnnnnnnnnnnnnnnnnnnnnnnnnnnnnnnnnnnnnnnnnnnnnnnnnnnnnnnnnnnnnnnnnnnnnnnnnnnnnnnnnnnnnnnnnnnnnnnnnnnnnnnnnnnnnnnnnnnnnnnnnnnnnnnnnnnnnnnnnnnnnnnnnnnnnnnnnnnnnnnnnnnnnnnnnnnnnnnnnnnnnnnnnnnnnnnnnnnnnnnnnnnnnnnnnnnnnnnnnnnnnnnnnnnnnnnnnnnnnnnnnnnnnnnnnnnnnnnnnnnnnnnnnnnnnnnnnnnnnnnnnnnnnnnnnnnnnnnnnnnnnnnnnnnnnnnnnnnnnnnnnnnnnnnnnnnnnnnnnnnnnnnnnnnnnnnnnnnnnnnnnnnnnnnnnnnnnnnnnnnnnnnnnnnnnnnnnnnnnnnnnnnnnnnnnnnnnnnnnnnnnnnnnnnnnnnnnnnnnnnnnnnnnnnnnnnnnnnnnnnnnnnnnnnnnnnnnnnnnnnnnnnnnnnnnnnnnnnnnnnnnnnnnnnnnnnnnnnnnnnnnnnnnnnnnnnnnnnnnnnnnnnnnnnnnnnnnnnnnnnnnnnnnnnnnnnnnnnnnnnnnnnnnnnnnnnnnnnnnnnnnnnnnnnnnnnnnnnnnnnnnnnnngacccaccccgagccccacgttgagaaccaccccgagcctcactacgagcctcactacagccccagctacgagcctcactacgagcctcacactacactcgattatgagttgacttccttgaagaacaacaataatggtccttccgctggaagcatcgcttttggtcgtcgcgcgtatgcccctaccccggagaccagcgttggcggtggtaccgcaatcggagggccttctggcaatgacggtggtagcggtttctccactccgactaacattgatcttaccaccggtgtgaacgagcataacgaggacaaccatgccatcaagggtgacttcacccacgtccaccccgatgctcccgctgagtactcccgtgaggatcatgttgatgctcctgagtgcgctgcccaggtgcacgaggttgttcacaccgtcaccaagacccagtacaagactgctgaggcgacgcacatggcctaccagtcggcgcccgttgtggatactgatccgttctccggctacgctcctcaggagtccttcacccccgttccctacgccgactatccccagcactctgccggagctgacccctacgcctctcccgctcctgctccttccaactttgtttccggccacccttcctaccccgtgcccgcgggtgagtccgtggtccgagcgcatgcgcctatggccacccccgttgcaagttctagcgccgactacgaaaactaccctcagcaccctgtaggggctgatccctacgccgcctcagcttccgccccctacaactatgcttcccagcgtccctcgtactcgaagatcgccgtgcatgttcctatggctacccccgcctccaacgccgcaccgtccaatagcatgggcaagatgatccctactggtgcctccgctgagcagaaggcttctccctcgtcctccgcgtcggcttctgtatctcatggaatcatgttccagggtaacgctgctcgcgtttctggaggcattgtctctgccgctgctgctgttatgggtgtccttgccttcattctatagatcgttggccgtcggtttgagctgcttcgtgcattattagtcctcgtcattcgttattacgcgcttcatgtttccttcaaaccttcattttcgtacaacgttactgtaccttatccattggcccagcctttaatgacgaatatttccttcagaaagccacagatttaccacactcaagcattgactcttggtttctttttccgactcgtagcattcgttctgtaactattagcgaagcccacgcccatgttttgactgaccgattgataagaaaccatctatcaactatagcatttcatgcatgatcagtggaacactcaaccccaacgaacatctcatttgcggttcgtgatcccgaacacctatgtacctatgtaggtagactccaatagtgtgggtcaattcgtcttgataacaagctggcatttgggttcgccactccgaatcctcaagctcaatgacaccaaaacccacctgaacttgaattccaggatattgaccctcaatccaacaatttccggtattgcatattaatcaacggcattttcttaatttatttcttgtatttcttctctgtgcttgataccaacgaccaattaatacccatgtgacatcattgcccatcatctctagatgatctccaaccgttgtgacatcagtacgagtggtacaggacctagcctccagaacaaatataaaagggtaccagtatagtctgatctaattgtatcaaaccacgctactgcaacccaaatacttcattcatccctcgatatctcctccactggacatcaaaccgcttcgaatccaacaatcacttatatctccaaaatggctcagcaaaacccccaccaaggcggtagcctctctgaaatggccgcccaaggcacacgcattcccaatgacgccggcatgatgaataccatcccctcggtgccacgcccagaccagcgcgccgagcacttcggcttcgacaacggaggtatcgccgagccctcaacagcgatggccgctgacaacactaccgacctgccacgttcgacccgggatgtaggtcagaccggcgaagtcatcagcggcacaggcaactccatgccggccggcattgaggccaagcatgcctacatgggctccaataaccacgctggccatggtgatactcgcgatctcaaacattccaagtataaccggagtgagtttgagcgctatcaggaggagtagagggtctcgtcaaccattggcgtgacattttcgtttttcaaaatgatggctggcttccttggcctcgtgctatccggtgtatgatgttatgaatggcgtttgtcatatgtaaaacaattcaataccattgaacaaatcccattagactttctgagtagagtgtgctattcaatgattagattcgtagcctgggctggtcgggcccaataaaccctttatagagttcttcgagaacatctcgcttcctcttgcgatcggcttgagctgcttgctcggtttcagtaggttcgccgtccggatcttgagacacccatgaccggatcgttccatcgccgtgcgcagagaacatctctatcccttctccagaggcaccattccctcgccaggcaagatcattgatacgcccagcgctcaaagcactcgaccgaccgcgcacattctgtgacccagccatgagacccggcacgcggagacgcttaatgaatgtcccctcgcggagctcgaacatgaaaatctcaccacgatcatcctgctcattgaaattcggccacagtagtgtttcatgtcctggattcatggtgcctttcggcactattaacggtgctcgttcagctaggtgcgaggaagagctattacggactcgagggccaaaatgaacaagtgtattggcgcctgttgcagagtcccagactcgaattcgggaatcctgtcctgtcgtcactatgtgactgccattagaggtccaccgtaccccggttacaggcccattgtgggcacgggcatgccgggagaaggctggacgactctcgtatgagatcggtgccgatccagttcctggggccaccagtcccactgggtcgtccatgtccagggtagcgatggcagagttgtgacctccgtgacgcacgtcgaatatgatcacccggttgtcaaccgatgcagaggctaagagatgcggccgatgaggtgcccatgctactgataagactgcgccgttgtgtcccggtagaccttgtgtcgatagtccagatcgtaagtctactagccggaccgaccggtcagacgtgcctactgcgacaagcagtgttgacccaggctgagatgagaacgagtgtgaatatggcgtacagtctaggttgaatgtatgtatcggtgtgatagagggcgattgtagcgccgatagctttaatgtaccatcgtgtgccgtcgagaagatcgtcgatgggacgggatcaaacgggtagatcgacagggaggtaatcgcatgtgtatgcgcgtcggcgtgagaggatttgctaacggacgcgcaggattgatggacgtgttcgagttctgagcctcttgattcaaggtcccagagatgaatcgatgggtcggcacctcccgatatcatactgccctcatgttagattgactgacacccgtcagatgctaagcggtggcacacgcactatcggccctcaaactgatcgacagcgagacagttcacaccggatttgtgagcaaatacctccgctgtggcacctagctcttgatctagaggcgccacatcgtcttcggaccggtccgttggcgcagctgctctgcggctggaaaaccgtatgcccggagcgggctcaatgttgtgcactagcctggttgtttgagcaacatggaattcatttggagttacagacccaagggctctgttgagtatataggaattcatgcattcatcagcgctggtgcttttgcatggagaagtcgagagcactcgatggtgctatgcttcaccgggttaaagttgtgccggcgcatttcccgaatttggccgctgaagatcctcgatctttactcctcactatccgctgcacaccactgtttgatttgccaaaccttgattggtcttcctggcaaacctcaagtatgtctgttgctaggtcactcagcttggatgaggacagttctgtcgagcaactcgaagataagcaagaagcaccgggcgataagccttcaaggcatataaaacgccgcgccaacgtctatgatgcggtagctggtatgttttccgatgcttgccgagcgtgttataccaagcagaaaacatatctaattgcaactaggtcgcgtcaacccccgtggtgtcaacgcaccccgtcacattgcttctctataccgcgacacaacctcatcaagcgttcgaagtttgcgtccagaggagcttctctatcgcaatcagaacattccagtggaatcgatcgaggagaaaacctacttcgcgcatgagaatcttccctctgaccaagctctcccgaactctgagctccttgagacgatacatgcatatgcggccgactactacgaatacgctacggcggataacggcaaagatgaccatcaaaccatggacgagacagcactacttgcatttgggatcctgattgaagagatggccaaggaggaactgggtgaaaccggggatctggctctggttgaaggagaagagctgtcggaggaagaggacgataagacgggcctcgagagcgacaccacagctaaatcagcagcacgaaggaaacgatcaaacagtattgtccgtcagagatcaaaaagacgcaaattggctcgttctgattctgttacaaccgatttggacaccgaaattgacgaaagacggtgactggatgacgttgtcagactgcacctatttctccgcggccgaatcctctcggaggcttttgatgcttgcagctgtatcaagctatgcgcgatcttgcatagctacagtaaaacctcttgaaagggaatcggatcaccctatgcactaccatggcacagccacgctgcacatggtatcggcacatatcccatcagcgaggcaaccaaatcagacttcaaagactctgatatgtaagacgatagccttgctgcgcctgcctgtgcgcctcccgctacaccgaatgtctttaatggagctatacacagaatgatagctccgaggagagaacttgcggtggttaaatcggccaatatttagccggctggcaacaatctcgagatccctccctcgtcgaaccaaaataccatcttggttatgccgtgcatcctgcatgagcttcagttcaattatggctgacactggggcgacatctggttgcgagacctcgtttctgtagcaggatcttgtctcacttgacacgtctaacccaagtagggtcttccaggaatggctcttcctagaggttattacgaattttatatagtcctgcgtgaatctagtcttgcgctgactcccaacaaggctatctttagcagcgttagtaatctctatagtcatcattctacaaatgtgttcaagcaaaataaaaatagttgtacagagaaacccttggaatagaaagggtaagcaatgtcaaatgttaagttgagtttccatgtatggtcttccaaccttaggcaggttgtgttgcgtgacaggtaagcctccagttctctcaggtgggctgctgactttgaactcatccatcactgcgcctccaccaatgcttagccatctcatacttgtccaatgagtggacgctggattgataagctttttcgaagttatttgacagtgcgtgaaatatggtacgtggcttttagaatgttccacctggacaaggcccaggaccatttagatgagactactgacgcgccactaggccaaattaaccaaaagcgataaacaggatttgattttgactcatctccgcgccactagaacctgtcacacgctcaaggatttagagaagtcgctaccctcggttgcatccatcaatggtatccaggtcaaggaatacatccaagctttaaccgacgagggtcaactgcgagttgagaagatcggcagtgggaactggtactggagtttcagcagtgacgaaaagcacgcacgcgaccgccagttggcccgggtgactggtgaggtggagaaagtccggaagtcttgcgccgatgcagaagcggctttggccgctgaaaccatgcgccgaggggaggagacagatgacgagcacgaaagggaatccctaatggccaaaagaaccgagcttcaggtggtaatcgatcgggtacggactacggaggcccaactctccggacccctcaattcgctcagcagcaagggtgtgaagcaggtccaagaggagttagcggggttccaacagcaggcactgcaatggacagataatatctacatgttagagcagtatttgcgcaaattagtgggcggagatcgacaactcattgaaggtgtcttgcgggaatgttatggagacgagtacgtggacggagagggtcttgctgaactaggataggataaagatttgaggaaaaaagcttaggtttgcttagcacatggcgaccttggggaaattatgtgaaacttgaaaccaattcagtctttagttcttcgtgatcatcatataaatcatcgagaaaaaggagaaataaaactagttgagccactcgggacaccaagagaagcttgaccgtgcgacacgcgaatcgaaagccccgtctagttcgttctccgcctctcggaggcttatcgcgaactcccgaccctctctcctccctcttctctttcttctcttctattgtcacatcttctcttattctccccccctttcgactactataaacccctccgatcgtctatcaaagttggctcctgcgttctcgagtcccacattcctcccgatctcgcgccatctcctgttgcgcctttcaccctctctccccggcccccgacccccccgacccccgttctagactctcgactacagcacagtatcccgcgatactgagccatctgtccctttcaaccctgtcattccccacgaaaaatatccactcctttatcttgcgatctgaccttgcctcctgatacgctgcgagttcttggcgggggtactgtcgaaatcctgcctcgcgcttcgatgtcacaagaaacaatgtggtgcagtggccctctatcataatccccattcctttctttggactcgggaaatctctcgcgcgtggacaaggatacattccgtgggcctttggaaatcagaccgtgtttagtgcattggtcctggacgccagacccttcgaaaggattgatcttccttgtgtcgcttgattggatttcttgacttaggctgagtgcctcctggtctgtttgactattccccgccattccgtactgcagagaataccggcgcgtgtctccgtccgatcggcgccaaatcggtcgcagtttaccatccccaccatccctctcacccctgccacgttttcttgtatagatgcagtaaacattggctgtgtgtcatgtccgccaaccctccaacccaacctacgttgccggccagtcggaatcgcaactctttcctatccaaatttcgctccccgctcggtcaaagaaatcgaggcatcaccgacttctatatcgatccagatgacccatggcgctcttatttccccggtgatgtcatcaaaggtaccgtcgttgtgaccgttgtacgacccgttcgcatcacgcatatagtcgtatgtctccacggctatgtcaaggtgttcaagaatgcgattccggcaggagagacaacacccgacttgggattcttaggaccagggcggggtcgacgaggtgcagaatacatgggcaatgggttagcgaccttgttcgaggatgagcttgttctctgtggcgatggacgcttgaaggagggcatctacaagtttcgtttcgaaatggggcttcctccttatgcgcttcctagcagcatcaacgtgcgtttgctgatgcgacctctcatacttaaatatgctaatcaaatgggcaactgcagtttgaacgtggaactatcggctactcgcttacctctacccttacccgaccgactaccatgaaccctaccctcacatgtagaagacgggtcaatcttttggaaaatatcgacatcgcacccttccctgcacccagggctcgcatagttaccttggaaccggtatcgaggcgctcaaaacagaggggaaaagcaaagtcaacaagttcagacgcaaccgcagggccggacacatcctcggtcgatacccctattagtggcgcggcaccctccgtagataccagaccaccgctgagcccctcaccaagcaatgtcagctcatctagccggcctagcgaaagcagtcagagctttcgaatcgccagcgatcccagttcatccgcaagcacgagtggaaaaaatagcgagggtcgcagtgtgaccccatctgtgtccgataaaaccatcaccgcaaaggctgagcttctgcgcgccggcgtgctccctggcgataccctacccatcacagtcacgatcaaccattgtaaacaagtgcgcagtgcgcatggaattatggtcacattataccgtcaaggtcgcattgatcttcatcctgcaattccaatcggtagtacggcggccgggaaaaagccggtatacgaagactgctatccgcggtcacgaacgggacttggaggacttaccttgggaacaagtcggacaagcagcacttttcgtaaagatttgtcgcagacttttgccccgctgatcgttgatccaagcactatgactgcagttgtaaagacttccattcgaatacccgaagacgcatttccaactattacacgagtaccaggagccatgatcaattttcggtactacgtggaggttgtaacagacctacgaggcaaaatcacttcaccagatcgcttcatcccgcgtttcaatatggtctccggtgggactacgttttcacctagcggccaggccctcaatccagccgattcgaacggcgttactgccaactgggcgggcaatatcttggacacagatgcaatccgtcgtgagaaaggtgtgatctcggtggcctttgaggtcgtggttggaacgcgtgattcacaacgagggaaagcgacgaaacgtacatcatctacagctggcgactcgaccaagtcacaaacggcgcctcctgcttctgcaattctacttaaccctgttgatggggaggagtggccagagatcagtccaatgcctaattcccatggcgaataccatggcgattaccatagcgattaccatggtgaatacgggacagaggaggggtatttcccagaggagacggattgggcagagtatcctgaagaatacaatgaaaatttccagccaatggaccctatggttgcgcccgcagaagtcgaggagcctgttgacgagaaaacacgggtacgacgtcacgaagaagctctcttacctagtcagccgcctgaggaagatgaggcaggcccatctacagtatcaatggaggtcccgaccgcgccggttttgccagatgatcatcatcttcaagactaccagcatgtgccttcaccagatacaagcggggggccgcatactgttcgctctgcggaatccctgcagactgttgttgcgaacggcactgggcccagcgagccacgtacttcaggcgatgataaacaagagcttgagcgtcaccgactccagcagcaggcgagtgcaccgcaagacgagcccagtaaccaggaacccagcgccgggcccagtgcgccagtctttgatgaggatgaccagctagtcggtgggacggcgcatgccgacgagtcgttgcctcggtaccagcgatgatgttgttatgtacatttgcatttacgggatattctggaagataccactattcgcatcatttatgaaacggcgctaaaggcgttgaaatctgtatcatacatttatttgtcaaaatcgattctcaaatctcacataaaatgtttcaatcctctactgtcatcaattgtttggacatccagaattctgtctaggatttgtaaaacgcccttatctcccggctacgggcttggcatccgcttagcgatacctggggtgacttcagcctggcccctggtcaatctccttttccctcacaaaaccccgtctgcttttccaattttcacaatggccttcaaaagcggctcgttcgcgactttcatgattgtctgccgtaagtccatcgcatcgcgagtccccggactccaacggcaaagaggccacgagactgtaataaactaactcagtctgcccaaccagcgacctgtttcttcttgggcattatcttctccctcttcccttacgactacccgatcttgtggtccacagtgttgacacctactgcacactatgactacctcgaagcgcatctccgcttcctgcacgcctcgcccccgctcatcccacgcatcctgcacatcgtaattttcgtcggcctagccggcctcctcacgaagctctacaagccctccgaatcaaacatgctcttcgatggcgcctcgctggtcctctacatgtgcggcgtgacagtctacatcgccaacatcgtcaagggtctgcgcctcgcctctgccggccggtacggcgccgagctggctacctccaccgacgagaatgagcagatccttggtcgcgaggactcgctcaaggttctttccgctagcaatactattctcgccctcgtcctcgttggcatcctggtcctgcaggctgggcagtggtacgcggagcgcaaggatgcgcaggaagatgaatcgtttgctactagcaagaagactgagaaggagtctggcgaggcgacggctactacttccggtgcgtcgactgcgattgctgggaagtctggtcggctgggaagccagcgtaagaagagcaattaattgatgtctgttcttaattgtttctctttcttccgttcgtctttgccatagggatatggatactaggtgtgaagtggcgcgcctgagtacttgctttgcttggtagctattgttgtctttctagtcgcctacgcagacgggtatttactgtcgcaaagaaaatcattgaagacgtcttttttttttcttaattgccgggggttcaatgtaattcgactttcgtctatgtacatatgatccataaatatagtatggcacgttcacatagcaacaaaataatatatgaaaatgtatgaaaatgtatggatatggcatgatatgcatccgagagtatggacagaacaaaaaagatggacggatgatcatagatgcatgtaatgtggacagatggtatggcaccgcagaaggggaatcattgcgcaggtcgtgaaagatggtgtgtggtatcatatcatgcatgagaaatttaagttcaacggaatgagaatgggctgcgaggcagatccggtgagcgcggactcagtgccttggcgaacaattcttcgccggaatcattgctcggggtgcgcgtgattgaacccatggctgcatccattgctgtaaacccagtgggctcgcttgtctgttgagtctcctggaggaagtcaggcgggaagagtgcaacgggtttcagtgattcggggcccgaaagattaatgtgagagcttggggtaggggtgggattggtgttaggcgttggcatagaatgtaggtggctattagcgatactgctgaacgagctgaaagaggaaactgcaacatcaggcgattgcggggaaagaagcgatgctccgtgagaacctagtcctagtcagtaagcttctgggacatgtaagtcggtgtagaaatacataccacctcctgacagatccttgtcgctggtctgcaacttgagtcccttaagtttgtcactcagattcctgccactgactggtgacaccggtgtggctggatacacggaggatgagttcgcggaatcatggttaccgtcaaccgagtcgacagcacgcgagcctattccaaagttcaactcaatccattccttctcctgaatggccataagcagcgcgattccttcggcgttgttgcgtgattcatcctcaatctccttttcaagaacttgcaggcgcttcttcgcccagatagtatgcaaaacgccctttttgccagctgtgcgtcccgtggcgcccaatgcaggagggaaaatggcggggagaggattaagctggaaggtgtcttggggccttttaggggcaggcacacctgtcggcgagggtttgggttcatacgacagagtgacaatgggaggaatggtagtatagggagggagcaagaagtagcaacggcgtaggctgtcactcggtctttcatcggcgggcatcgtggcggttttgccggcccatgagacatgccacgacccctccatcgcagatcgggtcggatcgtcgtcctcccactcgatcatcaggattttagtgccatcattagacctgccagcctcgaactcaaatcgagccagcgccattaacgaaaggcccccatccttgaggcctggagaggtttctagctcagcgaattcgctatcaggggtgaacatgggtggtgcttgagccatggcagtggaggctgtcgggcgcgtacttggggaacttgagatccggactagaaaatgcgggtgggctctggcgaaatcacgaggggcgggatgggaaaggaagagtgcgctggacaagatacagacggcggatgggcggagtggggaatgactgggcgggggttgttacgactcggtgatcacgggatcgtaggaagaaagcacctaggcaggtaaactcggtattaattgtcaaaggccttgccgtgtcggggttgctggagtttcatgtattgctgggatgcaaagttggagcagggggtctattggttcctctaattttagaaccgcggcttggcatttatgcaaacatcccagcattgtacaggatggctttgcaacactggattcatctatgtaatgattttcagatgactccagtataatgtttatattattaaggtagtctccaaattctcaacttgttatgatgttgcttggatggtcgtcctccaaaaaccaagttggcaacagactattgtcttttgcttcttcttcttcttcttcttcttcttgtcgaaggaaaagctggaatgccagaaaaaaagagagatgtttggtttgtctttggacaagtctcaatcaaagaagttgccgaagtttaaataaaccgacaactgaacccaaagagattgaaggtataacaattctcttgtatggacttaaactcatgatgtgattgctactgccttataggagcaagaaaaataagcaaaaggacaaacattggcaaggcataaggtgagatctatattgagcggtgatataagttagtatatcataggaagtggataggatggcttagcaacttctttgaccgaggacgacttctaaagatagaaacagaaccgacaacaagtctaaagtacaagcgccaatagtcaaatgtcagatagtgctactgactccaaggtaaacattgagaaagttcatcaaggaatacaatacccacgttttcgtatgaagacaggtccagtatgatacagtatcatacaaataaacaacaagatgaggggatgaggtagcaggccatgaggaacaggcatggatagtgtgaaagccctatgcaaggccgggatcaacaaggttcgtatggggtcgatgggaaaggccatgcagtggcactttgctcaaggcggcaagatatgcgaacagaagcagcatcaagggatattgcgttctaaaattaaccctaagcttgtgatggggagcttcggccttaaaaagagctcaggcggagtgccctgattggcaaggatccaggtatttgcggtcagctgaatcgaagtttggcttcttggtgcgaagtgcatgagggaaataggaaatcggccaaggcttttcgtgattgccgctagatatccttggttgtcggagattcgtatccataaaatgtgtgatcgtcgagagaaacgggcgtctaaggcgacggcgaggttcaaaaatagaagaagtaggcgctactaagagctattattggaagtcggagcatggtctcgatgatgatcagtagagtgcatgaggctctcgtagcttttcattggaagagatatatagttcgtggctaagaaacacggacctggatttacctaggtggagcacaggcagttatggaagccatacagacctgatattaatttgaggaacatatcgttgcttgatctctggttcgaagctttcgagtattgtgagcaactattatagtgtatacacaagatgatcagaatgaaggttgaacgagagcgtggatctgcttgtatatctaatgcgcttgcacctaacatacatcgatattcaagcatactctacacgacgttgggtgctaaaaatatcacatccctgttcatattgagctaaaaaaaaagcaggaaatggaagtggcatcagttctatgaatagaacgcggtggtacagaaatagcacacgggacatcacaccgcataggaatatgcatacccctccttccctcaatgttcctcctgaacatgattggtcttgcatatgatgagccctcgcaagtctaatttgttgtacagcagccacgcaaaatcataagatagggactgtgattatttgcccctctttataatattacgggtgttactcgtggcagggaccgagttcgtaggtaaatggtaatctataccaattttactaggcagtctgtgacttgaactgagtaaatcaagtcctatctggccgactgattagaaacagctcttctttctatttatggataacaatgcttgtacttgcataaaaaagagatcacaccgatttgttgccttggcgcgaagaaaatgtcacctgggtcgaatgttccttgagtgccatgcgagagtcattctcagctaaaaataagccgtcggctcaccacccctgttgaaaagaaatgaccccaacctcatcacatcttctacatacatccgatgtagaccaattagcaaccagccacattagtgcccaagcgctggtggggcaactttgaatccccactgttccattaatttgttgtccaaaataggtatagcgccggcgcttaactgcatttaccacttcagtgcccctccttcattaatatcgctgattggtcagaatgccagggatgtgagcggtatgtcatttttggttctgggtcctgtgtgatgatgcttcgaggaagaaccaatataaacatctaagaggatcaggaaaattaaagatcatattctcgcagagcaaagaaactctatatcttaaaaaacaggagtcatcagtccaatatggaccttcgaatgttgttcgtgtaatttgtagttgttttttcctttcttagcaggtattattggtttgtactactctcccggccacctaggtgttacccatgcctcttttacacgttaaattagagaatgagacattgacggttccatatctcaggggcaaccttaaaacaactaatggattaaagagcaacttgaccccggtcacatttcttcagcgacaacttgaaacacgggaggcactgtatggcccaatcagtggcgttattatcactatcacgccccagtcgtcaacatcacaaatgcatccggtgcttgtgttttccgaatcaaatgggagacctcgtattctgcgtgcttactggacagtttatcaaatgcagagctgtaaactctcgttgactgcatgaatagtgaataaaacgtgtgatcttccgcattagtgtcacgatgtacatttgtgtatgccaatactgccagtacgctgtaatattacttcaagtatgtaattagtattgtaacggattaatcttttgcatgttactcagtattacttgggcatatccgagtagagcgaggagtaataagcaaatcagactaaagcccgatttgatttgactgggccctatcattgtataagattcaatattccctttgtttgaaatgaagccgcatgagctagatctctttcgataacatcgacggacatatgcctgctgtgaatctcggtttacattccaactgtgtagcgtccgatcaatcgagtcaacaaattaagctgtgaaaatccgtatagaatccttcgactaccagatatgttatcggtatactccgtaataatggggccgatggacttgctcagcctcgtccagatcctttgtccaaaaataggaaaccaagcgccactgtagtaagatatgctctatggtgtacatgaaagacgtgcttctcgtgttcacgcaatatcaagacttaggcattggcacccaagaaaagggttggcagtactttcgtatattgaatgaggctcatacagatcgactattgcatgggtgacacgtggtgaaatgcagggtagttgaaatgggagtagcggcacccgagaatatggatagcgccaacacaacgcgcgtgttcaaactgtatctagcaaaattgttgtcgattgttaccggggtcattcgccaaggtctgccatccatgtctctcgtgtggtcaaagcggacgttcgtcgagtatcaccctatcccatcaagaatccagtgctggttaagcagctaaagccggagatttaatacccaattccttgtcccgattggacggtgtctaagtaatgtgacgtgttcaacaattcaagctaatatgacgacacgtcgtaggtagacttgatagactgggggcagagaatgcaattggctcaggaatggtcctgaggtcagtctctacgtagatacgaaggcagagaatggaaagaacctttcagttcagtgagttataatgggaataaattgacgatggtagacagagtaaataatacacaaaataagcttcgactatcaaagcactaaccaggcgcaaagcatcagatgcaattgtcggtgtgaggaagggtcagaaaaaatcgtgttcccaagccaccgcaaaacgtattcttcgaattaccacttgaaaggcaggacgacacggtaccaagaaacataagcaagtaagacaataaagcaccgggcttatagtgtatgatttttgaacaaaagaaaatgcgctctcaacgccgaatccagcccccacgctaaaaccaccgactagcaaaatgcatgaatcaaacagtaaaacccgtaagcccagattgtcagtcgacttccttggcttcgcgacacttgcgccgctttccctttggcggtgcttcaagctgagtgcgcttgtaggtcaccgtgcgcgtgacaacctgcttcacgctgacaggcttcgcactgcggggcgaatcataatagcgtagcgtccagtctgacggcgagaatggcgaccgaagagtcgttgcactccggggtgttgcgctccggggtattgcgctccggggtgagtccgcgttcggcgagaacttcagcgacgactggatacgaagtcggcgaccatggaaattctttctggatggtgccgctgagtttggggtcggtggtggcagagatatagtcggcgatctgaccgaatcgctaaatgtagactcactgattgcgctcgcgggttgagaggtgggcgatgtagcagtggaggggttgtcaccaatgtacttgggaaaaccgagactagcactcatagggccggtgaagacgggtgtgagagccttgaggaaatccgtgtatgctgctggaggtgtgataggagtcgattgatcctcctgcttgatgtagtcggaaacactggatgtagagccattgtgaagttgcgatgggtaaaccgcgctctttggcgtcttgagaggaggaagaatgggtttgacgttcggcatcttgaccaggtcacaaagattttgagaaaccaagttctttcgaaagatgtgtgagagcaaaaaaaggtgggctgaagtaggtagagagagatgtgatggggtaaggccgcgggtgaagtagttgaaatagagcagacaagtcagggaagatgataatagaaatataagaccaaaaaaggacaatgcttgaagtaatagcagagagaccaagaatataagaaagtgctagccagcagcgaaacgaaaaggatgcggagagactgttttatgtatctgagcaaggcagatagatgatcctggtattggggcgatacaggtaatttcacgtttgggactgtaaaataacgaggctgtaatatttggtggtaagttaccaaggcggaacaagggttcgaggccggacgggcagtcccagtgtggcagtgacttactatttgtgtgccgtcttaacgaggtccgaagaggatatcggcaatgtttgccaaagacaaattcaaggttgttttgttctcttgaaaatcgatgcaaagacggcaaccaaaaaaaaaaaattaagacttgaccgtcaaggtcaagaaacaagaaaatattcaggtgaactaaaagattgtgaaggatatctggggatcaaaccagcaccatgctttggtctttataactttctgtcttgctgttcctcggaccttctcctctatacccgctgcagaaatgcaaaatgcaggagcatcgctgacgcgcgccatctgaatcaaaagaccccttatgccatgtatcaggagccgccgcagagggcggttgttgtcctaggtgatgagctgcccttcaagccactgtttatcctgtactacgctctggttcgtccagttttgacgcgcgcagcttgcagctctgctggcggctcgctttaaggggtatctcgggttgagaattgaagacatcctattttgtctccagtatagtgcgctaaccgaaacaaccccttagttttgttgtgttttgagctggacgatcaagcagagaccctagtttgacattgagatttgaactctcggtccaatcattcatgtgttttaccagctctccaaagaaggttcctgtctccacagttcttcagcagctgcacgatattaataacctcgatcacttctatggggtgctatatctattaaaggggcattgtttacatttggcctactaacttgttgccaggggaagctccggacaacgaactcctctcggcggatacgtggtcacgtcttcaaaagatgtgaattgggttggtacatacgatgattctaatatctggcgctgatagtaaaggaattcaagacgttcaagcctcaaactccgtgtctatgtactttctcgccaaggtcttgggttggattgaaaagacgatgttgtgcatctattcatcactcgtccaaaataacagcaaactgtcggttggaacgactgatgaaacgacgtttcctttctttcttgctaattgagcccacgccctataacttttcctcattaccgctgtggcattctcgcaaaagggaaggttggacttcttccttgatttacctatgttggtgaaacaatacgcgctttgcttcgtggataaaccaagagataactttgaaatcaacactgcaatatcattgtgcaggatccgaaacgatcaatattattttagttaattggctttacccttcatgcgtattgtcagtcagtgtagtagttagtgcattttagggtttcaaacatcgatgcgccctctccttcaaatatcaaagtccatactgagtttctacaaattggagaaaaaggtgaacttcgactgatacccacccggcagacaaaatgtctcagctcttgttatgctccgagagaaagctgcatacttagctcctcaggaaatgatcaagagtagttgagcaaatatctgccagctctaacctggaaatttttaacaggctttgcagtttgcagtctagtgtttggtctctaatattccagactaactactacctacatataggtatgtcttctgcgaagtgggtttaccaagctacaatgcactgagacatgcgagaagtaatattgatatgatatattttggattctgaccaaaatttgaaatatatacagacccaaatcaatgccacgtattgcgtccagaataagacgagaaaaaaacaccagcctatacatgataaacagaacataaagcaagattccagacaacaaattcgtttgcacacaaaacaataaagactagtcgcgaagtggggtatcttttaccatctgagccagcacggggatcaacctcgtgaaagatagaatcaaaaacaaaaagaagacatgctcctcaaataagtaggtagttccaattattccgcttcatgatgtccctccagtggacttgttgcttcttgatttcccgtccacccatagtggcgccagcgccagaggtggagttcgagttgtcaagcctggaaatcggactagtaagcgaggagttgtaggggttctctccagacgagatctgagaggagttgtaagggtcgtccgtcacacgccacacctcatgcaggaggcggtacatgcgtccgaagctaccgaggtccccatggtcacccagcgcagtagcgcgatcggcgatcacggatcggaaggggctcgatgatttggaaaacaagccggtcataagcagtggccagacaagagagcgatcgtagccatggggaccggcaggaatgaatcggagcgcgtctattactgcagcgatcaagctctcgtctacttggttggtatcaaagccaggtgcgatgctagaaagatagatttgagctgcgatccggaagatgtgagtcatggtctttgtcagggcttcagggcgaatggctccagttgcaggtgagaatgcgttctccagcgtgggatcggcgggctttgtgtgctcgagttgttccgccagcgctttactatgataagagacagccgagtcaccgatgcgaccttcgctcttaagagagtctaggcaagcaatctcagagatgagatacatgacgcggtcatcgcatcccatcaattcgcataagccagaggatgctccactcaggtgctttgatcgatactgatgagcaaattcgggagtcttgcccaccattgtcgagccaaggatatcaatccaagaagttaagctcatactaaatggggcgactaggtatccgccagagtgcttaactgttgcagaaggaagttcgagtctggccacaagatttgatgcagcttggaaatgatcaaaccacggaatatcagggaggtagtcatccgaagggccaacagcgcagtgaaagaagatcatggcaagggtcgcatccaggatctcgttgtgattaacatcttctcccagagcctcacatagtttagagatggcttcaaaacggtgccgcatgatatcatggtcaatttgctcaccgaccaatccttccgtagtcttaaggtggatggcagcgacactcagacaacagtgaagatagcacttatttgtctccagagcgcggagaattgattgcgcgcgcaagtgtcccttttggtgagtttctagaacggggaaaatctggcgtagcacattttggataaagtgatcgagaagtggccgatcatgatcgctgatagcaatattgctttgtaaaaatgcgcatgtgtgatcaaggctagggttgatacctcgcgtattggcaccatttgaggcctgagcgaaatattcatcttcaaaccattcatcaccagaaaaagttggcattggagcactgatttggggaggtgcaaatgcactgaatgtcgatgtcgaagtatcatgacgcataggcacatcgttgataaatgtctgccgttcggttcgcacatcgacctcataggaaggtacgtaaggtccacgaggagcacttcctagcccaggagtaggcagctgggatgagaaaagatcgtaggactcgttgtgcctggggcgaccatgttcgtgcacaggtgaaattggcgatcccgcagacatatggcgatgacgatttattgggtctagagtgtcctagatgtcagttgaaaatgtacgcgaagtatgaaccgaataagcacataccacagcggataccgtttcgctccagcgtcttggtttccttgatcctgttcttgatgcgctccctgtgggctctccgtttctccgcatttgcccaccagaccgggagtttgtattcgcatcgcacattaagactgacacaggcgctgcaggcagggtgtttctcgtcgcacttcttccgacgtaggcggcatgtgaagcagcctatttgaattagtatagttcataggaatgacttttttagggacagtgcgcaaagataagagcggatcacataccagaccgggatcgcttgtgtaaacgaccatttgctctatctccatgtgtgtgaggtgtgcacggagtcagtgacatatctgccgaagcaagaggcctagtagcagaggcagaggcagaggagttctttgagatcggcatattgaaatattgaaattagatgaccgcagaatgatcgatgacagtaattgtgtaatcaaaagaccagaatcaattgcagataaaaagagtatggcaaagctgaaccagcaggctttgtagtctatcaagatataaagaaaggaaagggaggttgaccgagcaactgtgagaaagatgatgaagatgaggaactaaaaccgtgggatttacgatgctttaaaaccgatgatagcttgtggaaagagaagcgggtgtttctattttagaatccacctgcacagttcatagattgagttggataatttgggggtcatcagcacgagttggggttggatcgtcgccgaatattgctgggctgggaagccaacaggtataagcaaccaatgagagttgcagaaaggatgataaaggttgcactcccgtcttttgagactaaatttgggacaattagctctgttatttttgtgacttgaggtcgcatggtggcgttagcgcatgcacctcgacgtccaagttcctcgagggactggatggagatcgtccggtcggactgcgattccgtgctctctcctccgtaacatgggtggctgcatatagctcattggacctggattgatttcgatcttcgggttggtttttagttcctttccactatgcaatagtcggactccaacccaacagtcagagttggtgttggcattcgaatccttttacacaaccaactgagggatttaacaaatttaatacgttaagcctacgcatagtggatgccgctgtcaaaatcgcttgacctgcaaggaacgaaggcggggtcgagatgtgacgagcaacaacagagccgggataagtttcgttaagttactaaattcagaaatatgtcgcaaaatttcggacaaatttagtacagtctggcccgcggcattcaccataaccaatggttgagatcaatcatctctagaaggctggtagatcacgacttgaactgaaggattatgagtagtgtgacagtataggtggagcaagccaagctttcagttctcgcatcataattggatcaagagactagaattataaaattgcccactgctcgaccggggccattgagagctctgactgggtggctggggtatagcgtcccacgtctggtgctccgtgcagatttgggggatgtgatgtgatagacgtgcatatatagtcccttaattagcaacacttaaccgcccagcttcggcacaatgcaaggtaatttaccccatcctgtagtttattctatcttcatttttggtcaaattaaccttgagcatctacttttcaatagatttactattaataaccttcaacggagatcgagttgagtcctaaaataagacaattaatctaatatcgagcttcaattggtatagcctttacacttcgtcaaaccccgctcaaactgctagaatgcctgtcgcttttcttcccttgtgtacgaccaatttcccattagcaacggcccactgcagatttggctctcgattggccatcgttacttaccagcagagttaataataattgatcaatctattaccgcatccaacccaattttagccattcaaccctcggcctgttggaaaatttcgatctacacatccacacgttcaaagtataaacgcacaatgaggaaattcctcgtgccttctcaacctattgtaaaccaaatcaaaatttccctggtccacttgcggctttattcatcgagaaataacgatatcgagtaggtgatgtagttaacgatctgtactcgtacggagtatatgcttagttatttgctagtactccgaccgaatgttgaccgcgcatcatccatcgttcaaaccctaggtagttgctggtcgcgaaaatatatcaagagaaatgatgcctcgcatcttgatgtcggcttccgttctcctagggtacctagataaggactgcaggtatagccatccttctttgtcattctattctacatattgaggcttcggagatatatctatcagccgtgatggtatatgtgccatgttattctcaattgcgaataatcccttgaaattcggtcttgcaatgttgtttccaagataaagcccaaagccctactccgtacctttagactatcctatgttacacaaccacagaagaaagtaccacatccgacaaattggaaataaacacggtacgggatacctatctgtagctatccggttattttctaggctgccatttcatatttgctgcaactgaagtcttatacagatacttgaattcctaaattctcatattgtatgtggcgcatcgggttagccgtcataattttatactctatggagccgaaagcaatgcgttgagtttatgaaatctttgacggtgggaattaggcgagtctaaaatacataaatgaaacctctcatctcagatcaaaataataaaagttatgatatggagtgtgttttcctagttaaatctggcaatttatggtgttgatctcttccacatgaacaactgcagctaatttatcaatgcgtcgagaaatatgcagcacatggcacatcccaaccccaccctagcttacctacaatacggcggtgaaagaatccaaagactggaaaaattcagaaatcggccagcagcattccattcccattagactgcccgccctcccagggttagtatcctcatagtgtgtttgaagtgcctgtcaacacatcctccagaaagggcacaagtttaacatcattgtatccgtacacagatcattcgattagcccccaaggttcatatcatatcaacgaataataagacgaacgtaagaaaaacatgtgctatccaagccaccaagctactaactagtctataatcaaaaaatgaaaccgggcatatttttaagtattggtaacggagcgccgttggcaacggagaccctggcaacgtggagaaaaaaagacaggggcatcactcgaggaatggggatcgcaattaaatatagtaaccccgagtgaaagttcaccttccaagaaaatggcgtagcgctaactgagggttgatgcgtggtcgtcacgctgcgtcgggttcctataggtgcgaagtgggggaggggttgcctgcataggcgctaactgcacaccagtcacatcttcactccaacgtcgacaacgtgatcactttagagaaatgcgcatccttcaagccaattaatgtttaagcttgggccgccttatttggcaagaattgcagtgatgggttataattgggcgatgctaatgcgaggtgcttgcatctgaagcggaactactgcaggtgaatcacctcgtatcacaatcacatatgcccttaatccctgctcttagccaatcgcctccgctgtctgctaccgaattttagttacgcgctgagtttcaccaacttggtatgacacggaatttttgtcccgttgagcggttcgggttggctagatcctttccccagcgctacgtggtaaatgatttcttagcacaaagggcagacttattacagcccaactgccccgatgtgacgaacttctgttggatctccgctcatattgagtctattttctatctccatactttcatttcatcatattgttagttcactgctgtgcgggaactctaataacaccacattcatttaattatactactatatcttgcaaattaccatactcacgattaacgacatggtaagctggaatcctaggaaaatgatatgatcgctgttaaccattccagaatatgaactcatcactggctgctcggcgaagagtagtacctgctgaggtagacacgacaaatcatgagtggttctatcccaaaaagaccgtcgagaaacagcgccccaactcaggggcaaccttcttcgatgacacggattctgagagtggtgactggcgccaatcgcaccggcagagtatgcaatcggtaagtgtccttatccttgtatcaaaatatgaagtctaatgtagtatgaaccaaccagtacagtaacgggagcaacactaccctttcgagccctgagctacccactccagacctcctgccaagaaacctgcctacctttcgatcaagtaaggaactgattgcgggcccttcaggtcctgatttgttcagaggatccaggggttcgactgtggatgttgaattctatcttgaaccgtcaccttcgctcgatttcaagtcacttacacagcctgagtttgtcaacccgcatcaggctgagttcgtcaaccaataccaggccgagttcgtcaagtaccaggacgagcgccccaaccagtaccagcctgagcgctccaaccagtatcagcctgagttcgtcaaccaataccaggatgagcgccccaaccagtatcagcctgagcgccccaaccagtatcagcctgagcgctccaaccagtatcagcctgagttcgtcaaccagtaccaggatgagcgccccaatcagtaccagcctgagcgctctaataagtaccaggctggtcgctccaacccttatctgttatctcctaagacaccaaaggcttttccacgcaaccccgatgtgtctcatctatcaaagaaggagattaggaactgggatcctagccaggtcgctcactggctatttatcggtggatatcccgatgatatccgtgacacgttcctcaaaaatgatatcaccggcgacattctaatgaccttgacaaaggatgaactcgagtaccaactccgaatccaatctatgggcagacgtgtccagctcatccaatcgattgattatctcctcgagaacatgcagacgagaccgattccagaaacaccgtctcagtttccgtccgaggcggcgtcttctaacgggagaagatcccccgaatcgttcgccccccaggaattggctcctaaaagaacccctacaggccaatcttatacaatgtctatttcgcctgacggtaaaattctctcttcgcatgcctttggacagagtggggatcaaagcaccgcagacgcagagtctgtatcgattgttggaatcgaggaatttcatccgaagccccacaggtgctccaaaggagagaaatgcagcaagttcaagaagctcaaggagaagcgcctgaagaagcttactacagagtatcccggcgcagattttcaggggggtgctatctttgtaggcagccccggaaatcctgaaaccgcgagaaatcttctccggcccacgtccgaggccgagctttcagcgatggcatcctcaaatatctttggtcctcggtccggaccaagactctctgaggcagctctgagcgaagttcaacgcttagatccacaagaaacaatccgaaactttctcaggcaccagcatatcgatgacttccccaagcctggaccccttgggctggacacttacaatcttccgccggcagacgactttgaggacatctccccgctgaatgcccagtcaaattctatggccgcaaatctgcgcagtcttccgaggcttacgataccaacaagcccgctcacggaagatatgacaaccgctgttaccaccaacagatacttcactcctactcatcagaatggctctcctactgctgttcagcaatttggccctttcagtcaggttcatcaagcccaagcaactgagacctaccgccaaggtacaccattctccgaagttgatgtccctatcactgcaatccccagtgatccgatatcccgtgatgtgtctcaatctgttcccccaagtatgcaatatggaaccttgttccctccgtaccgagatgccaatcacctctcacggagcaactcgacccgtcccagtgatgatctccctctccgtgatgccaactattttgcacggagcacttcgacacgtcctcgcgatgctttccctctccggcaggtgaacgagggcaagcctctgaccccgatcgatgttcccgcagacctgatccgaagcccccgcgtgaaccagtatggtaacagcagctcgctagctctggccgatccggaagttacccatgcgggatacatgaaaaagcgcaagaccacacgtctgctcagacacgagtggtccgacgcacacttcacgctccgtggcaccaacctggccatgcacaaggacgagcgtgatgcgcaccgcatttcgagggccctggaaaacattgaggtcgacgaatatgccgtcgcttgctcgtcgctggcgacaagctccaagctgacggctgcgttcaagcgctcgatcttacgtaacggaaacagtaccactgacattcgtgatggtaccgcttttgctttctcgcttattccagctacaaaggagagtgagaaaaaggctctgtttggaaacagcgctgttaaaacccaccacttcgctgtcaagtctcgtgaggagcgcatcgactggatgcgtgagcttatgcttgccagggccctgaagaagggtagagacggcgaggatggcacgtctatggatgggaatatgatttgagtgtttagattagtggtcttgttgcttccagctctttgcatatgtatacgcttacaattcgtttggtgttctttgatttttggtgtgctgcggtcccaccatcgctgaaggaactacctaggtatcattgctctggcgcttttgttggtacatatttatttcctgtgtcacccccttggacaaattcatgaaacgcgtcgccgtgagacggtcagactgataccccttgattagtatagttgcgtttagttacagaagaggtagttaaggaattcaaattgttaatgtgcgaatcttatttttcctttataacatacaatcttccttgattttgtaaacgtacccaactcccagctctccgcggctcactcatatatatcttcttttgcctgaacattgccgctggaggtgtttctcaatatcatttgtaaagaagcagaaggaataacctttatttgagtctactctactagcctacagttgaatatggttcatctctatcttgcaaagttgttagcgtcctccgaggacagtgtagacatatattccgtgcttggtgatgctatatcatcccatcatccgaacgactagatatgcccacccatctccataagcagagcttctcacaacctcttcgatcggagcagacatgggtatcacagcaccgtgtagcacgggctttgcaaggacaggggttctccgactgggaaacagattcggtagcaatgtgtgtaaaacagtcccaaccgtttgaggctggagagtggaaccgctccgcgagctcaacatttgacttgactgcatactgagtgctggtatggaaggaggaagtggcgattgtaccactttaagggagggagactcggcatttagcgggagtggtagaaagatccggatcggaacgttgcgaaaaggttgtgagtgacggggaagaaggatatttgatatgcgctgaaaggaaagaagatcgactatgtttcttcgtgttaggattgtctctatgattaatgcagcagagaaggttctacacagaatgtttgactcacgttcttgaacggcattccaaagtcccgatgagtcttcttttgagagactcatgatgcccttagctgtaccatttcgtaggaaatctgcttccttcacactgtttataaaggcatcgttcatgaccattccatcggcatcaagtcgaacaaggtcatgcggccagttggtaaagtgcactatcagacgccaaggcagcggtggcccgtggtcagtggactcattgtctcttgtggcggtcttggaggccgggtctgctcccgcatagaggtcaaataacagcccgactgggtagtgccacttcagaggcacaccctcaaactcaaaccagccatcatgagactgggagtttggctctatcaaaaaattcgagaagaaagctagaagcctaggtagcaacgagggaagatatgagatgcgcggatatgagatctaggaactgagatcagcatttgtgcttatcaagtgcttgaagaacagacatacaagatatggatccgtcttatcaaaggttcgactttctgatgaggctagaacaatctgcagtggcaagcgcccgtcccagacggccttctggatagatccgagagacactcggttctccatcctgaggagtgataaggcgctcggttctttcttcaatgtttgctttgctgctggtttgtcaaaacatggttagctcatatagctatttacaacctataaaaacatacttgatcttcacacgccgtatttctgattactacacgcgctgggattcgcatgtcttcaaccgataagactcgcggatttggaaatgccccgctttcgaaatggtcatgatccgggaaacggcgtatccacaaaattccagagatagtcggccactcttgggaaatcaagcgtttgattccaaggagatactggcggttcgtgttgacatagcgtgacttgaagacgcgccaaaggttgatggcacgtctttctgcctcaggcaataatcccaatatctatgcctcaggcttcacaggttttgatttccaaccttccaacattaaagcagcaataacttttggccaatacatatgcaacctaatgatgcgatggaattcaaggcaagcggatcttgcaggatactggtatcctccagattctggatattcaagcgcaactttgtgtatcttcgttgaccatcaaggtccttgatgaactttctagatttatctacatcttcttttgtgcgtctgtacaccaaatatttctgcacgtcaaaaggcttaagatcacgtcggcattaaatgcagtcgtggcgcgttgttcgcatttcttgcccagctctggtgcctcattttattgacatggccccaataaaaactgcccatccataatctacaggcacgacagcagcggaatacaattgaatcgcctcgccaagtgtttttccgtccgccgtgctttgcagccgctttatattcttggtctcacctaaattcgaaagcttcttggcatgatgttcctaccgatggagcagtgagttctagccatggaagcatactccgtaactgctaacaagcgatcaagagaccaatactaggagcagacccaggctgcgcacgttttagtgacatcgatctacaagtattggtgcaagccgtgccaagattgcgttgaaaggaaaatcgtaaagccgagaagtcttagaactgccgccacggatggccgaagactatcccgaggtgccactcatgtagcttccataccacctcgagactcggcctcgcagccgacaggaggaaactccgccactttcctctggaagctgctcccaacagggcatgcaatatgaaaggattcgagtgtagggctgctagaaactccaaggctggggctttttttgcgctgttgtaaggggcctccaatttctgcaagatcggccaaatttagccttgtccccgcaatctatgatacacaatacgtattcatcccccacgccgcgtattcgcctgtaggttctatggcgaagactgcatttgtggatattttggctcaagaaagacgggtactcgcaagcgcagagaaaatcctattggatattcaccaaagtcaccgagaaaactatgaattcagaagcacaatttcttcaaggcccataggataaacgctgataggttgtgacaggttagtgccaataagtccttcactctaaaatttggcttgtatgactcttaggtaaaggcgactcgccattcaacctcaatttcaatagtgcattcttgaataccaaggccgggcggcagccacggcgtccttccaagccggaatcgggccgaaaagagcttgtatagttctgatcatttaaacaccacggcaacaacatcaggatcatatagtaaccgtgtaactttattggatgagcacattgactcatgtatctatttgtaatccgggcccgaccgccatgtcaaccccggagttccgtttagtgtaaatgtcattcaccccaatgcactatcccgggcggggcctattccgccattcctgggggatcttatgggagatttcaggtagggacaagtaatgatacaacttgaaggattcccccataagcatacatactaggatgtacatgccagtcaaaaattcctccttcttctatagttattcctactccgtagccttactccgtgtttcggttaatgacccgaaatcaaatagacttttaccccttcttccgtttgccgtcggtgtacctcgctattcggacatgtacggtattcgggagctcggcaaaactccgcggctccactggtggttaagggttctcccctataggcgaatgaacgtttttgcatagaacatttggggaaaacaaatcacggggtaatcactcaacaagcgggacttcgctgtgccagtctcccccacactactacagttcgcactccagttcccctcaaactggagacagtaatccgtcacggcctcaccggagcccccatgcgataaaacatatacatacctactcggacggctaaacgtaaaactcttatccggtgtggaagcaaaagtactgtcacaggtatgtctaccatctactgcacccaatagaaaactcttgaacaggaggaaataagaaatttccggtgagctcttccagtttgatatacctcaaaatactataaaaggcttatttgccggctgaatgtttcctccggggaaaacgctaccccggccaatgttcccactcatagcatcttcatgcagctgtaatcatcgccgtagcgtagcctcacgctcgaaccccatattatattgccccagtctatggggttttaggcgacatatgttgtggggagcttagttggggaaatttccacacccacagtccattagaatagcgggtattacttagggccacgttttagcaccccttgactcttcttcctccatctgtcttcgagcaaaatctttctggttttctcaccctgaccttcacttctacctcgcacgcacagctcgagctgtcacctcttcagctatgggcattctcacacttgctgaggatcggccaacgcccaagtccgtttacaactggcgtgtatatgcactcgccgtcattgcatcatgtggttccaatatgatcggctataccagtgccttcatcggtacgactatcacactctcctccttcatgaaggaattcggcctcgacgagatgtcttccacacaaaggagtctgattagcgagaacatcgtctcacttttcattgctggtgcctttttcggtgccctgggaacatatgccctaggccacttcatcggccgaaaatggagtttggctgttgctgccacggtattctttctcggagctggactacaactcggtgctaacagtgcccgggggctgggtatcctctacgctggtcgtgtgctgtccggtttgggtaccggtgtagcctcgaatatcattcccatatatctttccgaactagcgccccctgcaatccgaggacggctcgtcggtctatatgagcttggctggcagataggcggaatgttagggttttggattaatgtgagtctccctgtctctcgttgatcttttttttccccgtgttatctttgcattcaaagctaacctagatatggtagtatggtgttgagcaacacatgcctgaagtccacgagcaatggatcattccctttgctatccagctcgtcccctccggtctgcttttcataggtgccttgtggatcaaagaatctcctcgttggctgtttctcaaggaccgtcgccgcgaagcgatgaaaaatctttgctggatccgccaattggaggccgatgacatgtacatcaccgaagaggtagctgcgatcgatcaggctcttgagcatcagaagacttccatcggtattggcttctggaagcccttccaggctctcgctactaacaagagcgtcatgtaccgtcttatgctgggctgcatgctcttcttctggcaaaacggctccgggatcaatgccatcaactattactcccctaccattttcaaatcggtatgattgcgcctcatcagatgcatttctgataatcaattacttatgctaactcatgtttcttagatcggtgtcgacccgaataccgttaacctgatgaccggtatcttcggtgtcattaaggcggttatgaccttcgtgtggctcctgttcctggtcgatcaattcggaaggcgcaatctgctccttgttggtgctgtgactggatcgatctgtatgtgggtcatcggtgcctatatctgtgttgtcaagcccgaagataatgtcgccacgtctctgaacggcggaggcattgcggccatattcttcttctacctgtggactgcggtttacacccctacctggaatggtaccccttgggttatcaattccgtaagtcgctgcttattaccattctcaattaaacattttcctgaccatttattaggaattcttcgaccccaacttccgttccctggctcaggctgccacgactgcgagcaactggctctttaacttcctcgtctctcgcttcaccgaacagatgttcgccacgatgcactacggcgtgtttcactgtcattcttggcattcttcttcgcgtttttcctcatccctgagaccagtggtgttcctcttgagaaggtcgaccgcctgttcgattgcaagcccgtctggagagcgaacaagatactcaaggccgcccttgcggaagaggaggagcagttccgctacgaggtcaaggaggcatcgtaccatgaggaaaacactggttcgatagctcctacgccttgagatgaggagagacaaatatgagcgatacagttacgaagagatatatagagctagtcaaaccttgtacagatgatcacgatgtatagacgctgaatagattatcatagacttatttttcaattgcccaaaactatacagtatgcttgaccaagagtttggagttttgggtaatggcagcccgggccagcaaaaacaccggagccgcagcgtagatcaggtcccccccccccccccccgcccctccgcaactcaccccannnnnnnnnnnnnnnnnnnnnnnnnnnnnnnnnnnnnnnnnnnnnnnnnnnnnnnnnnnnnnnnnnnnnnnnnnnnnnnnnnnnnnnnnaccccggggccgccgcggaggtcagggccccccccccccccggtgtttcaataactccaaagttcggatattattattctagttctctagttattactatacataatcgcgtctttaaaagcaaaaaaaccaggtttgacgactggggaagcgcataactgtggacattaggagctcaccatcacctagctttggccacttaggttcttaataatgaatttataagtatgtaatcccaggcataatataacacgcaatatacggtgtgagctcagactcatccacaagcaaactcctgcgccgtctgggcagtagcgagaaaccaaagcgcgctggttgcgaccacactcatttcgctgtatgctcgcgtggggataaacacagttcaaatggagttggtttgacgagaagacgaagaatgaatggaagagatttatgacagacatagaacacactcattgctaacatcatgcataatgattttgtggattggtgattcctggttcccttggccgatgacaggtctgatagcatgcatagtgagttgggcaatccctatttacatatatgatatcatctggcatatatagctctgtagatcgtttgctgatgaacattacgatcgctgcggttcattctcgattccagggttgtggctagtgcctacgtcatgccacgagatgggccctgcagggtatagatcagcactgatattgaagatgaaggagatgtgtcgggcacagtgggagttggtggttcttgatttcttcaattcataactagttatttgaagttgtcgctaatgacgatcttgttgcagtgcattttttttaatatgcttcacaaagttgtacacagcacacagccaggtttgcatattcaagtagtacaaaggcgcgaggggtcgcagatttgtcagctggtaagtctgattgatcaggcgaatatccaagacccttctccgtgtggctggattatttgaagctggcgatgtgtggaaagtgattgaaatccggggcacaaatacagtatatgtggcctaaaacatacccaatcagtcgtcgcaatcccagcagagtgtcctactccataaccttgctaaaaatgatgaacggggtactccgtacggagtagctccagatcataaaatcccaatcggcaatgaacgtgattaaggtgagaacattgcgattggttggacattgccaccagttttacattgtccaatgagagacatgggtctcaaaacgcgatcgttccaaggtcgacgcattctaaatttaggggaaccagatcctttgaggctttctaaaaatggcagggatcggctgataatctggaagccgacggaaaaagactagatgaacactatattgtatagactcaaagccaaagcgttcctttagagtatgttaactgtaactaccggtctaaaggcagaagaaggttaggtaatgttgacctcgagagtgcgcgagatggctgcttgcggaactagtttggccggtggcggcctagagttttttttcatgttacgttggctgattcctaagcctaggaaaaagcgagaataagccgaaataaagattttcactacggagtctacggagtttacggagtaggaatcggcaggatcgtctagggtcttgggggggttggggcagtgtagaggggcaaaaggctgggatgaccaaggtagctggggaccgtagttgatcatgactccaatgtacggggtaactacattatacagctaatagtaaagccaagtttaactgtttaatgaatgtcggttgcctgagagtggcttcactgcacgaccctggacgatctttttggctccactgagcgcttacgtcgtactgtggagttcaatgatatcaggaaaatcgaggaaaagaaaaagaaacgaaattcccattttctcttttcaacatacactcgttttgtcgccatgcaactgaatggctcccttttcggagctctcatcctcgtcctccagagtcttcagcttgtacaagcagagaacctcatccaagccaccgggctgacacaatgttccgatagtgccgaagtgaccgtcaataacttcaatgcgatattcacgccaaacaacaagtccatcagcatcatctttgatggctattccgaagtggccggagatgtgctcattgacgtggacctcctggtgtacggatacaaggcgtttaccaagtcgttcgatccatgcagtctcgatttgtcggtgttttgtcctatgaaagcaattgaactgcaaattcccaaaatcacccaaacattgggcgacagtgtcctctcgcaaataccatgttcgtccacacttccccgatagtcgcaaattctttcagggctcggagactccggaaattggtcttactaacggttacgtcatagcgatcgcctatagcgtccccgacatcgatgcagtgattcggctcaggctcaaatacaaaaattcaggtaaacagatcacttgtttggagacccgtgtccgcaatgggaaaacagtctaccagcgtggtgtgtcgtggacactcgctgtcatcaccggtcttggtctcatcatgtccacggtcatatcgcttctcggccattcgaacacggctacccatctcgtcttccgatcgcttgcattcctcggattcattcaaacacaggcgatggttgggatgtgttcaatggcattgccgccgtttgtgcaatcctggactcagaacatgcaatggagcttaggaattgtgcagctggatgctctgcagacaattgcgacctggtttcagcgcgccaccgggggtacaccttcgaccgtgcttgaatcggcgagtactgcatctgtcgtcttacagaagcgttccgccgggatccatcgcagagccgcagaggaaggaactcaaattcttcttcgcggtattaaacgggttggaattcgcgaaaacatcgaactgagcaacatctttatgaccggatatctattctattacttcgtcaccgcagtcatcgtcatctgtgtagggttggttctcctagtccggggtgttttagccaagaaacagacaatgcttccaaagttggatcgtgccatcagtgtcaccgcagattggaaaaccatcctccgcaataccttcttccggctggcatgcatcggatacccacagatgtgtatcctatgtctctgggaactgactcgtcacgactcagccgctgaaattgtcctggccattaccatgtggctggtcacgactgccgtcttagcctttgccacattcaaggtgttccaacgcgcgatacggtcgaaacagcagcacaacacacctgcgtacacgctctactccgacccggccactctgaaccagtggggtttcctatacatctactatcgcgctccggtctattacttcattgtcccagctctggtttacatcattgttaaaggaatggttattgccttcgctcagccttcaccgatcgcccagtcgatcattctgctcgttttggaactctccatgatgctcgcaacctccataatcaagccgttcatgagcaagggggctaatgtcgctgcaatcacgatgacggtaatgaattcgctcaatacgatattcatgcttgtttggacgaatatctttgaccaacctgagctcatgactggcatcctgggggtaatcttcttcatcctgaatgcgcttctcactctcttgctcctgatctaccttttggttggtatggtttacgccattttcttcaagaagcccgacaccaagtataaacctcttggcgatgaccgtgactctttccgctggtctcgcaccggaacgacgactgagttgtcgtccctcgagaagatcgcaagaggcgaggacgacacagaaggccaccctcatcccccgcccgtggtcactgctccgcccagcgacgaagatgtgtcaatggcagccaaaaggccatataatgatgttgtggacccttcgctgccgctcttcccagccagctatgaacgcacgcaacgatagtcgtgagcatttagagtcaatattttctctctttttctctctccttttctgtttttttttttttttttttttttgttttgaagcgagatttcttaattcctgcattcggtgcgtcggcgcttcgggtggctattgtacatattcaaaattttgacgttcaggaattgggctagataatatatgtttctagaaagctttttactgtgtttgctctacattgaatatgaacacctaattaaacctttcatttcggaataaagacgtcttaagaccgcgccaaatctgactcctttgccaaaggatttactctgctccaagtcttctaggaattgcaaggttattgccagaagagcatcagcgtcagggtctcgacagccgagaaataaatttcccgaaaaaaagaagcattagcttagtccattttattgtctttacaaggggagcgtgtgtcaagtgctagctggtcaaaggcatctggtctggctgtcatacaaaatgccctatgaggaaatgtcattccgatgttgatatctcttcgcacgttgtcttctagttcttttatcattatgatttgattacctatcatcaattgcttacatctgattaagttgctatatattgtctagctgagcattgtgagaattggttatcaccttggctttcttttcccagctcctaacatagacgtaaagaaacgaattgataccaacaccatttagttagttacagcttatctttcacataatcaatccaagggcactccaggaatgcggctgtgctaccatcccttgattcaggcgaccaacatgcgagtcttataaatatcaaatttgcatgcgtgttagtcaaggctgagcatattacgattctcgtttatagttgtacacactctgacagtgtcatcccaagacccagaatagactcgtcatctggaccaagacggacttagcgagtagccatccgattccgagtcaggccccttgtttgcagccaactcgaggagatatgactggggtgtgcgcagttcgatgaggtggcttaccggaaaaagctggataaaataagccggctgcataggccacgttcacacgcgtggaaaaatgcgacgtctccagtacggagtatctgtcagctgtttcagactcgacgctccacttcgctctcggtgcatatgtagctatggtcgaaacacatgttgcgatggtaacaagctgcagctactccgtgcactttcggcatctatgccggaacccactgtggattaagttgatccattaagttgcgtttcagactgaggcgtcctgggtgattggcaaggtgagtcaaatgagggagatgtgtggacgatcccttccccttctgtcaacatccttgccccttggatgatccgtttttggacaagtttggcttttttttctttatgataggtaaaatcccaaggagcgaagaagggtctcattattgagtttctgtaagcttcaggggctagatttcagtctaaaaaaagaatgagctcttgaccttaatttccccagggctgagaccgttgtgggattagagcacatcacaaactaaacgccattgcattccgtaccaccaggtcagctcacctgggacgaatgatcggcttaggtgttcgggcttagcgagccaagtgattgacgccgtaggtgtatgtagataaggttgctggaattccgccagacgtgccttgcatatcccaacaggagaccctgtcaaacatttcttaaaggaatgagcgaattcggacacgcgtgggaaaagcaaccttattattcctgaaacacaggtttccatatggcgagtgtggcttgggcttagccaagaattgaaaaatgaaacccaataatggggtatatctgcatagttagtgtacaacataacgccgtccgaaaagtctgtctgcggacatccgttatttccgaggatgcttccttaaaacatagagatcagcgccagcacacttggtaggtagcctttagctagacgccgtgctcgttgccctattttgtagatatgtaaacgcctttgatcagcggataggcctaggtcttagtggcactaaaaagcaaaatactattactgctgtttccttcctgggatgtcccaatctttggactcgtcataatcggctttaacaaggcaatccatgtgccccttttcttaggcaagctcagttcaagtttccgaaaataagtcactcgcatttcggagatcttcagttctctatgcagtatactagtatctagtcagttaagcattcctatatttgtaataatagcgatgcaaaataacctttagggctcaaggctggcaaggcatggctggtatggacctgctactatcaaagtatcctgcggcaatagtggcttgccttatcccgactcgtcgttgagggatctgcagggttgttctcaggaaagggaaatgaaggaagcatgcagcagacgcgcgtgggccggggaatgtagcatggtgagccttgttctattttatttatctttttgacctcttagagctgagtccctgggtcaagacatatgttcatgaccatgtgatcgaccacgttagtccccgacattgtttcaccctagagggagcgaggatacacggacattgcgaagcgcttgtaccgccaagggttccggatttgtttgtttcaacgggttctagacttgtcttgttcctgtttttttttttaaaaaaaggagatccttgtttgatagctctgtcgaatatccgtttgcagaaactcgagttgatgtttatttcaccccctcacttcattccacagcacatatgtagaaagtctggatattccgaaacctgaaacatgcggctggccatgtgccgaagaggaatgttggatttacgctcaggatgatcgtgaaagcgggtcttagtccacgcatccatatgcggctggtacctgcctctcctagccccggttacctgcatttcagccaatgacaacagacatatcgcttgttttgcgtagatgagccgacgggtatgtgcttttttgctatggaccctcggagtttcccgctaaacgaataccagaactggcatggttcatgcggactcagtcttggcgaacgttgagctcaagggtcgagatgccgtcacaggcccatggcaggcggaggttatgcactcggtgaagatcttttcctcgttttctccttcgtttaacttgtactgtccatgtgggctatgatgcgaagctcaaactcgcgtgtccggccgcaaaggcatgccgtcctcatgcatagcgtcagacctgcagtgtatatataagagcttccgctcagttgtatcctggtcatcatccactcagaaactcatcaattcattcgtctctacagttccttttcaaacataccgatcaaagccaagcacatacctcgctcttgagcaccacactaccccaaccctccttctttctactgggcctcttcccggtgacctgactctttgattcgcttgaaccgcttgcgaagacctcacgtttatcaccaacaaccaactacacatcatgtctatcccggtcccggaacccagaaccacatcgtgagtgtatctatatcaaagtgcatccttttaacaatgaactaaccggcttttcctagtgttgccaacggcaccagtaccaacgccttaagccaaggcaacgtcagccaagtgccggcaagcaaccgcagcagtgtggaacgattcgcacgagcaccagcctccgaaggcccttacttcgccaatgcgcggatgccagagagatcggcacacctcgcggcgctatcaagccaactcaatgccatagaggagattatgaagactgggagttagaagatcaaagcaaatgaataaatgaataaataaattatccaacaccagcttctatgtatagtcggtctattaaatggaacgcaacgaaaaaccaatgaaggcggatatatcccgaaactccccctcaaagagtggatagattccgtaaacccttgttcatagtatatcgaagatgtaagatgctacttcctcgtacttggtgctggggaactcatgtcccgcttcgtaaaacttgaagacaacattgccatccagggcagccgtggcatctggaacaagttcacttttgacaatgattgaatcactattaccacacagaatgtgcactttgttatccgccggccttttatcttcattgcttgaggcgctattctgtgcagttaaatactcaccgagacgcgcccatgtgttccattggcgctctcgaaggattggaccataacgcatgctagacatgaacgcgtggacaaaccccttgttattattcacctgccacgccacggtagacgggatgttgatgtggggatactctcgggacagaatttgagttgctgcagcgctctgggatggcagttcttcggtgagtacatccgcggcactgggtttctcgttcttgggcttggacgaggccaaggggcctgccttcagccgacggctaaccaaggatgctaagatattctcaggcataagaccctttgagtaaaggagtcgactttggaaactgatatgcgaatcgcggagcaatcccgaaggggctaggagcaccaatgacgacagaagcttaggaaagtaggatgcaaaggcagccgcaatgccacctcccagagagtacccggtaaggcagaatttaccggactctgcacctgtccaagagataggcgatgatgtcagagcgaggaagatctgtgtcgagaagaggcggtcatcttgtggaagatcagcagggcagtcggagtatcctcttccgaacctatttttcaagggtcagcgataatacaaagtgttgaatgttgtgcaacacgtacaagtcaaatagcatcacacggcagccgcggtccaccaacgcatgggccaccccgccgagcgagatacacggtgtggtgataccgtgcacgaacaacaccttgggtccatcttctgggccccattcatacactcgcatagacccgtatgggctagcgacatcgcgagcaccgggcagggcatcagccgggagaggcaatttacgattctccgactcgggtaagactgtcgaccgaggcgatacgagaacagtcgggagcgattcgttttgagggaacaccgatcgagcgagtagaccaagtgtgaatgaagccccagtcactgctagcaaagggatctgagtctgatggtttgagaatgcaccagaaaggaaatccacagtttcgttgtacaggcccatggttgcaattgcgggaagtcacccctgaaacaaccgtagaagcaagttcgtcgaagattggaaaggtgttgtgatgtaatattgacgacctgaaccgacgagagtaatgaagggaggtaccactctgcaatgagggtaaacgaatgcaccgagttggaagacactagtgcttgagggctgcgaccgaggctcaccgcgctgccgtgttgacgccatgtgcctgcccaaatggtaagattagataagataagataaggataaacctcggcagttcggtcaactggtcagtcttggaagtatagagacccattcattcaacaccagttaaactacagaatataatcagcaggaccctcaaatgtttatttcaaaaaaataataacatcagatggtcctctccttcacagaatgtgtgacaggtccgccctcacacgctgcccgagccagccaatgacactaaggaatgttgttttcccacaatatctcacgtggtggctatctatagaccaagttattttcagtataagtagctaatcaatggtattctacgataattcagtgataattcagtgaagaggaatgtgcggtagtcgtgggtgtgaaattcagcagacgaggtcatccaacaacgtacgtgtgcgatggataaatggattgaacccatgactctcctatggtcaaccagttctgcaagaggatttgcagatcaaggtctagacatgaaggacaaagtgtactttgaccaagaaaatagcacagagagagaaaggaagtatagaaatacctaaaggcggccctaaggcaccaggcgcaggcctaagagaaaccatatagttactccgtacaagcgcaaagcttcatattatagatattgacttttgtattcaatcttcttcgggtgaacattagggctaaaataaattacaatttgggacctagtcaatccgacaaaggagggaaaggtcggatgaagctagaagcaaaagttagcaagggactcatttggaactggaataatagggacacatactgagcaggacactcatacccagcagggttattttgaagatagagctggtgatattcctccgcatcccaccactggcctgctggcaggatcttggtagaaagcggagttttataccactgcttgctgaccttgtctgtaatctcttgtgcgatcttttgctgctcttccccgtgcgtaaatatcgcactacggtactgtgtgccgacatctggaccctgccggttttctgttgtggggtcgtgcatgcggtagaagaattcaaggagctgacggtaggtcacaatcgagggatcaaagactatccggagggcctcggcatctgtggaaagaaaaaaaaagtaagtattcgaaggtgcgatcgcgataagaaattccgcgttatttctatcagatagcacggcacttacggccagttgaaccggagcagacagctcgataagttggcgacggaactgggccaccgcaatagcccaccttagcgtcgagtaggcctttgccgttgccgaaattcttgcggtacaagtgctcaacgccccaaaagcagccagctgctacggtcgcggtctccgtgccaggcattttgcgggatttggtttctgatgtcaagggaaaagctgagctggtggagaaggaacgaaagaagcgtgagaaaagggtcgaggcaaccggagcgacgaaagtcattggaaattctggtgatggtggagacgtacttgataagtggggatgctcgcgggttcgaaagtgaaagggaccgtacaggatgctgtaagactaatgaaaggggagcaatttgaagggaataaatataaaaatcaaagtctcagaacaaagagtgagagggaggaaagggaagaaatagaagggagctcgagattagagcttcgcgatggcgtcatcccagaatttacaaagcagcgcggggaattcgacagggatggaaagattagggcttccagcagccctatccgagtattattgtgattgtacaagagctgccctccagctgaaaaccaacaatgcaagaacagagagataataacaggcgaaatccaataagaattctgtcgtacaaatgtacaaaaaagaaatgtggtatctgctacgccaacaaaacaccagttccaaacaagtcaaaacaaaatcaaagctagtcatgaataatttcaagtcattcaccagagcccactaccacgcttgcgagttatggtcggcagcagggggtgctgccatcgcactgagacggatggcctctctgctggaaaggctgatatttcgaggtcggccgtctccacccaatgttgtgcggcggcccgtgttcttcataactgggagagtgtgaggactcaagacccgaggcttgacatcgtgttctttctcgcttttgaccatgcgccgcgcttgtgatgcagtgaacatgtggttgtctgcgggcggagtcccataggtagtagaagtcgggctgcgacggcggtgaacacgcagagtattggaggatgggttaaacagtccactaggaatccgtccattagacatacgtcgcatggctgaattgatcttaattgcatcttccttgtccgacttccagttgaccctgttttcagataccggactgctggagaagttgccgctgggactacgaactgcaatccgcgacggacgatccgtcgaggggcggttcataaagctgcttccttcaatatcacggaggggagagctatctctttttgaaagaggaaggctggatgacgggggtggtgccaatggtgagctgccatttctcttggccaagaatcctgccttaaagcgactgctgttcttttgaatgttcaaggtagacccagtggattcatcaggtgtaggtgaaatagaaccggccgggctgataaccctcggaatatttcgtggaatgggagatcccgatcgaggtggcaaccatgacttttcaaagctagtttcatctgcagagtcgaccttcttaggggtcttttggaactcggtcaaagtgccgtcttcctcatcgtccttccatcggacggatcgcttgggaattttcatctggactttctttggcgaaaaactgacactcttccggccggcagtgcctctacggcgacgtggagatcctttagttggtgaagcaggagcatcaggggtgagtgtggttggaggattggcgctcgatacttgtggcaagctcaccaagctgaagcgcttctttgtttttgtggggcttgcaggcctagcagagctgaggttcgggacagacggcatggtaccgtctggtttgacaaggttggttgctgcatctgaacaatcctctaacatctttgtaaggatagtccgcccctttttgagagcctcgttggcgtttagctgcatgatatcctcgatggagttcatcatctcaaactgtgcttgcaacagaagctgcacggcagcagcttctccagccttgtcctgttctagcacagcggtcaatgcttcgcgctctgcattggaccgaagaagatctgcttctcggttcaaattggcatagtcgctgttatcggtaatgtcaaactcttgaagctgctttgccgcgttctccaccgccgagttcaccgctcggtcccaagtgctctttgctaatttctggttgtaatgatgtctgctaccttccagttcaagaaggattccctgtgcagatttgcggacagcatataggttcgataagccctcctcagtttcatgcgcggcgcaaacattatcaaaggccgcaatccaggacgataaaatgccaattctgcggccgatttgccttagtttcagcatgttgttcgtcttctcttgtctttcgggtaacgtatgttcgtaggcattgcgaatccgggaaacgccctcgcgcaagacagcgtctttcttctcaccttgcttgcggaacttagtgaaggctgccttttcgtagtcttttgcctgtgctttgagctcattgatcaaattcatttgctcgtcgatcttgaccaaaaagtccttcacgtgtcggttaacgttgaacacatttcgtgtgaccttagtctggatgttcttcgctcgattcgcatatcgaagtgtattttgggtctcgtcaaagtgctggcttgaggggctgacacagacaatcatcactgtcttgcaattgccaccaagagcaaacttaagtaatcgagtgagctttgagttacgataggggatgtggttacgctttcgagggtcgcaaagtgcattgatgcaacttcccagggacaacagagacttgttgatattggcgccttcgaacaaacgttctcccctgttctgtgtcgcgctggcacgctcacttcccgctaaatcgatgatactgaaagtggccatagtgtgaggctcattgacgtcggcatttcggtctttttgggcgatgttgatttgaaggacggcatgcgatcttgatgaagtagcatttgctgccgtaggagacatggtgcgacgctcgttgccttgcatgatcatgtccattacctctcccacattgtgcgggtggtagcttgacagcccagcaactgagaccgactggttggaatcctcccgcagcatcagtccaccctttccactgctaccacaagggacaagcaagtcacgaatggtttcattatagatttcgaggtaggaaagagaaatttcggtcgatttttcgtctgcccgttcgtcaatccgctcaaaaagctcctgcatagtgagaaagatgataccgggctgttgggcagtcccggtgattgtatgggtctttccacatccagtagctccgtacgcaaatactgtcgcattgtatccatcgagcacgttgtcgagcaggctgcgtgttgtagattcgtatacctctccctgggaggcattttggtcgaagatgcgatcgaaggcgaatgtttggtccttgacacgcttaccatttggcaccacgctcctagagaacttttggacgggattgtcctctggggggtcaaacaccctagtccggttaggatgttggacccaaaacgttcaaaatacatggaatactcacaagcaacggtcgtcaatcactttaacgatggatcgtatacccttctggttaagcttcggcgtcggcgcacccgcgagggaaccatcgcctaggaacagcggaccctcgtcacatcgtgtgatctgggctgcctctctgatagtaaatggtcgtactctgactgtaacgctgatcgaggaagcgccgtcggaggcagccatgttggaaggtcgggtcggatcaaccccaagtcgcgaggtgtcttgcggggccggtacgtcaggcggttgacgacaccctgcaatggcaaagccaagggggaaacttagctatttgtcaaaatcaaagaatgtagaaaagttgaagaatggatctaaaggtgtatggggtagggggtgcaggtattctccgagaggggctccttgaagcgatttcatttgttgatgcgtgtatatgttgtcatctagtggttgctccgagcaaccgtttcatagtggtatttggtcatttaggcgtggcaataccagtcattcaatacaaagagttcttagtcacatgatatgttgtgtgtttcaggttctgaacacgtcccgtccactttgttcacagccactatgttcaagttcgccggccaaattgcggttattaggcctttcatagtattaacctcaatatgctaagacaaaagctgtaaatagctaggaggagattatgatcgtattatgacattgactaacattgtaacgatttcagtgaataacaccaatctttaccataaagcgggtatatttgctctcgagatatggaaaatttatgaataaaaatcatcgctttcgtgttgctattgtcctagtaatatcatttttcgtctgcacaaacatcatatgatagtttgaccaccagagcctcctgaaacgccgaaggccatagagatgtatcctctgaccctagttcttcctcgcaaatcataatggccctattattgttcctctggctcatcttcataggtcggcatgatgacatcccagcccggatcttcaccatcaaggtccatatcaagaccgccactctgatcctcggtggatttgtggaagcggaaggcaattgaatatccgttctctagatcggcttccattacagttggtgagtcattttggttcatatttcttttcggggcaccctcgttgtccattcctggtacatctgcctggaggcgtttccagcctttttcgaggtccgctcggtcgacaggctcaccgaactcaacatcggaggtggagtcaggaacaatgtcgccattaatgttggtaatatttcgcgatttcagagcatccagaagcctttttttgacgaagtagagtgactcgtggggttggagcatcagaaggacagtggttttatgcttcttgaagaggacggtcacagcgcgcgagtcggttttggattgcctgggaggctgcttgataattagccatcctgcattcgatgatatttacttgaagatatcaattctcataccatcttagaggctgcggggaaattaaagggtaggtcgcgtctgtaattgattatttgggagtgacggaaggtggagaatccggcgggactccgacttccgcgctccgaatctctgagctctgccagcatctcacattcaccacgctctctatagccagcccttgaaattggttgctagtatcctcattcttcctttacaagcttcaccatggatgccaatcaccccccatctaccgactcacagcataattccatcgtcctcaggatcgtccactgggacaagctgtttgaatccgacagccctccacggttaggaattgagttcggcaagcggttaccgtatgctaccctatcggctttttcgactggtctggcattagggtactaccacggcagcaaaagggcagggctcgtgtttcgggctgagaatgcgcatcgtttccccacgacatcaacagggtggttccagtaccataaaacgaaaaactatattggcgtggttggaggggtcaaggatggtatgaagatgggattcaagctaggtgctggcgcacttgcattctgtctgtttgaggaaacagtggactatgctcggcatgacgagagagactttttatcgacggtcactgccgggctatcattctccggaatctacagcttgcttggtaaggaaactattccacttggacatcaatactaggggaaccgaagctgacctagcttgcatacagctcgtcacgatgtgtacactgccgcccgcacagcgaagcttgggttgaaattgagcttgacctacggtcttctgcaagatgctcttgggactttgaaaggaaaccgccctgcctatgttgatttcctcctcggcaaccggcggtccaaagtcgataaagaagcatcaatgtgatcataggcggacccatatcagaatggtcccttagatccttctttgtgcgcatgccccagtctcgcggcaggcttgagagacccccaatgccgataaacaatattaggctctcccacttcactccctaggacactcttcggcctacgcatgctactgcaggtggtatgcattcgacgccggcgagatgagccacatatccgagtcaatgccgccccaattactatgtctaggcctcgagccactctgaggtttttagtcggtgagcacggcctctctccgtctgatcgtgtgtttttcagaagcaacacccacactgtactcttggttacttgtattatttacattttttgataccccctcgtccaattagcatcgaaccaatgaacattatttttccttggggtgctatgtacatagtgacacgtgacccgccggattctgtgttggggttatgatcatgcaccaagtcgattagcaacgccattgtggcgtgactagatcgcattcggactaaaatattaaggcattctataaacatccaacgattggcgtaggattactacgtggctacatggccctgaaataatataattataaaaaaagtctgacggttaccccgacacaacgatgtagagaaacaaagtaaactagctgattccgggccctgacagcgaaatctacgtacttcgtatatcttcccaattggcgtccacggatctttctttgtctccggggataagcaaatagagaagatcggcccgaatgctgcaggttcaaaggatggtgattgaccgctcagtgctgtcccccactttttttcaaaaggaaagaaagaaacgtcttcaagaccaatatgtatctatattgatctatagtgatctatattggcttacaagactagaatacgtcaaatcccaaagtggaggttcccatagagtttccgaaggcacccaggtgatcggtggagaaaccgcatttgacgtcgctgattcggaaaaccccccacctcaacaccttagctcgaacttgtcgtgtccgacctttttttccccaatcttcgcttctcctctataccttacgtccatgtctgtccgttaaactccgcgatagcaattgggcgaagatgccgatgcgaggttcgacgctgctttcgtcgacgtcatcgatttattgacctctttaatgcctgggagaaataattgaatcatccatcccacatcttcattcagactcgtgaactgcatcacaatgcgtcgccatggcaggtccagtggcggtccaaccaaggccgtctcgcccttgtccgacactgtatccctcatacgttcattcgattcggtcatgaacccaaaccgacccgcgcgcccctcacccttggcttcctctcacatccaagctttgcccttggaactagtagatcggttgcggtctttcccgctgtttcaagctaccccggaatccttcctgatcgaggttggacagcacctgcgtccacagctccacgcacccaacgattatatcttgacggaaggcgatgagtcaaaggcaatatactggctggtgcggggtgccgtctcggtcacatctcgcgatggcgagagcatatacgccgagctcaaacccggtgcgttcttcggggagattggattactcatggaccgtcctcgtactgcgaccatcatcgcccggactcgatgcatgctggtcgtgctgacaaaagacgactttcggaatatattgcctcggtatccggaggtagaacaggcgatccgggaggaggcggaggaacgattgatgattttagaaaagaaaaaaaaggaaacgtcagcgcctgcactggatatgccgagcccggcacgaagaggctcaaaaagactgcgtgaaagcatttcaaagggtctagctgttgccgaggatgatggagacgtcagtgccaagtctgtgtacaagaagaggaagtcaccgagtcccggtcggcgggatggctccagtgcattagcaaatggattggtcaacgtacgtctcttactgaaagagctgccgcttttttctggcttgcctgccgatatcctccactaccttggtctcaatgcccaaccgcaatctttccctccatttaccgacatcatacaacaaaattcccagggccgtgagctctacttcattgttcgcggcgaggtagaggttcttactgaaaaggcggagatggaccactcgtcggcaaacaaaacaagcccaaatgggcacatcgaacagccgggaattgaggtcaaagctaggctgaagcaagggcaatactttggcgaggtggtcagcctagatttggcacctcggcgaaccgccaccgttcgatctgtgacttcagttgagtgtttgatgctcggcggtgacgtcctggctaaattttgggagaaatgccctagtgacgtgcgagaacaagtccaacgcactgcccaggcaaggctccaggcggcagccgatggcgatgttattatgtctgacgaggcggactcacagccgtctcttggtgatctcgccctcgacgacagggtgaagatcacatcatcccggcggcggtcaatgccactacttaccctcactgaaaccgagctggatggaccacatcaatcctcaaatgctgaagaccaagaccaggacgtgctgcggccctcagatcccgatccatacttcagcatgggtctagataaagtccggatgcgaagtcgacgtggctcgctggcacctctagcccccgaggaggtatcaagagagcagcagcgctcatctcctacagagctgtgctctgccagttcttcaaccctcgccctttctgaaactgctagcctttccaagtcatatcataccgaacggccccgggtcgatggtaccaatggattactcccagacagtgtattgctgaacattttccaattccttgagcttcaccaacttcttcggattagggcggtgtcatcccattggtcagatctcttgaccagatctgcggacgtgattcatgatctggatttgagcgtctacaatcgtaggattacagatgacgttcttgttaaaatcatctgtccgtttattggcaatcgagcccgatcggtcaatatcaacaactgctttcatattaccgacgaaggcttcacagtattggccgcgacttgtgccccaaatatcaccgcgtggaagatgaagagtgtgtgggatgtaacggcctctgccattcttgacatgtccagcaaagctacaaatatacaggagatagacttgagcaattgccgcaaggtcggcgatacacttctcgcccggatcattggatgggtagtgcccgccgaccagacgatgggcgagaagcagtcatcgatcaaacctacaatacagacagcagaatttacagtgtacggctgtccaaagttaaagaaacttactctttcttactgcaaacatgtcaccgatcgatctatgcatcacattgcgtctcatgccgctggtcggattgaggaaatggatttgactcgctgcaccacaatcacagatcaagggttcaaatactgggggaatgctcagttcactaacctgcggaagctttgcttagcagattgcacgtatttgacggacaacgccatcgtgcatctaactaatgcagccaaaaacttggaggaattagatttggtaagctattctttgtcgggctctgtcgaactagaaataccatggtttactaatcgccaccagactttttgctgcgcattgtcagatacggcaaccgaggtccttgccttgcagtgctcacatttgaagtatctcaacatggcgttttgcggctctgcaatttccgatccctccttaaggagcattggtctccacctactttctcttcaacatttatcagtccgtggctgtgttcgagtcactggagtgggtgtggaggctgttgcggagggctgccaccaactccgggttttcgatgtcagtcaatgcaagaatcttgcaccgtggcttgaggacggtggtgctgttcactatcaaccgagagtcgaattcaaaaccgtcgccccgaacaagaagcttcctcgattaggaagcaacacatacaaagcttaacctcttcattgcacactcttacgctggtttctctaccgttaccttttccccctctacaacgacgcctggcgcgacgcccgtccatcctccatcctccaagttgcatgatacatttattgatagatgatgtacgcctctctaatcttcttctcattaatttctaggcttaccattctctagtttccgctttgccatccctaactgatcgatctcggcgtttgaatttaccaggacaatcttttcacattcggattcattcttctcgcgtcgggctgcaggttcttgtttttacattttggtgggggtttcggtctagcctgtgggcaggtcaagcatggccggagttcagagattgaaagcatctacgagttacatggtgtttgtctgttttccttaatattcagtgttttggggctatcttgtatcctttcttacgatgtaacgatgcacatctatttgattttatcgacatttctttctgtattttaaggtccttgatgctatctatttctggtttgtagaaattcatttgactataaagccgaaggtcttgtagcgcatgctatagtgccaagcccaaatcatatacaacattgaacgcttttccaaggttttacattacacctacacaatccatatgtctctacccttggaagttgtaaacataaaacttcaacttatagcctaaaaatgtcctttgtgaagtcttttctgccccctttgtcacctcttcgctttcttggaatctttatcgggccttgtctcaacctatttaagatcgtgtatgaacattcattgagacgaagacaaagagcccaatgagcattgtagtatgttctgttataccttttcatcagtccccatgctcttcctatctactctatctcagattgacttttcgaaatctgaactcgctgaccgaaaattatgtgctgtgttataaatagaggataatatatcgccatcaatccccacgctggcttgaaaaacgaaaaattgcagacatcagccagttctgcttacttacaatggtggctgctttgatatatagtacactcagcatactgtctatactctgtcttcggcttctatgtatttcacaaggtctagatttcttttcactgtgtccgtgttatgctgtttcgggtggccgtatcacgatcttttcgctggtcgttcatatcatttccatggtatttacttcgtgatcttatatataaagtgcctctctttatggtccatcagtcggctgatcaagatgcgatgccattcgtgcctaaacagagcatgtctccccaaaaccccagcttgctgtcttttcccacatttagccgaatcgtcaatttgaatcatccttcccctggtctctttaggggcccaataatactgcctgaataacgtatggactacgaaatgtaagctacagataggactagccgaaagaatacgaaaggcagagatttgaaaaggatatgaggtgacccaccctcgagggagccggacatgggcgagcctggcaattgtggatgtgatggggctaggataataccttcttcaaccgctgagggagaagagtagctactgacggggttgtccaaacctactgaagcggcatgtgctgcactagcaatggtctagtggagagatctatcatcacagtccacccggaccgagaccccgacagccggctcatcgcggcctacagcagtggggcactctggtaagcggtcctttccctttgattctagatcggctttctgtgctgttttcatgtaggccatcatattcagtggcaattagacgaattccatttgacatatagtactttgtactcacaaggcggggaagatcctcctcttgaagtccagggcaaggggaattggtgaaacatctgttctcaaagagaagcgcaagactgccttctatttagcataactcaactgccagcaggatctcgttgttttgcacaagcttttagttgagaaatttagcataagatgtgaagtgagtttggtaatagcaattacagccgccagccagccgagcacggtacaggcatataaatggcaccggctcgatctacctctagtctgacttttgaggatttatatatgcaagttggtctcaacgaaccaagggtcagctgaaagtgtgtcgatctgacggcgatcaacagatctagggtttctcacagcagtggaaaacttgttttcctttttttcttgacctagcatatgtaaacattctaatagacaggtctatttatgtgtttatgtctcaaaacaatagaactataccagaatcttaaaactatatgacaagtattgtggagtaggtatagcactaagctagaaggggcaaacgaacacacagcgcagatgttgaacattggagaaaacgtgccatgtgtattttgaatccgacctggtctgctctttaacaatgccgtcatacaatgctatcatataatacagtctgataaaaaccagttaaactacagcaaaagcaaccaataatcaaacccccttacattccacaccccttggtttattgtagtagatctaatgacgcatgtgtagttactcatgtatgtagatcagagattgccaaaacttatgtatgtagatcgaaacattccttctagaaggatacctgaaaacaatcggttgctggccagcggtgaggtacccggatgagggttatgcttatcttgaccgttatcggtctccccctattattatcgccgcacccagccgagaacgagaacgatctctcataatgcatgcccgtgccagacactagtgatccgcgtccctgcccagtgcttggtgtatccgccggtgcctagcgactgactgacaactgagacagataaggttagatcatattggatcacggtcctaataggcaggagtcgctagtcaagtcttgggggcaaaagtgagcttcctagtgcggaatacaggtgcttggtgccgagtccgccgagagagaataatgagtgtagcgagctcttggtagcttgtggcagcctaatgcgagggtcacgcatggagtacggaggaaattatcgaattttaaggtctgatttctcttctttgtcctaatggctacatttaccttcggctggcctcattggttcaagtcaagacgccccgagaacggacatcggatgtccgacccaaggggtatcaaagtatatatcgtacagtatacgtacacagcaagaaaatgtactccgcactccgcatggtacatcatattcagaataacattgtcgatacacggggtatggagtatgttgtacgaagtatatatggagtcgacattgtctgaactggtttatctgcggagaaaggaaaagggaaagtggaaaagtaccaatgctcgcactagtactgtatctagtgtactccgtacagcaatttccgacgacaaacacctggggtgtctcacttctcaacggtcacgcattggctgctggccatcattggtcagataagaataatttggctcaaagctaagattggctaatttggtcaaattagcgtatcttttttcctttgtcataccatgatcacctgcgcaggatcagctgttcatcacgaacttaaaataccagaatactatacattaccatgcaataccacgcacagacggaaccccccgaacctctccacaaaaaaaagggaaaaaataaagaataaaaaatagacgagcaaataccagccaatcagaatcagcccaggcttagataattgaccctttggcttcgacccgtggaccctaccttccaaggtcgacggcgtccatcctgattgggttagcgcctgtcaattcatgttttcatgttttcagtccacggaggggagggataactaccatgcatggtattaataactatcgcctcccctccgttttcattctctttcgatcagacaacattgaactgctttcgttctaaataatcatcgcctttgcagtggatataatcttcacttgctgcctctcatttatatcaacatctaacttatactatcgccccctttttttgtttccccacattttccctcgtttcctgtggcttggattcaaatcattcgatattctgtcatttccactgtacataccaacagtacatatataatggttcgcttcgtgacacctttgctcctggcctcgctgtcagtgaccgccttcgccgcgcaatcctgcagctccagcagccagtgtgacgagaaatacccctgctgctcccgtgagtgatactccctctagatcgcaattgatagctaacaagtcattcaaatctagaatatggtgagtgcggtactggtgcctactgcctgggcggttgcgaccctcttgcatcgttctctctcgattcatgcgctcctatgcccgtctgcgaggataagacttacaactggaacaacctcaacaattccgtcacccaggacaagtacctcggtaacgccagcactgccgactggacctacagcggaaaggtgaaaaccgaggatggcaatctgatcatgaccatgcctgccaacagtgtcggtactctcttcgccaacaaccactacatctggtacggcaaggtttccggaaagattaagagctcccgcggcaagggtgtcgtgactgcttttattcttctgtccgatgtcaaggacgaaatcgactacgagtgggtcggtgctgatttgaccgccgtgcagaccaactactactggcagggtgttctggactgtaagtcaaaagcaacaaggaatatctgatcccaataataaatactgacttgatgaaccaggggagaacgccggcaacatcagcgtggatggcgaggacaccttcaatgactggcacacttacgagatcgattggacccctgagaaggtcgactgggtcgtcgacggctccgtgcgccgcactttgaaaaaggccgacacctacaacgagacctccaagcagtacgagttcccccagacaccctctcgccttcaaatgtcgctctggcccgccggccaggccagcaacgcccagggtaccattgactgggccggtggtgatatcgactggaacagcgaggacatccagaccgtcggctacgactatgccatggtcggcgaggtcagcgttcagtgctacgatgctccttccgacgtcaccaagaccggcgacaacgcctatatctacaccaaatcttctgctatggagagcgatatctccatcaccgacaactccaccgtccttgcctcgctgggcgccaccggtctcgacatggatcttggtgctgacaaatcttctgcatcctcctctgcgtccaatagcatccccaccagcaacggtggctccggtggcatgaccagcaacatcaccagctctggtgaatctaactccagctccagctctggtacttccaccacggatagctcggggacttccacttcgggcttcacccagggaaccgctacccaagacagcggtgcggccagccaaaatgagcgtgtcctccgtggctcgctcttcggcgtcctggtggctcttgttgtccttgtgacaatttaaattttttgctggtttgatctatatatcagcgttttgtccttattattttctttcttgccatgcttattgcacagcattgggtacattttttgttgactactgtgcaactttgcttcgtgtctatctctgaccgaccttgaacaaacacttaatgaatacctttgttccttgtatattttttttccttctcttttttttatcctccttcttgtcccttcattaggttgtgatgttcaacggttgactgcatacgtgtctgcattttccctccattttattgtttaacatacacctccctggcgttcttggccgattcatgctctgtcggtttatttttgattgatgtaccactattctggtaatgacttgtgattccctgcacatgactggaaaatacccacaagctccctgtgatctttgttcatatttaatctctatagcttcctctttctgcgttaatttttatttgccgctttttgaccactgataaaactgagcccttattgtgtaaccaataagcttgtctggaactaactaggcagtctgccgggaagtgaccaatgagacatttcttcaatatttgagcatgcaaaatagatatgaatatagaatgataacaaacagcgttgaaaggagcatataaacatagaaaagaatgcgtgaaccacaaaatgactatttccaagaagtcatacccagctttacgccgatttctcagccttgatctttacttcctccaccttcaattcctccttgagaggctttcttgcccacacgcgattcctgaaatatatcagcatgagtaaatccagcgatccgatccgaaagcaaacttacgcaggctcataagcgtgaatacgcgggttgttcagctccttgcgcactttaaccagaaacacctgcacctcctcctttgaccacggctctggctctccaaagtgagtgagaagccacatcgcccaaccctctagagcggcgttccaatggctatgctggaggtgtccggcctccttcagtatattatccctggcccaacatcctagaggaatcttgtacttttcctcatgcacgtccacgaacccggcttcctcgatggcgctacgcattgtttcgtgggttctgagtgaccgtcctgctcgttcggagcatccgataaaaatgtcgccccaaccatatagctggtgttctttcgtcaaggtgccgtcatcgctgtagactcgcacgtctaattcgatttgttcgatccagccaccaggctctagggcactagtgagagatgaaagaaattagggcgccatgtctcggaaagtcgattagtagggaattggaactcactcgtaggcctgtttgtatagcttttgccatccatcgggagggaaggcgccatacatgaggcgcatgtggataaagtcaaacggctctctccatgtccactcgcgaagcacatcatccacctcgaagatgcagttcgggggcatccataacacgggtgggggaaagagatccacgccgcggacggtagctagttagtttcagtcaggggtagttcggtcagaaatagaaggagtagaatcaagaaattcaatacctagaggatagcgatcggcaacatcactaaggacttgttagagattctctttctctcaagaagggctacccgttgacatacattgcccaactcccttggccagttccgatgtccaagatattctatactccgtagttagcagggcgtttaagcgagggtctccgtataaattcaccttaggcgaagcgccgataggggagcggaacagaggatttggctgatcgtgatctagcacgagaaacatcaggtggctgaatttgttagtatcacatctctgaaaggtatggggacgggatgtggtttacccaatctcaaatgcctcaaattgctgctcgtcggaaggaccccttgatattgttactttatgtagaacaagatcgctgcatcgtaactaaccagtagtcatcttctttgatggcttggtatctgcataccgggttagtcttacaaagcatcttagactggaagtatactgaccttcggccgttttccagccgtccccttgcaatagcggacgctatggatgtagtatccctacatactggggtaagaactcgacttatatatatgatttgcagtgacactcacgactgaaggtcatgatgatccacgtcatagccagtggccatagagtagaaatcggggtcctaggtgagaggtgagaatgactatatcggattatgagattaccactcaccaccgcgatttggtccattttcttaaccattctctcgacacttttccaaatactgtggaagataaaaggaggaaaacgagggtggagtgtaaaagtgtcagcacgggaacaaactcccggggaatccacaaccgttaagctagcagggtgtgagccgaagccacagccctagagtatgaccgagttgggtctaggttgaggactcgcataaaaaaagtacgaggggaacggcaggatgctgttgatccatgtcagctggtccgtgtgggacctcataaagcggcaccccgggagccatgttcacttctgagtatgttgtacaggcagaacaacaagccctaaaccaacatcctcccacttggtattccacaaaacaaggctcatgagccaaattcaagctcattccataataggtggcctcaaagcttgcatctaccttatcacaaatcaggtaagatacgagcatacccctcttgggagcaacctcaagtagagatcttcgaaggataacccatgcaataagagaaattcaatggtcccttgagccgttttatgttgatagatgatatttcagtatataaatcaagtattgcctcggcatgagacgtgactacaagatatagcaatgtgagcgaaacagatagctagtatgtaggtatgcctttcatgtagcttcatataactcttgggatattcacggataggaacatttaagtctatcacagcttttaatactctttgtctatgtttggccctagcctccttgtcccattatctcaccatactggtttctttcttgacatctgcgtataagctgtatgctccaaagcagttgatatttccctcactaaatacctttacctcctacctcagactatactccagggctttcatcatgatttacgtaaataaaatgatatttgttcttgtgtggatggagcaaacagagtagcaacaaacaaggcttattcttcagctcacttttccttcattgtcactgtagtatatgacctggcttcattcactgtgctctatcaaaaacaggcttgctttaccattgcgcaaagcccatttcttcgtatactggactcccaacttcctagcatcgcactcaaccacaggttctctatatgataacaaaagtcatactagccagtctcatactacgcgacacgtcccagacttcccactacaatcaatcaatcgccctcacatagtgaggatacaaccagtaagcgcaaatagacattctacctcgaacagcactgacacgtaataaagctctctcaaagcagacgaacgtagagtctgtagcctcgcgtggcatccacacgagatacttcaaaatgtgtctattcatggagacccactacttcagttgcaagcatacgtgctttgagctctacctcttttgccgcgaggtcctctatcaactgaaccgtatcaacgaccggcaacagctcagagactacgatttgccatttgaccctgattgtcctacctgccagccatatacagtcaccatgagaccagtcacattcagtccggatgtgaattatcagagtgtgattttggagagcaatattgtgcatcggagggtggatttggtggcgagctgtcctaattgtcatacacaagcattgtgattccaatttatactttagccagaatatgggttcatgccgatagaaagtattgtggtgatgaagggatgtgcctattgaagataatttactgggcatctagaagccagaagagaagataacacccaaaataccaagcttatttctcgtaagactaatgttcgctgtacacgcgtgttcaagtaaatgcgagagctaaattgcatatatgtatatataatgatgatgatgatgaaaccccgaagtattgacagtgctgcccagtacagaaaattcacagaataggtaaatgccgagtggtgacaatcgtttagtggatagcaccacatccacaatcatcggcagatcgcttcctgaagtctccatggtaagtgtctagtccctcggcatggaaattcaagcccaggcgatcgcccatccagtcacttccagacttagtatcctgtagcaacttcgtgacgttgtcgacattgagatcaagataatcagcaaggaagtctcccacatcggtgttctcgttgttgccaaccaatggccaggcatccttggtagacgaagcgtagatgttgacgtcaacagctataacgaaattagcatactatcatagatcactgcttgagactatcttaccagaatgtccatgagtagtccagccaacctgagcgcgacggctgatcatgtccgcaaatacgtatgccgtagtgacttcggggtccgggtggagcaaggtattcacttcatcctttgaagcatcatcgatgccaagcccatccttgagagtttgccggatccaagactgtttactcaaatcctcggcgtcctttcctggcccagaaagatattccttcagttgagcggcaaggtattcgccggagtggtttgccttttccaggacattcggaagccacaaatactccgggtagctcttgtgcagctgtcgtgccgcggcaagaccaccagtctcgtggtcggaggtgctcacaatcacaccaggagtagagtcattctctaggaactcgagcgcggcagcaaatgccttgtcgtatgccagtacctcgtgaacctgggcggcaggatcattgccatggccggcgtgatcgatgcgagagccctcgatcatgataaagaacccttgctcgctgtcctcggtggccttgctcaaggccttcaaggcagtgcgagtcatctcctccaaagagggatagatatcattctgagtgcgtcgatcaatctcatacgggatatccccgctagcgaagagacctagcagcggtaaactgacattatcgccgcccttgaggctatcgaagccagcacgatcatcaatatagccaaatccattctgagaagcaaccttgaccaaatcatgatcatccgaacggcagctgccagcctgtgagttgggcaagaaatggcatcgcccaccgccaagcagaagatctaccacccgaccgagagggtgttcaccaacttcttgggcagcgatcagatcttcgtagttccgtaaattggcatgggcggcgaagcatgctggggtcgcatccgtcaggcgagtggtcacaaccagacctgtcttatagcccgccaacgcagcggcctccagcacagttccacaaggcgagtggtcgggaagcaccgagatagcagaattgtagctcttgcgaccgcatgaaaaagccgtcgctccagccgcagagtctgtcaccaagctagagcttgaccgtgttcgcgaagtcccaacgtagtgtttatccaagaccagaatgtcatcgaatggcagatcgtgcgtgtattgccggaagcttcgagtcagcgagagactggtaggtcccatgccatcagacaccatgaagatcatgttccgcttgcctgtcggcttgcctccagggccccaggtcgtgtttgacgcaagatggttgtgaggctcggctgacttgtgtgggtagatcgcggccagcacaatgaccaaaattgttgcaacaagggcccaggaaaatactccaatttcccgccaggaaggccaggctcgtcgtttgtcttgatgagtcgttcgctcgccggtcagaagagcgtagtcctcctcgtcatttcgaatcgatgagccatcggaggacaggcggggaggtaagagagactcttcccgcgccatagctgggatagagacagaattagagaagagtgaaaacagatgtgcgaggttgagagatttgattacggccttccaaggttgtgtcaagtggaccctgaaccccaggggcggaggtgaggagataaggctaagataacaaccctagaggtcgcgtgacatgtaactgtgtatggatgcaacgtactccgtataagaactacacctagcctttcgtaaaaccaagaatgaacggagaaaaattcttacattttgaaacaggctagttcatatacttgaacaatatttataatacatgtcattctcaagacaacctataacccctatactatagaggtctggccttccacccaataggaatcatggcagcagcaatctcagttacaccgcgctccgtcgcaagcagattgaactgtgcagccgcattccgggtatcgagaacatccacccgaatgcccagcgagttgatgtgacgtttagtttcgggcgagagtgggaacatggagccaccaagaccaaggatgagcatatctgtagtaaaatattagaaaattggagagtaatttggcagtcaagctcaggtatgtctcatccatggacgaaacgacatatctgagggaaacaaaaagcaagaagaaccaacataccaggctttggccagacaagacttagcaaaccccataccgactcatcaagctcaaactgccctttggagttgagcatggcatccttagcggcactgtcgctctctgcaccctggacagccttccatggccgccacgcaaatgcctcacctccaaccagcaacagcccatcgccgttggtaagcttgacgccattgttaagatggaacccagaatctaggcatgcatcaatagccgtcgttggcgcagggatgttgcccagcacgtttaacgcatcgaagttggtctgagtgtcttctttggactccgggccgcggtcgcgactgacgggtttgtgcgcgtgtgagcgaggaatcatgcgcgttggttggatgggtgaactatagttccgacgtcctgagggcaacccagtgttggaatttgagacgagacatggtgctgcggtcgctgatgggatctggcagaatcgagtcaagttcgaagtgcggcggctattggctagagaggtgcgtaagacgcgtaggagttgtggtgatggtgaaagcattgatgcgatatgtgggatagagcggctgtcgggttggttctgtatgatatagcttggtgatgtaactagtggctcggttggtgtcacgtgaagtaaaccttggaagctttctgtcggggtcttggctgagaaagctagcggccccggcctacatattgacacgcactaatgcgcctctacataagtttaatcatatcacgcactcatattgcaaggatgtagaaagaaaaacggttgggaattctatacaaaccgaaagtggctctgtgtggagtgagcatggactccatgatctcaacttgaagccctagtctatcagatagaaatgatgcacacaagcaactagttatgatccacgttaataattgaattcttcttatattaatattgagcctagcgattcatctattttgactttgcaggagtcccaaccccgaccctctgcgtctggattcatatggaacaaggacaagaggagagacgacaacatcgtacgcgtcgtaaacccaaaacgccaacagaaaaaaacagataacgagggggaaacgatacctggaagaacgaacgaactgaaaaacgacaaataatggaagaagagaaaagcagattatgtgtcacccctcgagatgagacatcaaacttgatgtcatgctgcctccgattgctactgcctctgaatacttttcttgtaaggatatgaagaaaaaaaagtatgcatatgtgaaaaacaagagccattcactgaccctattttagcggttcgggccttgctgattttgttgtttcagcgaccgaacaactttgcggtcttcatccgactgactagagctgctatcatcgcttgtggttgcagtgcggattcgctcggctagaacctgagcttctgccatagccttttgggcgcgaatctgtttacgccacatgctagcatagcgacccttcatagccaaaagctcttcatgggtgccgctttcagccacttgaccttctgacaagaccaagatacggtctgcggtagtgatggtgctgagacgatgagcgatcaccagcatggtgcgaccccgcgagagagtagcgagtgccctctgaatatgctcctcggtatctgtgtctagagctgcggttgcctcatctaaaagaatgatgcgcgggttcttgatgatggtgcgagcgatagccacacgttgcttctcgccaccgctaagccgtaggccacgctctccgaccttcgtgttatacccgtctgggaaagcaagaatcttgtcgtgaatactggcagcgcggcaagcctcgaaaacatcttcatcggtggcgtcctggttggcgtacttcaagttgtacatcaaagtctcgttgaaaagtacagtatcttgaggcaccacaccaatgttctggcgtagtgaatcgattgtgacatcctgtacatcatgtccgtcgatacagatacgtccattatcggagttgtagaatctgaacaagaggcggaagacggtggacttacctccgccagactcaccaaccaaggcggtggtagttcccggctggcagtggaaggtaaggccattcaacgcgggcttacgcgcatcgtaagcgaactcaacattctcgaatttgatgtcaccattgcatacggccaatggggtggcacttgggctatcgaccacagttggctgctcacggaacaattctagcagtcgttcggcattgatcaatgcagattgaatagaccgatagaatgtgccaaagaaattgagcgggccctggagttggaccatataggccagtagagacacgaacttgccgacagggcgctgaccactagcaacctggtatgcacaaatgaagcacattatcaacaagcccatcataaacacggtgttttgacaggtgttcagtagtgttagagagaatagcacgtggtattcggccttctggaagtcacgcacagcaccccggtaccggttgaattcgtactgttcggcattgaagtatttcactgtctcatacgagaccatggaatcgttcctagaagaagcataagttagtaccacatttgtctcgaatctataacaaaagcctccttccaacttacttgacagcatcttcttgtcgcgaggcattaaccatctgtcttctgatctctgctctccactgggccatgcgaatagtgacatagagatagccaaaagtagaaattccgacagctagggcatagtagacatcgaatgcgaccatgaagtacacaatcgcaatgacaaggtcgacaagcattggcacaacctgaaaggtgacctgctcaaggaaagtattgatcgaactgcccttactcagagcggacaggacttctccggtcttttttccgagatggaagtctaagctgagactatggacgtgttcgaatgcagcggtggagagctccatgtaagaatactggctcacgggaatccagaggctagagcgcagagagctgagtaggccctggccgccctgcaaccaccggtacaacacatacaggcaaatttgaagccatggcacatggaagtccccaccctcaccctcgctcttagtaagagaacctgtaatgagtccgatttggtagggtaccaggacgttaacgactctctggcatatgaggagtccaaaacaaaaggtgacaattagttgcagacggcgagatttggacggccacaggtatgggaaaaatagcgagtacccgctcaggtactcccaccagctagtggaagggacagtcgtcggacgcacccatggatcggtaggtttggaattttcggggcgaggagctccgttcgtcgagccatatgaatgaccattggcagttccgtttccatgtccgttcccattgccattttctgcaccaccggaatccaaaagtcccgtggcttccgtgactccattcgctccctggcttgccttcccgtggctcttcatgctgaacgattgacaggcgtagagaagaaccagtgcaaacaagataaggatgcgtacactgttcgatcccacttcgagggactcccataatgtaatgcttctgcggatccgaccaccttctgggtctccgacaattggctcgtggtgaaccgaggtgtagattgagagggaggtgctaacaataaccaattcgatcgggatggcgacagaccaacagacaaactgggcgatcgtaggcgagggggatgtgtctagcattgccatgagcagcactgcgtagacgaagaacgagccgacgacgtaaatctgtaataagtgtcaacggctgtcgagcagcaccaaaccatctgaatagaacgtaccacgaagggctgtcctcgccaccagttctccgacctggccgtcatcacatgtacgatatagatagttgcatccgcaaggaaggtcaaaagaatggccgcggagagcaagttgaaaactcgtttgacgttccgcgagaactcctgggatttgtaggcaggcacacttcgagttcgctgagggagtggtcgccctcccgggccaaagtattgagactcatgcttgctagctttcttcgcagcgatggtagtactagccacgaaggccacgacaaagaggataagaaggaaaattgggtaagaggtgcgcaagtattccagcagctcaagggctgcatgaggatccattgcccactaaatatcccggaaatgagtgttttaaacaaagtccatgacagactcctccctcgaaagaaaggtaagaaagggagattgccgggttcggatcggaaaggactggacgacgggtatggcgagagatcgacgcgaggaatgatggcggagaaacaacctcagcaggtttccacgtggaaagtttaggaaaaagaaacaagttgaattatgaagattccacagaagcaaacgtaagaaaagaaaggaaaaagatatacgaatgcttattcttcttttctcactaaatttcttattaaatttattttttttcctacttggcttttgcctccaggatttatttttacctagaaggaagggattggatgctttttaagccaacaagagcagtgctataactagaacaggaagaggcaaatatatggaaatattctccgtaaggcatgtatatatagacatgggtagaatggctgaatgacggtgtggattggatatgtatgtaggttgctgcagctaaaaaaataaaaatggggtcacgctgcaacttgccgttctctttaatatctatatcttctttctctgggttgtcctttagggttctgtctgtctctggtaatattggaaaatgtcctggtatgaattaaacaatctacagcccttcctgcccaatggttggtgttgaaattgtctcaaagtgaaaacagggggggtagagaaggatcgtcgatcgatcgagaacaatccgcgcagatgcccatgtgatgacttcactaagctgccaaggaacataaagcaacccgaatgtattattttgcctctcttggtgtcttttagtcacgtcgggtggccaaggggcgcagttcaatggccacggatcgtagtacccactgatttggtactcgtatatgatgtacgtaactagtttgtgaatatgtcatccctgaagatctatgaatagttatatatttccgatgtatgtgtctcgtgttccacttcctaactggttgaggcaaaacagaatgcttcccaggtcttatatacaactatatactatacagtattataggtcttttaatcttttaatctatagacatgttcccttgaagaaaataaattgtaagttcacattcgaatctgatccctctcatgtgttgtcttctagaccgcccttaacatatgttcaggcccgatggctttcaataggtaaggcttgaaaaatataatatacattgtgagaaaagtcacgtagtacaactaactgatgccctagcttcatgtgtaatgttataactatcgtccggtatgttgttaatggatagcagtaaggcatagatcggtgcctcagggatctctccctcaccgcttgcatttcgatgatcttcaactctccgcatctttttccctcgaattcggtgatcgcgttgccataatggagacctggctataaaccatgtcggacctctcaggttcgcaatctccgatccctcctcctccccctccgccacaaaagtactccaatcgcgccgccaatgcccttgcgagattcgcccaacctttcttctcgggctcaagaccacctagttcccaaagcagtcgcgcggatggtccccggtcgatcagatccaaatcactgtaagtgttgccgctctatcacaccgctctgacacccctgctcccgtgggttacttttccctcttttgcttttttttttacggatgtagtgaccaaccccaccattcggtcatcggagctagtgtgatcgggcaattgcatctgagccaatggaatcttcaagtttctaatatttgcttctgtaaagaccaggagaaccgcagactgtaacccacaagacaggcatcgcaatcacggctttggacatctcgcccgagcggacacatgcggttatcgcaggcaaggagattctcaaaactatccaggtctcgccagaccgctcgtcagaggaattcaatattcgcaatgccgtcattagctatgcatctacccaccacgacacgggtgtttcgatgccacacaaggatcaattgaatgtcaaggacgtaaaatggtcacatgggaaccatgaccggataatcgcaaccgcagtcgcgaatggtcggattgtcatttacgacctacatcggcccggcctgcaattgtgtcgtttccagggtcacaatcgccaagtgcataggcttgccttcaaccctcatcttccttcttggctgctgtccggtagtcaagatggcacaattcggatgtgggatctgcgatccgcctctgcaaatcgcggaagttcaacgtgcggcagcaaatatctgtatcagggcaacagcgatgccatccgagacgtccgatggtctcctaacgatggagtcatatttgcgactgcttcagatagcggcgcgatccagatgtgggattaccgaaaggccaatgctccactaatgaaaatcgctgctcatgatcgcccatgcttcgcagtcgactggcacccagatggaaagcacattgttagtggaggcacggatcgccaggtaaaggtctgggacttttctttatctgcagagcgacggcagaaaccggcattccaattccgaacgccacaggcggtcacaaatgtgcgatggagacctccctcttgggttggtgagtctgcttcaggacaatggcaatcttctcaagttgtcacgtcctacgacaaagaagacccacgcgttcacctctgggatctccgccgcccgcacattccattccgcgagttcgatcggtacgacacacccgcatcggatttgctctggcgctccaaggatcttttgtggacggttggcgaggccggggcgtttacccagaccgatgttcggtatgcgccaaccgtggccagtcgccgaccgatgtgctccgtagcctggagtcccactggcgaatttgttgcgttcagtcaacaacggcctaggcgacgtcctctaggagtcaaggccgctgaatttctacggctcgacgatgatgatgacagctctggcgagagatcactaagtcaaagccccgcagatgacatctttgatgaagccgttttggctacttcccttcgaaatcggcataacaaatcggcctcgattcgaccatccaattcctggggcagtactccgcccggcggagtagattacataccagtgctccctctagaacaagcactagccaaactcgccaccccaatgcctagccaggtcggaatcatcacaagtattccggatgtcacgaacgactcagccgtctttcggcatttggcaagccactatacgccgttgatggatgagcacagcgaacataaaacgcagaccgacgtcctgaactctttgattgagtcactggaccataacgcagaatgtgcagatgaggtgtccctggccagattggctcagacttggagaattattaaatacgccattcttgaagagctccaacgtagagctagagattatcccaaaggtggtctgaaagataggccatccaaggatgggggcttgatagaaaggtcacgacccgatgatggtcggcaggacagagtgaaaagtcggttgttcaaagccgtcatggagacggtccccgaggccgagagctcgtcaaatatgaccacaccccttgtgcgcccattgccagattccccgaaagactcgtggtcgagcactgattcccaaatgccctcgatgagcgatgcagtgatggaccttgaccctctcccgccatccgtcttgagtgatcataatagttgggcaatgtcagaccgtatacttggacgacaatcatcaaccgatgacgctcattcttctcaatatcgatgggatcctacacaagaagatttggacatagagcaacggtctgcgcctcgggcaattgccggcaaggcagattggcgccgtcgtccagacttctcccgcgaaaattccgaagatgactatgacctgaagctggaaaacaaacgtgcagcgattcgtgactacaagcaattccccaaaaaaccgttgaccctcgaatcaccattggaatttaatcggcctcctcgtcctgaccgttttagtcgacatgattcctcggagagttttcccatgttctctacatccaccgacagttcgcacccatccaagtctattggtgcatcgtactcgtctagtattgaggcatctaaatccctggatcctgggcaatcttccgcagcgctgagaagagggtcgatgctagcttccacacgcgaggaatctgaggatgagctcttcgaccagctcatctcagagactgaccgaattcatttggatcgcccatcaagcccactccctttgatcacagaatcaacgccccttgaaagacagcaacctttcccacgagacgataccctcaaccccggcaccacgccttattcaacagtgggcggtatctcgcgtgtcccaattccactcacgccagacggaacagacctgaaaccgtggggtattgaagcaattatgaaagaatcagttcgatattaccacagcagcagtagcttagttgatatccaaaccgcggcccatctcctccagaagatgcacgttctttttcgggactgcgaacaaattctcccatatgaagaatgcgaaatggtcttcaaaacttacaatgagcatctaattcggcactcgatggacctcgaggcagcagagctccgcttattttgtgtgccaacatatcctgccgtctacgaatacacccaggcagattcattcatcaacgtctactgctacacgtgtcagcgaccctttgaaaaccccacccaagataacagccgctgctatcgctgcaacacacctcaagcaccatgctctatttgtatgagccttgatccacccccagaatgggtttcagagcagcaaactccgccaatcgcttcatctaccctcacgagtcccgacctagacttcgaaaccacttcgaaccattcgtcacaatcctcagttgccactgaacccgtcccagcatcggaaatcgatattatggagcctttcaccgtaccgcgacccaaagggtccgccctttggacctggtgccaaggctgcggccacggcggccatgtagcttgcatcacaacctggctcgttgacatttcaaccagcgaaggtggctgtgccacagccggctgctcgcatgactgcgggcctggcccacgtcgcgaactgaaccgccaagacatgcaggcggaatccaagcgtcgcgactcggctagtcgctccgccggtgtcgggctcgtcaagcgtgatccctggagtaagggtgaaagtaaggccgtcgaaaaagtgcgcggcatgctgggtattgccggcattgctgctgccaccgggggcagtggtgctggcccgaacacttcgacgaacaatacttctccggcgccgggcgaaaccggcgccatgtcgcctaaaagggtgcgtcttgttaccccgattgagcaagataagggaagtgttgccccggatcgcatggatcctccttcaagggactgagcttgagtcttgcgtaacactctgtgtaccattagcgcggttttttttttcactttacgtcttcacttcttttttgtcttcttcttctatttgattccccaatcgcgatacttcaatgaaacaatacacggattcaagtacacgcgtatggcatacagtgtacagccctgaaatgcatttattcctagcacataatagataatgtgtcgtatgtactcatagcaaccttcgccggattgcttgaaaaggacttcaacacattcttcaaacataatatccccactctccttcgtctagaacctccgcttcttctttgcaggagcttttgccttggcctcgagcgacctcttcagttcctcgcgcttccggtcagcgcgttggtcttcagtctccggttctgcaggtggagctggagggatcttctcttttgctgatgtgggcaatggagactcctcctttttaagagcttgtcggtcagccttcggtttagcaggtgtagctttctcgggtgacatgaccaccgtgtcagatgtaggtagcggcgacttatttcgagcttcctcggcagctttggctttggctttgccgcctatcatgccaagtttcccgggacgtttagcttttgtcgttgctggtaccggtatcgacgatatcggaagagaaggatctctgctaatcctttcttcctgttctggtgactctgggggtccttgggattttggcgagtcgcgggcttgtgctggaggggaaggggctggtgaaagcgagggctctttcgcttgctttttcttgccgcctatcatgcctaatccgccctttggctttttcggtgtctctcgaacttgcgctggaggagaaggtgctggagagggagatggtgaggcccggcgctctggttctttcttgttcttgccgccaattttacccaacccaccttttggtactttcggtatctcctgaactcgcgctggagaagggactggagacggagatggcgagggcttgcgctctgtttctttcttgttcttaccaccaattttacccaatccaccctttgttactttctgcgcctctcgagcctttagctctggtgcggcgggccctcgcgaccttgaaacgctgggaatgtgtctttgacgaggtgctggctcagactcggattcggagtctgatgctgtggcttcgtcttcctctgaaggcaatactgacgggacaggacttttctctctgggcttttgcttgggtggtaatgcttcgcctttgccatgttgggatttgagtctaggaggagtttcttgtcgctagatgaacggagttaagctatacatgttattgtgattagggataactcgtagcatacctgaaactcatcgtcatcgctactcgctgttgagtctgctcctgtgtcgatgttcttgatttcaactggctttgttctatcttggtcgttggaaatttcctcttcgatgggagaggcctctctggcgctagtttcagggggtctcgcaagttgctgccaccattcgccttgtgactgagtgaaagtatctaaagcacgagaatcaccggattctgagatctcatggagtaaattggtagctagtcccgcccgatgtgataatcctctctcagcgagccaagtctcctcctcaaacggcgcgatacctttcacagatttagcagcatcagaacgcgtaatagccttgcgagacatgcgcgaccctgcagcgctaggaaacactgaccctagatccacgccaagtgtttccattttgtcaaataacttgccaagtacgtagtctttctgtttgatttggttcaagagcaaacgttggcgggactcccactccgcctcctctctcaacagcggaagtaatagagtattggtcaaggacgacaggggttcctttaataacttcaaagaccacttgagaggtttcaatggggagggcagcttggttgttgtcatgatttcaagggagttggtttgtgttccactgcttaagattgcgctttcattgccattttgcaaagcttctccaattgtttccaggagcacatcgagttgttcttggtcctctccaggatcgatcgttgtgacatcttcctccgctctcttggtgatagctttacggggtagccgctctgaccagatataggtgaggtctgttatgtggatctcatagccttgtcgggtccaggtgtactggaagagcaaaggaggtattccctgctgggacaagtgaagacgctgccatctggaaggcatggttgcatgtttggatgagttgttgatttaccaatgcggagttgtgaagttccaaagttgtctcatatagctgcctaggccataagggaaggtttgccgcccgctcgactttcccgctgatctcccgaactgctaacttcgtttccaacatccaaattacatgttcgggtcgcttacgcttggatcctcaatcctccttatatccttacagttcctacgatgtctgcgcgattcccaaaccgatccgactcaaagcgcagcaggtcgcgatccccgtcctcgtggggtcagccccagaaatatccccgtcgggacgacggagaatggcgcaaccaacaagactcggatcgcagatggaacaatgagagatcaggcccttcgcaacagcctcgcaacatgcgcgatcaagtaaggctcaacttgatccaggaagaccagcaagagcgtgaatgggtcgcgcaggaggatgtgttcgtgctcaagcaggccaaaaagaaagcagagattcgagtcaaggaaggacgcgcgaagcctattgactggctgacggtcaccctccgcattatcgatcctacgcgtgatcccttggatgacgagatagcagactccgatctggatgtcgtggacccggacggtgtgtttgagggactatcgcagacccaactacaggacttggagaaggatattgatacatttgttaaccttgagacaaacgcaaagaatcgtgaattctggcaggtaatttttatactttctgctatcgactgggccgtcctgctaaccaccgtcccccacagactatgaaagtcatctgtcgagatcgtcaaaagaccattacacccgagagtcgcgcattgaattcagtggctgctgacattaacaaactactgagcccaaagtcctacgagcaactccaaaacctcgaagtgcaagtgaaacgaaagttgaactcgaacgagccgatcgatacagattactgggaagagctgctacgcagtctggctgtgtggaaggctagggctagtctgaaaaatgtttatcaagctattattgatgagcgtgttcgcgacctgaggagacagcaaagacaggaagccgaatcaattcgggaaaaactagcacctcttgctccggttgtcacggcggatgatacaacaaatcctgatgagttcgagggcttggatccagatccaatgctccagattcgcccggaggacaaaggcttggaaaccatggacgagtccgtatttcttaaccaagtggtaggtttggggcttcagctcatgcatcccaatccacattctaattaaccgcacaggcccgcgaacgccagaaaattattcgtatgggtttcgtcccactacggcaccgagctgcagagaagtcctccgcgatagtgtcgaatccgacatctaccaatgcccccacgacctctgtatccacgcggttctcgtccatcccgaatgaggacttctcgcaagcgaccagagcgctatatgaaagggagctcgccaagggtgttagtgagaatgaggaaatatttacgggcgaagaggccgtgagcacaagctcacaatctcaatgggccggtaagcatcgcccccgaaagccgcggtacttcaaccgagtccaaatgggttacgaatggaacaaatacaatcaaactcattacgaccatgacaacccgccacccaaggttgtacaaggttacaaattcaacatattctaccccgacttgattgacaagaccaaagccccgacttaccggattgagcgtgagaacgggcgcaagcgtggcgagtcatcggccgaagcgggcgaggaagacagctgtcttattcgattcatggctggacctccgtacgaagaccttgcttttcgaattgtcgacaaagaatgggattatagtgccaaacgagagaggggtttcaagagtacatttgacaaggtatgctgtgttaccaaatgatcccccctgttcctcaactgacgtaatcctttcctttcagggaatccttcaacttcacttccagttcaaaagggtaagtcgattttttctctcttacggccattacgaagataatactaacagcttgtctcagatctattaccggaagtaatacatgcacgaccaacgatttccacatgggcgtcatatcgaaatggagagagtgggttatggtgtatgcagggagatattcggggggtgtattttccagtaacttgatacccagtgaatcaaattaaacctggattgattggactggaaacatttccccgccaacgttctcgcagaataagccggactttatatcggatatcagatgcttgatccaactgcttcctaaatttgatgaccctatcacctttcctttccacctctatgatcgtctttcagggggaagccaaaacattcctcgctcgccttgatcccgactgacgtattggcaccatatgtctattttctcttttatttttctgctaccggggtatttgcaacacgggggacgttggggatgtcctctgggtgacactatcccggcctgcaggagcaggatgtattcctcacttccggctggctagatgcaggctatgaaaaaaagaacaatttgatacaaaagtagaataccgcaccggtttgcagtcaacttctagaaggcccgggatgacgccggtgtaggtgaatgccctgcaggctcccatccgcctatttgaccctttgactatccccttctagctctaggaggcatattccattcgcactagtcgcatgtagcatgtaacatgtagtaccagatccagccactttaacttcctactcattggccattgtctgtactatgaatctccgttgcacgacttgggcatctaaggtctttttcagaatacagagtagagctcctataatacaagaaaaaataattccattagatccagatcgtctttttcttggagttaaatgcatctatgaggttatttgcagagaaaagaaagaataagatgtgttggtatgggatctttgaattatacagctccaaatcatctgaagttgaacacacacacatcctttgaggctgcactcttatttgttttcctccccttcccattcttattttcattccctcctcttcctcttcctcttcctctgtctccaagatttacgtttgccttctcatatcatctcccacacttccatgcttctcttgcatttcccttgctactcttctgtcatccaacccatcaagtcactctcgcaactggactttgtcttgcccaaacatggatttcacattccattcggatcacttcgacagagtgcagctttcagaccaagaagactccaaacctgatctcccgtcgcaagcacaagcgctatctcagggtactggcaatgccacgatgaatcaattcagcgtccctgactgggcgagatggagatcacagccagctcccatccctcctcgatattatcaaggttcgagctattcccgtgttgctgatggcgagccatacggcttaggcccgttgtctcaagacctcatcggggatccaaatggatatctcaattcataccgctcgcatgctacccccaccttgactggtacaccgtcggggttattcttccctcaggctggagagagccactcagattggccacgcctgcgacctcctcatgtcttcagagaccagccatacaactaccctcagttggaagctcaaccctttcaagactccccactgtcgccgtattccgatgcctcctatcattccccgcagtcgctcgctgcttcgagtccggcaatgacagctcagacagcagaccgtctctcaccacgttcaagctctggtgacaatagagaagagcgtcctggccaccctccgtattctgttctcatctaccaggccttgaaggatgccccgggaaacaagcttccactccaaagcatttactcttggtttgaagcgaacacggacaagggtggagaccccaacgcgaagggatggcagaacagtattcgccataatctctcgatgaacgcggtaagtctcattcttcataactcttactttcacttccctctttctttcacttccttgttgcaatatgtttgattgggcgtctgctatattcgatatcaatactaaccttaactctagggatttgaagccgtgaaggaagaagttggacctggtaagaaagccgtgaacttctggagactgacgccggaagcgatcaacagcggtggcatccaatcgactacccgataccgcaagctccaacaccaaaagaaaggtgtgagctcaagccaacgtgggcccgcacgtcagccatcggagtcgaagggagtccacaccacgaaggtggtcaagtcacgcaacaaagccagcgcccatggcgagcgcgctgaggcacatcctcaggaaatgaccagcacaaatcctagtctggggagtgaatatggtcccacgagccttccagcgatgcaaagatacatgcatcaccctatgggtcctgttgtcggatgcacccccatgacacctggcaacgatgcgctttttgttgataccgaggaggcagggccggcatttgacgcggggcataactatgactggtagctccagagtcgggcttccacgctcgaaggtcccggtcgaccatcggcgtgagaattgaatggaaaatggaaaaacaaaaaataaaaacaaaaaaaaggaggggaggggagcggaggtgtggtgggagggatggaacaagattcagcgaggagaacccgatggttatgttgggttccctttcgggtttggttgtttttgcgcttttttacttgggaatttcgtacactaggggcatggcgttatttgaggcgttgtttgaattcagaatgtgtttggcgggcgttccacagagcgagcatcatggcgaaggagatcgatctactgtttttcactttttcctcatgactacttttcttcttctgcttcttttctgtgcctcagtcattctggcatgagcaacgcatattttctcttcaagtgtaccataagttagtagtggtgtttgtgagttgaattcgtgggatctaccacgaaggcagagatggtatcgaccatcatttttctgtcatgttcatcaatggatcttctatgagacgctttggttgaagcatgcatatatctgtatttcctcgcttgtctcgagtcccacatgtctttagtttattacaaatgtgtgtcattggtatttttaggcatggacaatgccaaaaaaatagaaattagtatacctctactacccagtccctgggtttccgtacagtaaatattgaatcccccgggccaatatattggagttgttcttgtccgtagcggactacatgctgtactgctgacaatgcttcatatgcttgcacggtggtgtctcaagtgacaggaatagcgtcccaccatagataaatgagaacctgtgaataacactttgtttcttatatggtatattttcccgcccctctttgctagtctcctttagtctctattgacacttgggctctgtgcttaattagccacgctgagcaatcccaccaataccccgctataccactctgctggcttgggtagtaggtcagggtgctggggtgatgcagacatccttggcagcatcggctgcatcggttgctgcatgttgccttgctcatgatcatctttcctccctgtcattccccaatttccccaagaggacggagtccgacaccctcgtttttagctcatattttgtggggctaaagcttcttttttttttaccagagtgtgttcccaagtagatcaaccctaaggagatctcaggcaagatataggagctcaattgtagatatgtcatgtgttatagttagggcatattaacatactacttgcattatcattcccttctcaagtcactatcctccgcaaggacacttatctacaggtttcgtagcgcagtcgtagctcaggcacagccccattgttcaatctagatccgagaagaccacgttatatgtatcaaatcaagcccaacccgggttcatcctaaatcgattttgatctatcgaattatgtcggaaaggaacaggagaaaagttatatactctgcagatctcttaatttttaatatgtatggcatcaattgatacgggtacggaaatgtcacttgcgtatgtacttaatagccgacgggttgcccagcctgctggaatccgggatttgcagacatattccggtccgcatcaggtttaccatatagtttatgttgatagcctttgatagagcggttgtatttgaatatataatatgatgtaaccatttgtcttgtattctgacttgctattcttctgacagaacacgcacgaacctcgcccgttgggcgtttgcgggatggaacagcccagttcaatagctgtcaatcctgcaaacgctcgagcttcctttgataagcgccaaccctcggagtggctaattttacggagcaatgcgacacagaacaatcgcctgaccgcttcttgggccgatcccaattgtctgttgtcatccgtaaccctagcatcatagagtgaagattcttcagttctttgctttttcatagtaaagtaaaagagacattcggatcctggccggctactcattctattggctgcttcagaccaccgggaattgatcgaatcacagctgtcatgcactttacatatgcgttacgtacttggtagaacaatggaagtatagggatcgattccattggtacacctttagcgacttctttcactatatattgagctagacttggtggcatagagatactatatctcctttcgggggatatctattatatcgtcacacgctagcttatgatgtatgttgatggataaaatatgaaggaaaataccagatgaacctccagattccacgagagaaatccgtagttttgtcccggtcttgccaatcgtgcttccgtccaggctcttttcaacgatggaagcatccaagttctcgtttgtacagcaacactggcctgtggtatcaacctccccgcccataccacgacaatggagatctatcgcattctgtttcatcgtaatcctcaacagatggtgacaatttggcatccgcattttgtacctgatggatgtccaccaatcagatctcaaaaataaatccaggcgttcaagtaacacccacgctcggaccgagctcactgggtcttgctctagctgccacgaaggcatcatactatattttacttccgtttgaaccttaagttaagtaaccgtcctttttatgtagtacatgtacttgtaacgataaagctggcgataaactcggtgtatcttcaaccaatctcatatgcagcctcgaggaggtcaaggcacaaagaacctgcaagatgaagctcctgcctgaaagagtagttcaagatatcggtaatcaaggataattatgccactatatatgattttttcttcgattgattaagtgcaggaaaaccaaattgcttttcattgtatttcccgatatattcaggactagccaacatgacgttgcggataacacctcaaactagattagatgctctgtagtgaaggcctgagagcctggctggttttatttaaccctaaacctaacgcatgcctggtcgaggtctcaatttgctaaagagtcaaactccgcggacaaaaaaagacccccacaattgttgggacaacattttataatcgtctatactgtagtagtgggtagtagtaaggagacccttttatctttccgagattacgaggtgagttgcttagcgaagaatgccactgcttttcataacaagcatcgaatttgagtgaagccttgttgtcattggaagatcggtatgatagaaggaggtgcacgttcatgtccaatgaaggtgctttcgaactgggaatcctgttttaggtggttgcgagaacttttcggattccgtgattccgtgtctttagcacccaaaataggagcctctgagttgatttgagaaaaaagggaaaaagttggtatagacagcaaggatgttgcatgctcttctcttcatgctgcaaaaagggttgtggttttaaaagacagcctagaccaatacctcaagtttctactatatataaccacgatatatattcctacattattgatgcaacaggggctgtgatagccttcaatattagacaccatatagactcacagctgtgtcttgttcaattacatgaccacctactatgctgagtgagttgacctcttgggttcacaccataaaagcaaggcttaaagtaattgaccagaccatgtggggtcctaatccgaagaatgtatatgcaatggagggtactaatgcaactataaatgagatcaacaccgagatatacttcagccctggagaataggcaaattacacccggctacggtggccaacataaaggaaactattgttctaaccattcacgactacattatatccaagcctgagtgcctatgcctggtgcagatcaacagatgctgctggcctgaaagataatgcgcaaccttactcaaacgcgtcatcaagcttgacaccgaacaagcacgaaatgtacgaggcttccatgcgagaggcagattcaagacaccatggagataattttagacaacttgattcgacatgtcaggggatctctcatgaaggcaaatgaaattaattcatttgcttagccacgagccttttttttggactcgcatgctagctgttcctgttcatctttaatattttaagagaaccattcccagccgtttttcccataacgttcgctccaccgtaaaaggacaacaccgacaaaaagcacgcttagcgcttggcggccttctgctgggactccttgaggaccttcttgacgatcttctgctcctcaatcaggaaggcacgcacaatgcggtccttgacacagccagcgcagcgagagccaccgtaggcacggctgacattcttcttggggcgcgagatctgagagtactcgcggggacggagggcagggatctgtaagtaaaaaaaaaaattgtcagtcgatctgactccgaaattcagcgagacggttgtatggaaattgtagcgtttcggtcggccattcgttcgcatatccgtccatccagacagagttttttttttcaagtcgttcggttggcccacacgcgatcgcacatatcccacacaaccgttcaaaaatgcatcagggacgccgggggagtactcacaccggggagcttgatgccgcagtcaccgcacttgggagcagtacccttcttcttcaggtgaaggtaacggagctcgccgccgggggtcttgatgatgcgaaccttgttggaccgcgtgttgtacctattgaaagcaagaaaatccgtcaataacttgttcgaaaaggtgatagccatcccgatatgagaatcatcgtatagatcatggtggtgcgagggagtggccttggaaggaattttgaaacgtacgggttccggcggcgctgaaaatcgagttagatcaataattttccaatcggtattttctcatagaactcacgtattgcaatctgttgttggtcatcttgactgtacttgaactggtcaagggcggcagttgtcggagttgtcgtgaagcagaatgaaatatgtcgagatgggtttgtgtgggtttctgcttcaaccgacgctagcgcagatttggcgaggctgcgctagtcccgatgcggaatagtgccagtcggagccgccacttctcaaagttcgacggagaacaggagcagagatagtcacatcgcgtaggggatctggatctctatctttgtcgcgttttcatcttaatcttccatcccgccatcacctagctctttttctttcagttgtattcttcttttttactagctgaaaagtcttgctacacatgacctccaacttggcttgacgcgacttggaaccaacacaacctctacgagggagggttccatccatcaatcacgatcatggcctcattgcctccccctcctccacctccgggatggagtgcagctcctcctatgccgatggcgccgccgcccccgggctaccaaccaccagccgacccgaatgtcgcaaaatttgcgcagaagaaaaatgaatggctgcgcacgcaacgcaatcggttcggcgagaagcgcaaagcaggatttgtcgaaacacaaaaggctgatatgccaccggagcatctgcgaaagattgtacgagatattggcgatgtttctcagaagaaattcacaaacgagaagcggagttacctcggtgcgctcaagttcatgccacatgccgtcctcaagctgttggaaaatatgcccatgccttgggagtcagcaagagaagttaaggtgctttatcacgtcaacggatgcctgactctagtaaatgagacgccgcgtgtcatcgagcccgttttccacgcccaatgggcaacgatgtggatgtgcatgcgtcgggagaagagtgaccggagacacttcaagcggatgcgtttccccccatttgacgacgaggaaccacctctttcgtggtccgaaaatattgaagatgttgaaccgttggagcccattcagatggaactggatgaggtcgaagatgcggcagtttatgaatggttctacgaccaccgtcccctgcttgataccccccacgtgaatggaccgagttacaagaagtggaatttgtctcttccccagatggcgactctccatcggctcagtcatcagattctgagtgatgttgttgaccagaactactaccacatgttcgacttgaacagcttcttcacagctaaggccctcaacgtggccattcctggtggaccccgcttcgaacctttgtataaggatatcgatcctaatgacgaagatttcagcgagttcaacgccattgaccgtatcatcttccgtgccccgattcgaaccgagtaccgggtcaccttcccctttctctacaacaccctgcctcgaagcgtcaaggtcgcttggtactcccatccccaagtggtctacgttcgcaccgaggatccaaacctgccggctttctatttcgatcccgtcatcaacccgatctcctcccgctcggtcgcacctaaaaatatcaccgtcagccacgaagacgaaatatttgggcctggcaataatgaagacgacgaatttgagcttccgggtgacgttgagcccttctttaacgacgaagaactctacacatccgaaaccgcgtccgccatcgccctgtggtgggcccctcacccattcgataagagatctggcaagatggttcgtgcacaggatgtgccgttggtcaagcaatggtacttggagcactgtccacagggtcagccagtcaaagtccgagtctcgtaccagaagatgctgaagacctacgttctcaacgaattgcacaagggcacccccaaggcccagagtaagcagaatctcatgaagactctcaaaacgactaagttcttccagcaaacatcgatcgattgggttgaggccggtttgcaagtttgtcgccagggtttcaacatgctgaacctgctgattcaccgcaagaatttgacatatctccaccttgattacaacttcaatctaaagcctgtcaagacattgacaactaaggagcgtaagaagtctcgcttcggaaatgctttccacttgatgcgtgaaattctccggttgactaagctcatcgtcgatgcccaagtccaatatcgtctgggtaacatagacgccttccagctcgcagatggtattctttatgccttcaaccacgtgggccagcttaccggtatgtatcggtacaagtataagcttatgcaccagattcgttcctgcaaggatctgaagcatttgatttactaccgattcaactccggccccgttggtaagggccctggatgtggtttctgggcgcccgcttggcgagtctggcttttcttcatgcgtggcatcattcccctgcttgagcgctggcttggaaatctgctttcccgtcagtttgagggtcgtcacagcaagggtgttgccaagacagttaccaagcagcgtgtggaatctcatttcgatctcgagttgcgtgcctcggtcatggccgatcttatggacatgatgcctgagggtattaagcaaaacaaggtcaacgtggttttgcaacatctatcagaggcctggagatgttggaagagtaacattccttggaaggttcccggcttgcccgcaccaattgagaacatcattcttcgttacgtcaaaagcaaggccgactggtggatctctgtcgctcattacaaccgagagagaattcgccgcggtgccacagttgacaagactgtagcaaagaagaaccttggtcgactcacgcgtctctggctcaagtctgagcaagaacgtcagcacaactatttgaaggacggcccttacgtttcctctgaagaggcggttgcaatctacactaccatggttcattggttggagtctcgcaagttctccccaattcccttccccagtgtttcctataagcacgacaccaaaattctgattcttgcactcgagcggctgcgcgagtcgtactctgttaaaggaagactgaatcaaacccagcgagaggaattggctcttatcgaacaggcctatgattcccctggcacaaccttggcgagaattaagcgattccttctgacacagagagcgttcaaggaggtcaagattgacatgaacgataactacaacaacatcaatcctgtctacgatattgagcccatcgaaaagatcaccgacgcttatctggatcaatacctttggtaccaagcggagcagcgccatctcttccccgcttggatcaaaccttccgactctgaggttccccctttactcacatataagtggacacaaggcatcaacaatttgtccaatgtctgggagactgccgaaggcgagacgaacgtgatgatcgagactgagctgtctaaggtctatgagaagatcgatatcactctgctgaaccggctgctccgtttgatcatggatcacaatctggctgactacattacctcaaagaacaatgttcaactcagctacaaggatatgaatcacaccaatagctatggactgattcgcggtctacaattctcgggcttcgtgttccagtactacggcttgatgatcgacctgttgctccttggcttgcagcgagccagtgaaatggccggccctcccggaagtcccaacgatttcttgcaatttagagatcgtgccactgagacaaggcaccccatccgcctgtatacccgttacgttgataagatctgggtattcttccgattccaggctgacgactcccgtgacctgatccagcggttcttgaccgagaatcctgatcctaactttgagaacgtcatcggctacaagaataaaaagtgctggcctcgcgattgtcgcatgcgcttgatgcgtcacgatgtcaaccttggtcgtgctgttttctgggacatgaagaaccgcctcccaagatccatcaccaccattgactgggatgatacattcgctagcgtgtacagtaaagacaaccctaacttgctgttctcgatgaatggattcgaagtccgtattctccccaagatgcggaatatgaacgaggagttctcagtcaaggacagtgtctggtccctggttgataactctaccaaggaacggacggcacatgccttcctccaggtcaccgaagaggatgtccaaaagttcaataaccgtatccgacaaattctgatgtcctctggttcgaccacattcaccaagattgccaacaagtggaacactgctctaattgctcttttcacttactatcgcgaggctgctgtctcgactgtcaaccttctcgatactatcgtgaagtgtgaaacgaagattcagactcgagtcaagattggtctgaactctaagatgccgtctcgtttccccccggcggtcttctacacccctaaggagcttggaggtcttggtatgatctcaggatcccatatcctcatcccaaccagtgataagcgctggtctaagcagactgacactggtattactcacttccgagcgggtatgtctcatgacgaggaaacattgattccgaatatcttccgatacatcattccctgggaggccgagtttattgactctcagcgtgtttggatggaatactcgcagaagcgtatggaagcccagcagcagaaccgccgtctcacgttggaagatttagaggacagctgggatcgtggtcttccccgtattaacacgctcttccagaaggatcgaagcactctcagcttcgacaagggattccgactccgcgctgagttcaagcaataccagctgatgaagagcaatccgttctggtggactagccagcgacacgacggtaagctctggaacctcaatgcctaccgcactgatgttatccaagcattgggtggtgtcgaaacaattctcgagcacaccttgttcaaggcgacagctttcccatcctgggaaggtctgttctgggaaaaagcgtgtcttgccaagggaactcgtctcttgcgatacgacgggaccgagatcaatgtcgaggacgtgcgcgaaggtgaccaacttctgggccccgacagagagcctcgccgtgcattcaacatagtgaatggcatcgaccgcctgtaccgcgtcaaaatcggcggtgagaaagaagatctcgtggtgacgccgaatcatattctagtgctccatcgggagggagcctccaatggtcccaaaaagcaaaccgtggagatcactgctgccgagttcgctgcccttcctactgaggaaagaaatatgtacagtgcctttacatctcctagggttgagcagagcgccgaatcttcatctcctcaaattcacagtttcaagatcgagcacattagcctcgaatctgagaagacagagtgggctggtttccgagtcgacaaagatcagctttacctgcgccatgactaccttgttctgcacaacagtggtttcgaagaaagtatgaaattcaagaagctcaccaacgctcagcggtccggtttgaaccagattcccaaccgtcgattcactctctggtggtcgccgactatcaaccgcgccaacgtctacgtcggtttccaggtgcaacttgatttgactggtatcttcttacacggcaaaattcccaccctgaaaatttcgttgattcagattttccgtgcccatctgtggcagaagattcacgaatcggtggtcatggatttgtgtcaagtcctggatcaggaattggaacagcttggcatcgaggccgttcaaaaagagactattcacccacgtaaatcttacaagatgaacagctcttgtgcggatatcttgctcttcgcgaccaacaagtggaatgtcacccgaccttcgcttgtgttcgataccaaggacgtctacgagccgaccacgacaaacaagttctggatcgacgtgcagctcagatatggtgactacgattctcacgacattgaacgttacgtccgtgctaagtacctcgattacaccacggacagcatgagtatctatccttccgccactggattaatgattggtgttgatcttgcatacaacctcttctcggcttacgggcagtacttcccaggcctgaagactctggttcagcaagctatggctaaaatcatgaaagctaacccagctttgtatgtcttgcgtgagcgtatccgcaagggtctccagctgtatgcctcggagagcagtcaggagttcctcaattctcagaactactccgagctcttcagtccgcagattcagctctttatcgacgacactaacgtctatcgcgtcacgatccataagacatttgagggtaacttgacgacaaagcccattaacggtgcaatcttcattttcaaccctcgaactggacaattgttcctgaagattatccacaccagtgtctgggcaggccaaaagcgtctgggtcaattggccaagtggaagacagccgaagaagttgcagctctcattcggtctctccccgttgaagagcaaccgaagcagctcattgtcacccgcaagggtcttcttgaccctctcgaggtccatctgctcgatttccccaacatctctattcgtgcctctgagctccagctgcccttccaggccgccatgaaggttgagaaactagccgatatgattctccgtgccactgaacctcagatggtactcttcaacttgtatgatgagtggctcaagtctatctccccgtacactgccttttctcgactcattctcattcttcgggctcttcacgtcaatatcgacaaagccaagatcattcttcggcccgataagaccgttatcactcaagaacatcacatctggccatccctgtctgatgaggactggatcaaggtcgaagtgcaattgcgtgatctgatcttgaatgactatggcaagaagaacaatgtcaacgtgcagagcttgaccagtagcgaagttcgtgatattatcctgggtatggagattagtgcgccttctctgcagcgacagcaggcagcggagatcgagaagcagcaagaagagcagaagcagctcactgctgtgactaccaagacccagaacgctcgtggtgaggacattatcgtcaccactacatctcagtacgaacagcaatcatttgcatctaagacagagtggcgtactcgtgcaattgcgacctccaatctccggacgaggtccaacaacatctatgtctcctctgatgacatccgggacgatggctacacctacatcatgcccaagaacgtcctcaagcgattcatcaccatcgctgatctccgagtgcaggtcacgggctacatctacggtagctcccccccagacaatgaccaggtcaaggaggtccgcaccattgtcatgattccacaagtgggtaacacccgagacgtccagctgccacaccagttgccgcagcacgactatctccaaaatctagagccgctcggtattatccatacggtttctggcaatgagccgccgtacatgtctgcggcagatgtcacacatcacgcacgtctcatgaacgcccatccttcgtgggataagaggaccgtgaccatgactgtttcttttactcctggatccgtttcacttgccgcctggggtctcactccggcgggctacaagtggggcgcagagaacaaggacacaacctcggatcagccacaaggcttctccaccaacatgggtgagaagtgtcagctgcttctcagtgacaagatccgcggctatttccttgtgcccgaggataacgtctggaactatagctttatgggcagctcttttggtagcgtggagaagagacctatctacgtcaagattgatacccctcttaagttctacgatgaccaacaccgtcccctgcacttccagaacttcgccgagctcgaggacatctgggttgaccgggctgacaactttgcgtaaacatgcgcagctgatcaggtgcaaaatccttttttctttttctaagcgtcgtcttttttcccctttggttccatttctttttgttcatttgtgttcttgtatcacgacaaccataattcatgtattgcagcgaaaacctaggaaaaaggccagtggatttttttgtacagtacgagttttcttttgcgaatacattttctgttcacttcaacctttatttctttttattccctagtaagtccctcctcctcccctgtaagtatacgaggatgcagttggcttcggaatgcggcactagcttacatcgccactttccctatgaagattgccgcgacgtatgtgatggcctaagcaggcgcccaatagaactatgtagtctgtacaattattgaaatcaatgtgcctaaaccctccgctttgatacatcggacctttctgttgacagatgacagcatgcagctagcacaattcggcagtccttccgaatcacatctccggatctaccagacaaatccaacggggaaagaagggcgcgaaagagagtgtatcagagtctggctgaaaagtcgatgtgaccaatttaacgatcatctcctccaataatctcttttgctgattgtgatattgtctttcttccctttccaacgttatagaactctgctgtcaagtccaaacgccaatattgttttcgggtatctgtttcatccccctgtcctctttgttctgttctattggacatctgtgattgactcccgcaggcctcagctccgaagaaacccggtgcaatagaatagcttgccatcgcttactcgactagcctataccgtatcaatcggccgatgtgatttgtccgcatcttttccaggacggcgtagctacgtggaatatcgatccgacgaataagctgatgtctgatttgctatgtccccgagcgaagtctgacaggcttcacctgtctgccgtgtctttttcttttgtcacggctcttgactcttgaccctagactaccctggtcccatattttgcgttgggttttgatccccattaataggcgctttgccaacaatagttttggggaggttctaccgcgtcgaaggttttttttgaacccctcctcttgatgttgggcgtctgtgcgaaacccaagagagagaaacactaccccatggccggaaagatgggatacaactgcgtatcccgagagaacttgactatggtgatttagagtcctcttgcagtccagtccactggagactgatggaatcagcccggcagcgcacgctccaacttggtcaccggcacacggttggatttcccccagaggactctccaggatgttgttatagataggtccttctcttcgtttttcgttcgctcttaatctaagaaaaaaatatttgttgttttacctaactatacattgtttatgaccgattcttctgcaaaacctgcctacaatttgacccaaagtaatcctatccatcctcttctgcatgtcaacgcgttgaggcctttctcgtctttgttgtggttatatacaggcaagtttctcttggcatcgtcctcctatgcaacagcagaggcttttcttttctttgcctttctagtcgaaagagagactcgggaataaaaacgccctgggatcgttcatctcccaactgctactcaaggcatttgctggggctgcaggtcctggtgttgtttttatgtctacagcaccagcggacccttaccgaggcttcatggttaactacactcctcatgacagtggcaaagatgcgaacggggaggatatcgtttcttacggcgcggcgcagttgctccaagataggcccgatggcattcgctaccactctgatacaacccagacgccctttgggtctccgtcgacttttatcacgaaccactcgcccgcacgccagccggtttcacattacaacacacatgggtatagactctccccaattcagggtagcagaaaacgacaacgtaccgacaatgagcccgaggcaagagaagacagtgatcaaaattatggttaccgacctgtcttgcaaaatctacccatgggtgatccatcggctcctgcaggtgaatcggccgacctgacgtacgctggtcatgccgttccttcatcttcccgccagacatcgaaccaggactacctccagtcctctttcccgcaacagcatcatcaccataggctaccaccccaagcatcggtggctacagcctctgctggccagggctctgaacagccgccactcgaccgcagcttcatgaaccttccaggtttgccggcaccataccctgagccaaaagcgccaaagaccagattcggtcacagggaagatgagatgttgatagccctgaaggagcactggaagttttcctggaggcagattgaatgcttctttccagggcgaaaacagcaaacattgcaagtccgttactgtaccaaattgaaggaaagggctgtggtttgggatgatgctttggtatgtttgcgccccacccaactaaaagaccggaattgcgctaagtcctaggacaggatcggaaactgaaaaaggcgctggaggactatgaggacaacaaatgggcactcatttcccggaagcttggacctggtataccaccagcggcgtgtaagctgagggccgaagagcttgagtgatgttggagtgtatgttttgttagtttagagggacttgtttattatactgtgactcgataatgcgtgttggcgtaagtgattgttttccaatatatcatgccaccccgtgccctacacagagaagccctaggtattccgaaacggatattctgccgctcgtagattgacctcgcaggccgccgtagagagctcctgccaatcagaagggctgactcatcatcagtcgcgctcctattggatgtcccggccagccaatcacaggcggtcggaccaaagcggcttcaaactcgcccaacctcaaacctccaaactccctctcctgccccaaacgccccgcgtcattcacaccattacctccaggacaatgttcctccaacgtacagcctccgccctcgccaggcgctcgcctgcccgcgcttttaccctcgcccagcggcccttctcttcctctgtcattcgctgtacgtgactcctcagatggcctgatccgaccttcgcacaactgctccaatcccgcgcaccccgaccacaaggggcgatgctcagtcaattggtctgaatcttctattatgaccaccagctaacgtgaaactttaatagccagcgacaagaagtgggctcccaagcaggagggcaagatcttgaccttcgatggttagtgctttacccgaccccatgccagtcaattacttttcttccggcctgtgcggctcgacaaggatccatatagtcacgcactcgagaatatgcgtgcaattggacgctatagaacttcgggtgctggtcatgcggatacttttcccgagccacgggccaggcttgtcattctacctcgagtggataactacaaaaaatctccaaaaaccacaatgctgacctatcttctcgatatatagagatcaagaccgaggatgacctctttgccccgggtgccaagcccggtaccattcccaccgatctcgagcaggccaccggtcttgagcgtctggaactcatcggaaagatgcagggaattgacatcttcgacatgcgtccccttgatgcctcccgcaagggtatgactccttaatatctcaagtttccatcgcaattcccgaatgaatgatcaaataccgggggaattgcgtgatcattacttcggggcgaagaccgagacattggctaacaaaatgcgtcgatttattcaggtacaatcgaagaccccatcatcgtcaacagcgccggtgatgagcagtacgccggttgcaccggttaccctgtagactcccaccaggtcaactggctgactgtatgaccgccccatccaagcccaaccgggctaatatctccagctctagatactgactatgcgtcttttaggtctctcgcgatcgtcccatcgagcgctgccgcgagtgcggtaacgtggtcaagatgaactacgtcggacccgaggaggacccccactcccgtatgtttcctgctctcttttttgcttatagtatatgataatctgttggttgtgctaacattatcaccctcagacgacgaccacggtcaccaccaccaccccgctcacgtcgagcccaagaccttcgccgactacgtcaagcctgactactggtaccggtaaatcttcagtgccgattttctttggatgttgcttggaaatcccaatacagtgtgaacattatgctgcgtgtctgtctttgttctgtctccgtgactcctacgtctcttttgtactatagtgctttagtagatggaatgtgagtgttggtgaggtttttacttttgacctatatctatttgggttcgtagttactatgatatgggatatcaccggtcgtgctgttagtaggacttcttcgataccggtgtagatgaaaagagagaaaaaaaatgtatttttgagtctatccatatatcacttttgatccaatgtacatgtatgtatctagaaaaatgcggtggtatatgtgaagcctcaacagggaggtaaatatgcaatgctcgtccactcatatgcttagacatgacatcattcatatatcatcagccaatgttcagcgacccacgaaacgaagttcgatgaatctgagaggagggtaaacaagcgcagtccaacagaacccgacgtaaattcccatctagagagtaattagttaggaacaaatacacacatgatgggagatgggatttaactcacatcagcaccgtattcgccgaccaatttggcaatgggtccaatgtaccacagctgcgccatacacaatacggcgcccacccagccaacgataaaggcagtgaaagccgcaatgccaatgggtagctttgacggatcccgccagatgccccagttgtacccagtacggaggcggaagatgaaccgttcctcgaggacaatagcaatccaaatgacaacccagtagcccatcaaagcgaggaaattggtgaagatctcagagaggttgctgcggccaacgagcgcgcagacagtatagataatgacggcaatggtattccagatgacgcgcggtacggcctcggcgtagcgaccgaggatctggaagtcgatgccggcggagtaagtgggcgcgacggtattagcgatcaggcctagggcgcagataaccgagcagaatttgccgaagccgtgcagcgggccgaatccttcgacgattagtgctccttggcctttctcataggcggcggaatactctgggaacgtgggtatgcctgaggctaacccgacgccgcagactagggccatcgtgaaggagacaagaaggcctgccaggcatagactgaatatcttcagccgagaggtgttttcggggtagtagacgaagaagtcggctgctagtggggcataggtgattgcggcactcagacagatggagaagaaggatagcctaggaccatgttagaaaaccgggcttcgattcttagttgtaagaagcagactcacctattgccagctactgtccgggaatcgccaatagaggtggttgacaagtcaaacttcacggatgacaccccgaaaaggatgcaaaccacaattacttggggcaaaaatgcgaatctaatgaggcccgtcagtgacattgttcctcatggcaataatctctcaagactaaccgttcatagtagtgaaaaacttggatgccgaatgtggcaacagcccagctgataaccgcaatgatcacgatgcctataatatcaagattagtatcactattgatgtatgaagttttcggaatacccaccgacagccacggacatgccaccaggggagacagcagacaatatttgtccgccaacgacgcaatcaatcaagccgtatccaatcatctgaataaggttcaatagaacaatgatcttgctaggccaccagcccatcgaataccttccgaatgcctagtcaccgattagccctctcgatcaaataatagtccaacggattcaatatgtgctacgcaccaatgttcggatcccggaaacgggcccccatgtggccatccaagacgagacgatggaaccaactagagagccaaagacagcacaaagtgccgagtctaggaagttgagaccatagactgcaggccctaacatcccgagggtgatgttattgggtgcaaggttaatggagatccaaagcaagaagatttgcagatacgacatccacgtgttgcgcttcatgcgctcatccacggcaactcgttcgataccacgcgcttctaaattatactcgacgagctggttctcaaaagctctaataatggagcccaatcgtgatccaacgggattgcggcgattggtcgtcgtctcggggtaaagtgcctcatcgttgttgaccacgccgggactttcaggcgcgaatttcgtcaggtcttccttgttggagtgcaccgctaaggtggtgatttcatttcctgaagccatgctgcgattctgttagtatcacacctatttcctgaagagaggaaaagcgcattgagtcctttcgctggaattacccagatcaagtttaaccgtatattctcagaacgacgatagtcgaacaccggtcttcatgcaggatgcttgtcctagataccttgatcgtgagagattgccacactactcgtcttcatgatagccgtcctttgtggcacaggttgtgttaccttccgagagaagaggcactatgaccaacgtcagcggacttgatcaggcaatcacacaggcatatttcacctttgaaagcagaggatattcaaatccaaaacaaagtgagcagcaggtaatagcaggtaatcaattgatatgacaagcacccgatttccagggggggcaaaatggagaaagatttgattgccgcggggaaagaaatgagatagcccgctttggctttttccgccaccaccttacctgacatactacatccatagttattgtactagttacaacacacaagccattgggtttctgatttctgcttctgcaatttcctcggactgggaccagtgggaatcatatggtattgatggacacaaagcgcaaaaaaaaagcagcgctgtcaaaaccaaagcagacaacgcctgggagggggaagggaaacatgacggatcgcaaaacaaaatgcgcaggtgttcatatagcgcatataaaagaaattcgagaataatattgaaaaatattccagatcaccaactccatctgccttgtaaaatcagtggcctccagcggccaccgatgaaacttgcatcgctctggaattgcagggaatccggaggagagaatgccaaattcataaaagatgctaagaaaaacaatatcatcacttcgtcagaggcatcgtggtagtcagacgttcttgaaatgctctttggcatactgttcgcaagcctgtcggagaatatcgagattagatgcgatgcacaatgacatgcaggagattccggtgcttactttggcaggcttgcccactttctggccgatcaccttccacttgttcgcctcgtactccttgatcgcctcccgaagcttcacagactgtgcgacgtcaggaacggatgcgacaacggacattaaaaggactcgggatcatacctcatcttcggcaaattccgcgtagtgcatgtcctgcgcaaggtgtcagtaagacgagacgtggtattacccaaatcgcttaatattgcgtaccttataccaatgcttcttgacactgccctcggttcgggtcgggaaagtctgcgacgggtaagaaaaaaaaggcccaggtcagcaacccatagtttcagcctataaaaagccgcgcgcgcaccttggcaatttcactccaactgcgcccggcgtcgcgcattgtcttcagcctttgctcctcctctgcggtccatggggtattggtgcgtcccttcttcttaggcgtagactcaaccgtgggaatggcaccggagtcatcaatcacaccacccgaagggttcccttggcctgtcatcatggctgacgatcccgtgggagaaggaggacgtttgcgcgaagcgccggggttttgttgggatagagaagcagtcggaatcgggatgccttcaaaggttgggacgcggtggaatggatggatctgttgttgcgaaagcatatgcgggggggcgctggttgttgacgtcttgaggcgtttagatgtcgggggggaactaatcgggcaacaagttaatgaatagtagaaacataagatgaggtaaggcaatataataagaacgcgaccaagtgcacttgagttccaacccagtctccctcctacagctggaggccggacggagatcacagacgaagggacttacgacatggtgaaagacacacgcggttttcaatcaccctgtgccgattcatctgtacatacaaaaaaggccgcgtagagggaggggtggttagcaggatctggtactggcgcgccttggtcaactcggaagcgttacactagagacgatgacacaggcgcatcccaggcagaaccagattgacaaaggtaacagggacaatatgaataagtcgcgacacggataagtccagactccgaccggagtgatttaactcctatgtgggttggcagtcaaagggaagggctcacaggtcaaaatcgcatggtcgaagcgtcgattcggggacctcgaattcttccgaatatggggagaacatgaggctgggtgatggggttgactttgaagggaaggcaaggttaaggataggaaccaggaaaaaaagtagagactttaaaaacaccaggaagggagaacgagatagagtgcaagagagtgcgaaagagagagagacaaggttacagagaagagaaaggaggaagaggagaagttgttgtgaggaaaggcagagcggggatggagtcacctcatatcacaacaaccaaagtaataatagcactgaagatatcattcgagacggttgatacacttgatagagtcgatatggattctatagattatctagctcgtctattttatatggattctcgagtttctattgcttcgaggcgttaaatgcgtcgaatgttttggtttctttcatcttataaccaggccctctaactatttccctactatgtgacccctctattattctctatacctccgtctttcttagaataccccctttatattcatcttttactcccccaatatctaacgtagattattcatgtcaaattaaaattcagtgctgattcaaatgcgcctccaaccactccccctccggtgcattccacaacccgttcttctctggcctaggaaccgatgcgcggacaggggccctgtcgcaatttatgcctcgtcctgtgatccaattcgaccgacatcaagatgcagaagcaaagataactacgtccggcaacttccatgagacatttgggccgaagaaacccgcgagtggcctgttctagaatccggtgacccggcgagatctcacaacaccgtgcgaggatgacaggacacgcccaatgcgagtcaacgatgcgcccgagggcctaattattgcaaaggcatccagtggccccgggaatcatcccgcaatcatcatcgttcaattgacagaagtagaagtctccgtccaacccgagacttggcgggctagatcagccacaggacggtttcgtgtgaagccaccggggcacttcccctctctgccccccgtgccattcgttgatgatagaatatgcggtatggggtagagagtctggaggaccctatcagcatttatcttttgttttagcacggggttcatcaaaggcctgtatatattcaagaagcccagcctcttagaatccagctggcatttcctttttgtcacacacacagttcatccccttgttagtctccaattggtggcaattgacaagattgctagtgttcattcaagccgactaggactacagaatttcctggcattgtttgactcggagatatcaaatggtaatgatcgaatatatccggttaggtttgaagatgatgcatgcaaaggatcaggtgtgcttaatgtttcctggtgcggtatatcaatgcaacaagatactgccaagagtcgctggggttaaatatgacttgcatcaccccgttttaatcaatagaaaaggccgccttatcgaatctaggaatatcaagcccctagatcaacacaacgaaaaaagatacatattctatgcgtttcaacggatggctccaatattcgtgaatataggctaaaacaacaaaggcttctatcaatatgaccaattccttgctcattcacccggccgactgtttcgaccgttctgcgatgatgtaggatccttccggtcaggccaagcctcattcaaaatcagtaatcattacttctgggaatattggcaaggctaatcatgactattgggtaggtattcacgttacagcgattatatctgctttgggaatcccaccgcgtcacctgcatcacctagggcatctaggccttctcgaatccactacggtcataagcgcaaataaatagatcttggtcttgactagaatgtcggattatcggtatcactctagaagcttaagaagaacctcgaatcaaggtttgataactcaaaaatttatctcctaagcttatatatttgctcctaaacatccccgcatctttccttgttccagttcatctcctcagaagtgtttgagaacccctggactatggcttgctaagagcatgatcaatcacagtatgtttggcccttcaattcgattgtcaaattgtttactccgtatgtttcatatactaacttcacatgttgtcagtaccccaaatatgtacatcgagatcgcaatgttgaacagcacatgtcaaccataactggaggctaggcaaccaggtagaaaccccgagaatgccaactcttcctttgtctcataaatcaattcaccatatttctcgccgtctaactagttgaccagctactcgcgatttacgtgctgacgtcaacctcacgtgagaggacacgcggcccgagctcatgtggattgcggataacgaactcccccagtcactctaacagcgccatataccttcactcattgtatcttcctggacgttaatcccattttagggaacgtatatacgcagaaaacaagtactttattgcccaatctactcgagatttcttttttatcccattcctccagatacctggcgccgacctcaatggtgatagcttgacaagtgtccacacctccaactcattgtttgattgtccgatcacaactctccagccatggtgacctggaatgtctttcggattattgcagatttgtcccatgcaggctcaatatttatcctgctctgggctattcacaggaataagagcgccgagggttcgtatacctttgtataaaccgattacctaggtaccatgcagagcttactgaccaattcgatttaggcatctcactcctcacgcagttgctttacggcctcgtcttcatatttcgctatcttgatctactttttccatccacatacacgggaggcacgtggcacagcatctggaatgtctgcttcaagctcttttacctcatctcgtcctcatacctggtcttcctgatgatgaaggtgtacccacggacaagagaaagggagcgagcttggaagctcgctttgtggtctgtggtagggtcccttgttttggcccctatctccatctggctcttcgacaggtccgacagcaactcttctggttactggtttcttgaggtaagttgaacaagccggaagtgttcatatggtacagcttaactgatccaatcacttagttttgctgggctttctctatcattctggagtctgtgtgtgttttgccgcagctccttctccttcgccagaccactgtcccgacggtgatcgactcgtactacctgcttgctctgggctcctaccgagcattctacatcctaaattggatcgtccgcctttccaataaggagcccttttatgattggatcgcggtcgtatttagcattgtacagactgccttttatgtcgactttgcgtgggtgtactattcgcgccagcgagtcaagcttcgtaatggcggtgtcatcgactccgaggactatgggaacagttggctggtgaatcgtgtactgaatttccgggcctcgcgagcctctacagacgaagaacagcaccttcaagacgaggaggaaggggcggatggtcaatctaaccacaaccggtggggtgctcgtggtatttccatcgcagctgacgacactctggaaagcactagtcacaataaggcacatcgtgacagtttagatgggttttcgggagacgaggacgaaactgatgaccaccgagtgaacagttctcgctgattgatgatattctacggcaaattcggtcacagcatggcatatctacatgtcagtcaggttggtcattagatgttgcgcagggtgggctctaaacgtgttgactgcacaggaagacccgctcctaccgttctagtctggttatatccgggatttcatacccaccgtttgattatcgggcctttttttatggtagaatcaggaaatgagaaaatctacggagcaacggaatgttccgcattctggccccaagtccatggggaccttttttgctcaggctacaccgtttcacgctgctacccggggatcatttgatgtctgatgtgactagtagtccgctatggattgaatctcctttattctccaactacgctgtagtcagtagatatttactgtctcgattcgctccaatacacgggaaccggccgctacaccggtagtcacgtaccggggttaaccctgccgagaatattactgggatatcgtgcgtattccagcacccaaaggagcattgggccgcaacaaagtacatatgcatgcaccctgaaagatagctatcacatacgatgatatcgtaggaacatcaaaagtccccccaaagggcgcaaatgagaatagaccccagagctgacttgggggccaaatgcacttcccttgcaaaacgaaccagaagaaacatcccagtcctccaaagttggtttgtcactgtccaagattggtgggaatccatcaactcccaagatgcaatgtgataagaagatagatccaaaagaaatgagcgtattattcgaggtctagaaacgcctggctttttctcgggcggttagcagcaggacgtggcttggagagctgactccggaatcaaacgatcaccgcagatgtggagattggagattgagaaaaagcaaataaaataaaataaatcaatagcatcataatgaaagttccaggttgtcatgcattctcgcaatgagccgggtgtctgcatgagcgcttaagccgtggtcgtggattccccgtggaccgagtcaccaagcggctcgtggggttccatcagcctcagaaggacttcgggtcatccgtggccagtcgcgaaccgccggtcattgaacaacgcctctgcatgggaaatggagaatgcatggagattttatggagaatgtactttgtaaagggatcgtgatccctccatcttcccaataaccggtgtgttggaatctagtagcgtctagatgaggggggttttttttgcttcttcctttcttcccgtggggcctgccagattaaacaatattagagtagatgacatgacctgtgtcgaacatccttatgaagaggagcagttgcgcattcatgtctaactagaactaattgcaagatccggccatgttacaatacgctatgatatgctatggtatgctacaacatcctacaatatgctacaagataatataacatacaactattatattataatgctgactctatggtcattatagtttttgatgggtccaaaattcatgcactggacctctccagatctctaagcgctacgctttggctccttggaagatcatccacaaccctaagcaacacgtttttttgtttttttttcttgcctgctttttggcttttttgcatcttccttctggcccgttgcagtgggcctgggctcatagagtcaccttaatccctattcgcaatgcagagtctgatccccgggatggatatcagcattgaactaatgagcccgcagcgctaagacataggctctcgtcgagttttcatgagtttcccacgttctaatgcagctcagggctcaccggcggtagcgatctctgttttggtgcgctctgagcctatgattaattccgcgactcattgttcacatcttacctcacgaggcatcccggtgctggctgtgatatctccccaaagtggaggtatgggcggaattgtgcatcttctttgcttttcaatcttcccctcttttcttgctcgcatgaatcttataagatcaactgctttcggtggttgggaagttggattttctcttcatcattcagagcgaaaggcctcgttgatatacaccaacaatcccaaagcttcaaccatagtctgtcagccacctgcagtcccacatattcccctgcctcgagtttcatacttcgtttcacattctgctgcttcggcgtttattctccccactcagacaacgttgtcgaccgtgaatcaccccgtgttttatattccacttttccacctgagtcatgtcgaaccgctcggatatccccttcgttgaacaaatgggagagtactacgaaggaatgccagccgattggcctatgatgccagcggtatgtacctatgcacctctaagacaggacattgtatgcttctgcgacatgagctaaccccgtttacgatctagaccccgtacgtgggatgctacagccctgacttcgccgagcccctagccgaacccggcatgctgatgccactgggtgttctggggagctcgttccaccccggcccagaattcggttaccactctcagggctactacgcagatgcgcaccagcacatcatcaacgaccccctctctgccacagtgggtcttggtatctctgcgcccttcccagataatttcccccggtctttagcccccagtcccgacgtgtacgctccgggcccaagtggtgtccagcatggtgtgacagaggcgcctagccagtcgccacagggctccccacagggctccccagccaagcgtgccagacatcaatcctcggacacgtcctcgagcgagcagccgagcaatgccccaatcaacattgctcctaatccagagggtgttcgccgaatggagcaagaccgccagaatgtccagccctcttcccacgtactccctaagccccgggctccaggccgtggacggcgcgacccccgagcagagtatgaagacgcatttgtcgaagatctgcgagacaaaaagaaggcctggaaggtcgtgcgtctggaattcgaggagaagttccagaaagaagcctccgagtcacgcctgcagatgcgtcttcatcgccgctaccgcgagcgaaaggtgcgctgggcgacttccgatgtgagtgcgtaacccctcgcaacacatggtttaagcaatatgtgtgggctggaatgtacatgtgttggacaacccgtgctgatacgcaagtctactagatcgaacttttgctcgacgcccataggaactgggcaaatgacaaatttcagtatctttcagacaaggtgagatttcccatgtccatgttctatagagagttctaacatgtcttttcttcttctttagatgaaagagcttggtggtactaggtggtattcagctgatcagtgcagaaatcaacttcgacttatagaggcgaaagaacagcatgatcgcgggagtgaatcgccctctgttatgtctgaacctactcctgtgacacccgcacctgtggcacctgcacctactgtgtctcggaaacgacgtcgggcttcagactcttagcttcgagagccgttcgttgttttttatttcatttttcccttatttcatttctttctcttcttcacattctttccagcttgacttttttcttttctctttcagtcgcctctttctttatttccttttcattctaggatcaatctgatcgactcttcaccccgattcttgcccccactgtcgttatgattaagttagccttggatttgataggaccataggatacgcagagctgggagacattggtttctatcacaacattctttatatattttatttttatattttatctcagatctcattatcatcgctatcacgttcttcgtacatttactctcaagttcaacgtaggatgtagctctagtctggccaatttttcgacccgctagcatttataacgccgtagatgaggactacagagatgatactcgtagtcatggaagtttgaattagccatcgaattcccaaagctcctctgatgggtgatatcttagtttgttttacaatttggaatatctcccacgaagaaataatgtgtatgaataagagtggagctgagaaggatagcctgatgaaagttttattgcactgtcaagtactaaacccttactattgggccatgagcgtctaagtgggaaatagttccacttactcttagacagtataatcattaagaagaaccaacagcacaaagacaaagagcatttttagaaggctaagacaatttctaggacaataaggaagcatcccacgtgcaaaatagctaagagtatacaacaatggctctgtcaatactctgattgggaatctctaggcataacaaagcaaacatggtgagacatcagtccaattggttgttatacgctctgttgagacagcgaagccatctgaaaaaaagggatcttaccagagacaaaggctttgtgatcagaatgagatcagaatcggatcttttctctggatagaaggaaaagaaaaaggcaagaaaagtgaatcctacctgaaactagcctgaaaaatgaaaggcaagtcctccaagatctcaaacccagactaaaaactgtttcttcggtgctttgcataagaagacgggatgagaacccatttaaccatcatttccaagaacagcaccatccagcctcatcatggataccccagactttacaatgccggacgacgagcccatcaacgacgatcctagcgagaatggcccgaagcccaagaagactcgccgcagccgctatgacccagagcccgactggtcggccatggtgcgttccaaggtcacgaagtcccaacatcgtgttggtcaggcctgtgatcgttgcaaggtatgtctatctatcatattccgatacctcgtttgctttgactcagagcaccatgctgacgcgtttgaatcgatatgtagctcaagaagatgaagtgcacgcccgatcttagaggctgcggttgttgccttatcctcaacatcccatgcaaagtcactgaccgtgtcaccggtgagacctgggtgcgtggcgaggctgggcggatgtgcgctcttatcgagaacctccggaagcagaatatggatctaaaggagcagatcgcacagcttcagcagaagaattcacagctgcagaactgtctggacggctcctacagagccaatctcatggaccactacgaggtatgtatttattcatatctgctaggatccacatctttgtgagatatccacggtttgatgctaactcagttaccagccaaaccttgatcccagaaatcatcaccacagtctactgtgactgtgatgcccttttttccatgatttatcatacctcgtgggcttagttccgtgtttcctatttgtatcggtcctgctctggccgagatggagtgtataatcgagaagattggggtggcacatggtgacaagatttgtgttttttcggggtacataaatgaaaggagagttctcttacagtagatgagataatcaaatactttcgtctcatttccaaaatgatagtcaatggatatatgtgtagtgtgaccatgtaagcccaaattgtgcactgggtatccataatagaaatgcaatgcaaataaccatcggcctttttatcaactggcattatttttccagcaacaacagatccctttgctttcacaccactccctcacagacgcagtgccaacctcgcgatcctcacccacaagtccaagtccctcgatgttgagccatgctgtaaaatcttccagaacaatagggtcgtacatgagtatcttctcatgccacgtcggtcgattacggctaccacgagatgatgatagcggcgagagccgaggttgaacgcgaacagcttgggtgatctgtgcagatatttctaccaagctgatttctgttgagtctgctgtgtaggtggttgcgatgggtgcagaggatgatggtcttttgactatattggaggaaacgaccttgcgcttggtcgggctcggtggtggtgtttttgtgaagatatccaaggagtggtgttgtacccggctgtcggccttggactttgaatagatatcggtgtagtgcttttgtacttgacttggagagggagtgatttcttcttctgagtcttgaatctcttctacatcaataaatgacgtagaagtcccagtgataggcttccctctcgggtttttctttgggcttgtctgggaataggtttgtaaggcgggtgttgattttatcgcgtcaagtgattttcggttctttataaatgttccagatttagacttcaccgtccccttcgaggtgggtttcggaacactgtccattttagaggcaggttcttgttgttgttcgggttggtaaataggctggctgccaggggtagcattgctaccatgtttcgattcccaacattgttgaaggagatcgatcatcttcttgcggcctctgactgccttgaagccataattagagatctgtttagacaactctgcatccgtgaacccggtatattgtggcatcgagggcgcctgcgagctagttggctgggaaccgacgacttcagtcggagtatcattggctctacttgcaggttttgtagcattcgccttggccttcgccgtagtcgtagccatagctgtagctgtagctgccaggatcggagcctgagcttgaacttgtgtgtcagaatccaagccccttttggtcaagggtggtgatgatggtctcttttctgggggtgaatctatgtctgcaaattcaagctcgaaccagttcgtttgaagaggtttgtggcttgcttgttccacaccctcctttgcaggaggttcatccgtcaggtcaaccacgtttagtgtttctggttgaatcaaagatccttcggtgtctctggcgccaacacaccatagattcctggtgcctgccaaccttgatacaaaacgagtagacgactcttggatcacgctggggtccttattgcgcgtcccttctagatatgaaagactttcggatgcatggatggcttgctgagtctcccgcagagtctgcggcgaatcatctctttgcaattgactgcaggtgccaaatacaagatcttgatcattcagaagttcaacggctgcttccggggaaagtaccgtgaacaaagactgtttctctgtctctttggcctttcttcgtctaccttttgtcgttctgatgtccggaaggcaatcgatcaccggctcatcctcttctacatcatttgttgaatattgcgcagtcatgcgcgcagtcaacgtggtgaacttcttaggtttgcccttggttgtctttttgggcttttccaagttctctctttgagcagacgcctgatcagttgaatcagagtaccttccatcgagtgataattggatttcaggattgaccaactctatccgccgacgtttcgttggtcctctgccattgtcgttctgcaaaaggtcgcgggggttcaaagctaacccagagtaattataatcggataccaacttgccaaatacacctgtaaggttcgtaccatgatccttatctgggatttcaccatcgttcacggtgacagtttcctcgtaagcggtctcccttggtggtgtccagtccatccttcttctcattgcctcgtctagatgtaacacctcattctttcctaaaccatttgattccttgggagtagatttgtcgggtacatcttccgaaggagatgactttgtggcaaccgtcttcttcccacctttgctcgatttctttgctggttgatcgccgcttgtctttgtaactttcccagccagagtcatgtttcccgcatctttactcttggcattctttcgaggacgactttttgttggtttcattgtgtcattctttgtgccaacagtctctggctcggggtccccaagcgcaattgttcctggtgcatccgcggttttctgcgccttccgccgcggtttgttcaccgcggttttattgctggtgtctgaagtaggatccttctttgaaaatcgctttttcggcttcgtgacgtccttacaacaagtattgttcgcgattggagtgggaaaaaaccgggaacgcgtatgaggttggaacaaatcggatgtcgagcgtattggtggtggcgttgtacctcgtggcaagacacaaggtgccggcgttgcatcatgcctacctggccttggtgaccgtggtggatttggagaggacgacagaatgatcacgtctgcaatactggccatcgtggcaagtcgcgtctctggtgtttgcttgattgatcagggcgagtcgcgtgcactgcttgggtttgctatatcaggacatatcttaggcaacatttatacctagggaaacagtataaagtgtctgcgagttgggtatgcaggagaagtagcgttcggagatccgagttcaatatttcgatccacaagggtcgatcgcccgcggtcttggcaaagctctatgtacatgctcagtagtttggcccggcaaccaactgcattcaccccagcagagtaaatccagtttagacatatttacgctgaatgcttataggttcaattaattcttgatttgaagacgcctttttactgtcctgtatcacatgaaacaaacgaccagtgtcgaactgccttgcatctcgggaatatatcattcaattcatcattatcttgacttcgtgcaaatccggagtgttctcagctcaatcctggggctgaataatagtagacctctaaaaaccccataggatctgcttgtgattgacgacaggcatattctcaagtcggagccaatttggagctcaatgtatcccaccccgaagaaaaacagcacgacttggagaatgtatgcatttcccactcgtcccacggcaggtttcaggaatttcgagcacagtgaatttggttctttggtatgggcaattgctcacgatcccctcagggcgattgaactcaacaaggaattttcaagtcgttgcttagcctcatcgtttttcttggccgttggcgaaggcagagcccctagcttgtatgctttcttgatcttgttgatatcagacatctcggagagtgtctggtcatcgaaaagcacaggtgttccttgaaccgagctgtccaagtgggccgcaacggattcgtgtgttatctccggagagacagagaccttgaccaccaacatatctttggttgaatcggtgataccaaatctacggaatgattcggagatctaagcccgtgttagctccggctttagtggcaaaatcgtcgctaactcctaaaattggcaacccacattattcgtagggttcaatgagaatacgatctcagaatgcacattgtgagatttcagtcgattgtgcatgtaatcattaactgctctgaatactgcagcaatgacttgagcccttgacagaacctattgttaatgtcagttgcctagttccctttcatggtccttggtgacaactcaacataccatgcttgcatcgataaatgcatactcgaattctgcctgaccgtcgagaagttgacctttcagaaaggcggcattttgaacatcgcgatagagagcaacatgcacgggcatcaatggtagatgtgccacgctgatcgtctctagacttgaggccatgactaaaatcgaactgaaaccgaaattagaaagttgatgacgtatgtgtaatcaagctgatctgattaaacaatcaagtgagccctggagttcactgtctatcccacttcttgatccacgtgactaattctggaattttccggacttaagcggtcgccgacggaacatgagtaatcgcctccatatcatccgcgggcccgacatttagagacctcttcaatcctagctcttgacactccccattgcgaaaatggctttcttcctacggcgcccgttcgctgtatcctcggcacttcgccaggtccctaagctcacaaacaccgcccgattcattcacaattctcccatcaagccaacccaagcagcaaagcctcagggcgtttcctcgatcttcgcccagtctcgccagaacttccaaaatgccttccgtcgtacatacatgcagcagagtgtcaaccctgctcaggatggtaacttgacccagaaactggtatatggcgctgccattattggtggtacaattttggcaaccaacttcatcttcaaccgtgaaacgagagaggatggcggtatgcccgcttacgagcggagcttcctgaatgagacttttgtgcacactggtcttggtatcggtataattggtgttgctgctcgcgccctccacatgagtggctggtcttatcgtcttatggctatgaacccgtggctcgtcatgggcgtgggtctcgttggcagcatcggatccatgtacggcactttctacacttccccggataagtaagtttttcaccttctcttctttgttttcaggagaataatagctaacttttcaattaagctacgttctgaagtatggctgctggactctcttcaacgttacccaggccgctcttctctcccccttgatgttcatgaatcctgccattctcgctcgcgctggtctttacactgttggcatgatgggctcaatcgcttttgtcggtgccactgccaagcaggagaagtacctttatctgggtggtccccttcttgctggtgtggccatcgttgctctctctggtctcgcccccatggtcctccctgctactgccgctcgcactctgatgtggtctgagcgcgtttggctgtacggtggtcttgctgtcttcggtggtttcactctttacgacgtgcagaagattctgcaccatgctcgtcttgccgagcgcggcttgattaagcgtgatgtggtcaatgagtcagtcagcctcgagttggacttcatcaacatctttatccgcatggtccagatcctcggcatgggcaacaaccaccgtcgttaagctccttcatatccactatattaagtgtgcaacctgatatcgggtttgtaacatcagaatcgttgtttcgccttcttttttctcgttcattttacaaccgtgtatttgatgaaccaactgttcatatttttttttttattttttttttggtcttaaactttgatgcttcttcagatgggcaagaccagtcaatcactgtttttacttaccgagaaacatagcagatagggtatgtagtgaatataatctccactcccttgacatttctgctgcatccggaagcatagtgataaccattggagtccgaaaaactccgacttggaagtcgacaaaagcaaagaaatataacacataactagtaatcactactggatagttccaaggttgacatagatatggctaatgctacaatatagttgaatacggtagatttttggtagtgatttaacatgactgccttcgcaacaagaatatactggttacctagcatctcgttgtttgcttaaggtccagatatcatctagatacatgcacatattgcacaatgcaatggactcgaacttatcagaggggcagattgtggtcatgtgattgcaagcttctcttgacggaggttgcccaataagaccgccctccgccctctgcagacttcagatcgcgatacagactcattgaccactacaaacgtgcagattaaacctcccaacataatatcaacacagtcgcactagccttcttgcttccctacctcacaatatgtcgaacgagatggaaattgacactcctgtcgcaaacgacgacgctcccgagcaatcggaccgcagttttgaaccacgcacccaggggaacgcggtcgccgtgcgcagtatcgaaggatggattatcattgtgtctaatatccacgaagaatcgtcggaggaggatgttaccgaactctttgcagagtatggtgaaatcaagaacttcagcttgaaccttgatcggcgaacgggttatgtcaaggtgcgcatcctgaatttcacaactacctctgaaacgacccccaacaacgttccttctgaaacaaggggacccttcttgactcgcgtccaatgaaaggatcactaacaccactattttggtagggctacgcattgatcgaatactccacgctccccgaagccagtgaagctatccagaaccttaacggttacaagctcctcgaacagacgcttcgtgtcgactatgcttttgtccgcccgcccccatcaggcaagaacaagaatggagggccaaagggccgtgctattcggaatcgcagcagaagccccaaccggagtcgcagccccgaagctggcggcgaccgggaataagccttcctgatggatgggaacgataaaaattgacctgcatacattgcttgtgatcttctattgatacctgggctttgttttttctcgcatttttctctatacctcgcgctgtttcgttcgaacctttgcccacccttcctaccagaattgtctacaaatgatggacatatcatctagtattcgccggcatggccactcctcagtcgaacctgtatgggtccgcaggtcgagtgtgggtgtgcatgggacacatacacacaattggtacgtgccggcgccacgatagattgccataatggtatggaaacccgtccttaacctttaacttcaatcatgctgacttctactcagaaatgaaaggccgtttgatgaaaattgaaaattgatgtatgagcatctggtcaacaaagacaaccttggacctcgaagacctgcctctgggagtaatgtacattatgaagaatggttcttcttaattataagcgaccttcatcatacgcacttgtcttgtgacctatttgaagacaaaatcaaaaatgttagtagagtattagtatacgatgtattagcaggatcccttatggggtggaatgcatcatgcgatagccatgtggcgcaagagtagaatcgataaattattttggattctcgagtgagttagtacatatcgtagagtcagatggtttgaatgcttttaaggctttgatgccatacaatggatgtggatgttcacctgccccggtgcccgggtgggcagcgggtcttgtgactaagcctaacccttcccggcttccccgcatggcgcatgaggttatctctgtccctcttttttagtcgatctcattgtgccctctctactccctattcttatagacggactccagcatcctgtgtctgggagtcctactctgacaggatatatttcctagggcagaatggctccccaatacatatcttttacccccttggggctatcacgacctctatactgtattcttatgctatgcttcctatcgttttcagctgcggccaatgcgctggcgtatccatctcaggaacttttgggagtgccttcagtttccagtcccgttgatgatttcccaaaagtctttagggatactgaatcggcgcgggaagcgtcggttcgcgaccccattctgaataccttacaggatcttatcgccgccctgcaggtgatgcaagacaagtattttgtgctctggcagggcacgtggcccaccagtatcgattggaccgcggcggtactgggtgcacacgtttcggcagcgctctcgactctaacctcaggcccgctcgatatccccgacacggatgaattgcaaggattatccttcttcaggctcgagcacacggtcaaccgattcttcagccatactgccgcgttctactttggcgagaactctttcagtcttagaaaccaggcctacgatgacatgctatgggtcgtgctagggtggttggaaaatatcaagttgcaaaatcttcactcggaccttcactatgtctcctccaacgacagttctggagaactgtggtacggtactcagttccagaactctgctgcacacagagcacgcgtcttttacgagctcgcctctgctggttgggacaagaccctctgcgagggcggcatgatctggagcccatatttgacgccatacaagaatgcgattacaaacgagctctatatagccgcaagcatcgagatgtatttgtacttccccggtgattccattgacgcccctttccttgtcgactcgggcacgcagcgcgcacggaagaacccatacaactctcttcatctgcaggctgcggttgacggatatgagtggctcaagaagtcaaatatgactgggatcggcggcctctatggagatggtttccacatccgtggctggcaaagcgcatcaaatcccggctcgggacaatgcgatgagcttaactctatggtctacacctacaatcaaggagtcattctcagcgggctgagaggactttggctagccacaaactcgcaagtttatctgcgtgacggtcacgagcttgttcgcaaagtactgcaggctaccgggtggccacatacctctagccagcagtggaaggggcttggtcgcggaggtgtgctcgaggacgcatgtgattctcatggaacctgctcccaggatggacagaccttcaaaggcatatttttccactaccttgcaggattctgtcgacctcttcagccgcaagagaagcagttcctggcggacaggacccgcagaaatgcagcagatgacgactgggccgaagtctatgagcagcatataaagcagtgccgcacctatggttcttggattaaacacaatgcgcaagctgctctggtgactcgtgacaaagccggcaagtttggtacctggtggggccgctcgtatcatcagctggatgccaacgagatcgtggatagcagcactatcccgaatggtgctgtagattaccgcaatgccgatcatgaatcaactacaggcttcacaccgaaggactacaacgatcgtggccgaggccgcacagtggaaacacagtccggcggcgtcgctgtgttgagagccctgtaccagtggcaatcctatgacgtcctatgaacaaaacaaatgaacggtttgggtttggggttggtgttttggcggtaaataggcaccattcattgcatccagggctttgaagctctttttttgtacatcctgcacagctacagttactggggatcattatcatatcgtccaggttcgacattggcttctcagtagttacgattttttcaaactggaactgctttcgcatcttgacaacttcccctgacccttggacctgccgatcaaagcagtagtactacaacgctagtcttttaatccgatcctctatggatctcgcatcgtgcacttatcaatttagcaacacaacgattggtggcaatggatccccagcttccccattccgatgatcctctccgcagagcacggcacataaaacaggaattcaaaaaccaaaaccggattacatagttgatcgtcggatctgcaacaagtggacactggtgtgagggattacctatgttgggttttgcgagagacataggacattttgcggccgacttacaatataagacatgtttctggcgatagctacacaacgttgaggactccagtttgggtctgcttatgcgatacatgttgagcaactgacaataatatctctgtgttcccggagtgaaacctatgcaatgaatgagagatctttcatgttgtcttgccgcggatatgatgttcgatattgacccccagagacgatgtgagacacagttcggcacatttctaggtaagttgatttcctcggctattatatggagatcaaactctattatactatctacttcgggccgttggagagagaacaggtggatgacattggatgacatgttggatgttgaatgcatagaatgaccggagggggcctctacactgtagataaggtgtattccttcggattgtcatccttcagaccaagccttatgaacagaagtatgaaagcgacataccttgtcaccactaaaatgccaaaaccttgaattctcgtcgcgatgattgggccttcaataatacccagcatcgaagaaaggcgggaaggtggccacttagaacacagagaggggcaaaaagaagcaaaaagaagggaagaaaaacccaaacatccactctagcgtgcggactaaacatccttgacgccccctccgtaatgagggacaaaaaaacgcgtccgtatagggtgggggtttcgggagtccgtagggcacgaatcaacgcgacgaaacatacctgcagatcggcggggactttgtttgaccattattcggagtagctctctttgggacgccaaaaataaataaaaaagcaatttcagggttcgcatgatattacgcggatgtctcatgaacaacgggtggaatggtaatagctgtagaaatgtggtctgatatcgattttgtctcagtttgccccgatggccacgtttttctttcttgcttagcgggaaccatagttcaattaatctactgtagaaatgatataccctaaatactttatgttgcaaaccttggaattaccctaataccaatcttaaacatggttcttatcgacttgttagattacggcccaaagcatgtcacacgcacccccccacctcatggggttcggcgaagagggtgtacaagtacggagtacggagcactccgtacacctttggcagttacacctgtgctcatggggaaggtactagatacggtaggtctgagcgtatagttcagcgctgttcctctgaggtcatctgacaacgggacctaggaacgcattttggtttgacagagggggtgagttggctgtcataacctcataagcaagcccagcggggcaagaatagattagttatgtaggatgtaggatgtagaatgtatactcgaatattgatatattatatttctttggatcaatcgcattctgagtttatagtctgacggctctaactcggcaggcacgatgaaacccgatgttgacaaaggcggaaagactagtacatatccccggaccttgaaggtggcaccggcaatttggatgagggtctaccatatcttgccgaaaccggggagcatagcagagagagtcattgaaaacgatttgctgagatcggcatctatgatggcactcggtttcacctcctttttggctcggtgtcgaataataaggaagcatgtcaaatccagtgtcgaaggtcataatgaatgatcgtctggattccaagcgttgggcgcacattggttgcgatggagtgggttaaggacgggaggtggtgactggtcgcgggatattacgacaggccctgcggagcaagaaaatgcagttgtgccactgaactttcctggctaagttagtcagttaatcttccgcattattctccagtgctgtggtcagtttttctctctcggtttttttttttttttgtggcggtggaggcggctaacgaggggcgaacggggatttatcgtcggatatgttttttgtgccttccattacagtgcaacatacgttctatattggcagatggacaatatgaaccaaagaaggaccttcgggatctgtacggggggttactggcactctcctttgtccctcggccgatcttggccaagggcgggtatctaccccttggaatcttcgtcaccgtatgttgtacgttgtagaatcatgaccagtatacaacatatccaacctccaacctcgccgaggtaggtagtagaattggtgtactttggtatcaccacgatgtatacggagtaagtatccgcgatcagaaatacgttcctaaggggccaatgatatccatggcgtcatttggctctgaggctcgatcgacattgcatgcccccccccctctgaaggacaggggtatggccacatgtgcaatactgcataatacgtgattaatacgcgattcataccgatataagatcggttttcttttctttttttcttttctgctttattattccccatacccgtagacggcatatccgggtgagaataatgcaggaagacccaagttcccggagagtgactataaaatataaaagaatgcagactccgtggatcgatatacaatatacacagttaatctttttttttttccacaatacgtgtcaaatcaatgctacagtggagaggaaagcgtgtgccctatgatgtaccgagtacctgatcggaccatgcctcgaatagggaacggcggtgtaccgggtacttgtcgggaaggtggtgtgtggaaaggggaatctgaggagccacccgttagttcctgaacgcctctcgtttctagaaatcccctctttttttcctttttctgaatcttcaccggttgattttgattttattgggtttatttgattgatcgaggggggcatttcgatgtctatgggctggctgggttattttaatattgtgccacgcgatgtcgacgggaattgcccttatagtatgggtattaattcatctataaaaaaaaaaagggaataataccgacatctagaagaaaataagaaaccagagggagcatccaagggacatgggttcctgttaagataggcaattataccggaagactccataggtaccccttggtaccgcacccgtcgtaccacaacgtaggtcactctgaggtacccctccgctgtaacgccgataccgaaactctcttccttttcccccaaagctcttttcggttctctgactcctctctctctttcttcaaactatcttctgtctcttctcttggaaagtcctcctcttgccatatctatagccccgatccctcccttgtggccaacctctcttcccggaacgagcgtggaaaaaaaatattccctggaccttccctttgaaacttacaccactccggtttacctttctctcccctctttcccaatctcgaattggattcagcacacacgcatttcggaattactcgtctagtcaagagtcggccacggtcgtcttgcgaattgcacactcctccatctcctttcgacttcccaccgacccggtagctacctcaagcgtaacacagatttcttgtctggggtacatcgctaggggtagaccgtggtcgttcatcagccgttactttccctccggtctttttttttcagtgtgcatccccaatcgtgggagcctgatcagaccgccatcctggacctcatttcgatattgtgtgtcgcgaagcagtaacctttatggcatcagataccgaaatgacagaagcctttcccgttgatactctgccgcaccccaacgacggtggccacatgcacatgtcgtcaatgtcatcatcgtcttcgatatccgacgcagaacacgagcgccgaggccgatcagaacgtccgcgaatggcgagccgcaaacccagtgcttcaatccttgtcccgagagaccaccccgaaattgaaatcgaggaggaagagtttcctcccgacgatgcccgcgcaatgagtccacgacgcaattctgccgacctagagcgtttaggcaaggaggcccgacagaccctacaagagtgagttgaaaaaacacatccaaggcgtttttgctactgaattacatcagatccaagattccggcagctaaccagatgaactcggaaaaatacagacaggccaaggctctccaatcgtcccttcaagctctcgccgaacgcatcgacgcggtcaaatcggaccatgacaagttggaaaacgagaacaaaatcttacaagactacattgggggtctcactcgcaacatgaccaagagcgaaatgacccgcagtacgaaagcacgcaaagcacaaaaataaaccgcctttccgagatggcgcaaggtagcccggatacaacatcccgtggacgtcaatcgggaggaatcgcctgtgactctgcagcagggggttccatgcattacaaacggtcgcgggttttaccgggattcgaattattttcacttcattacgacgaaatccatggtcaacggatttctcttctcaccgcacatccaactggtcgcttaatgagttacatgcctaatatccgcatggcaggtctcataaaacagcagggttagggaatgtctgtttacaaccgtttctccttccgcaatggggtgcgtttacccgggggcaatctctcggttaccattttctcacacatcatatctgccacccgactggttcgagtggccaccctgaaaactcaccacctttcagtttaaacgccaccaagtcaccatctccacatttcccctgtccaaccggggtcagctgctaaaccgggggtgaggctgaatcccgaattcttttactcaagggacttcaagggattgcttgtgacatcattgcatgctcacctgacttcttggcacttgctttcccgagttcttcattacatcatcctcaaagtcggtgtgcaaccttccatcctatcatcttcacgcagtgttccaccctgcctctattcaaccctgtcgatattattggccctttttatttcctattccgcactcttcattcggcgttttcttcttatctttatggcggctcagtgaacacgtttcacttgtactttttcttcctttttgttgtctatgcatagcaccttgggcgtttcggggactgggactagactcgatttgattgaatggctcctgctggagcattgaactgtttcttcgtcatgggcattgcatggtggcggtcatcgccacaacagaacggcgtgggaagtggaaagcatctttaggggtctttggggcagtccatttatcttctcgcatgccttctcgatattcgaggggctctctgtacatctgcatctcaacctgtttttcttttttttctcttctttactgtctctgctggactgactcgtgtctctgcatgcggagacaaagatgccgctgtttctcattgttatcattgtggctctatttctacttcttacacttgacatacccaggagcgtgcatgtctcaagtcctctatttccctttattgccctcatacccctttttatcgagcccacatggctggtagcattgtggtttcgaccatactaattgaaaacatttcaattaagactgtcttttgtagatctctatagatccaataaaaccccaaatgtggcttgctacactatgacacaggtaacccgatgcggccaagagcgacactcggcgaaacgccatccaatcgactaacgggtcattacgagcggacaaataaccggaccgtatgtcctgcataccccgtgaagaaattacgccgatcaatccgcgatgtgacaccggcaggcgcacataagctcggtagtgtccaattaatacagccactgatatcattgccgccctcgtctgcagtatacgggcatatatgcgcatatccgcgcatcctagtcggatatacagtaggaatacggtgtaccgattcattatttgaaacaatgctttgtattagttaaggatctggtacgtaactaattagttatatattttggatgacctatccaactggttctatagggtgttctgattagaggccgtgctgcctatgggtagtaacgaagatactgtgaataatggagtgtcaatttagaggcaggatgaggctgttatgataaattcttccatctgcaccgcctagtttactcggacaagacagcttgttggctactctgcgacatccggggcaatggacatagactcatacacatacacagtcatccatgcttcagctacaatgattcgcaaggtagttactggaacagtgtacggagattatcttcgaaaccacatctagtgagaatcaaaacgccaaaatggcacatatacggggagtgatcaataggaaaggtgaaaagccaggttagggatcagcagggatacccttgttgaagtcctgataaggaactgatttggaaaacttctgtgtgtatgtgtgttgggctgggggagtgcgcgcaaggggactctttgggtagttaagaggcaaagtaggcaaaataacaaggagaatgaaaaaaacgaaaagaggagacaggatggatatcccccagggcagagaacaagcgccgggccaaagcaaaggcaagtaggcaagcagacaagcagagaagcttcaaggaaaaaatgacccagagagcagggtcacccaaagatcgcaatattctcacaccaacccttgcgagtccctgcgacaataaaccgacaatcggggcaacacatctcatcatccttcctccttcatctcgaatctatctccttgtactagaagacccgtcgcgcgctctctttctctcggttgttccatccgtcctgaggacgcgtgcccatcaacaaggtctttttaggtgttaatcatttactcggcggcgggcttctcggcctcagcggccggggcctcctccttcttctcagcaggggcagcgctctcggaaacgggctcagcctcggacgaggtccagagagtctggtgagaaacgtgggtcagtgtatgaacaaatttgaatcagtgtgtgatttgaacacttacgaggttgtcacggagaagctgcatgatgagagtagagtccttgtagctctcctcgctcagggtgtcgagctctgcagacaaacattagctttggtcaatgcacgtgacggaatttgaacataccagcaatggcatcatcaaatgcaagcttggcgaggtggcaagcctggtcgggggagttcaggatttcgtagtagaagacagagaagttgagagcaagtccgagacggatggggtgggtaggagcaaggtcagtcgaggcgatctcggtggcagccttgtaggcctccagagagtgatcagcagcacccttgcggcggtcgccaatggcgaactcggcaaggtagcggtggtagtcacccttcatcttgtggtagaagaccttggactcgccgctctgggcggacttgatgaggtggtcgtccagaacctcgaggatatcgtcgcagatcttggcaagctcggcctcgatcttttgacggtactccttgatgagagtgacctgggactcgttgcccttagactcctccttctgctcaatagaggtgacgattctccacgaggcacggcgggcaccaatgacgttcttataggcaacagacaggagattgcgctcctcaacggtgagctcaacgtcggccgaggcgacgaccttcatgttctcgaccatctctgcgtcgcattgtcaggagtctgtgcaactgaacgatctagatttaagagaaaccaaccttcatagcgctcggcctgctcagcgagcttggcgaggtaaacagcgtcttcgtgacccatggtgaatgtgtgttttctacagtccgaactatgttagccaatctttttcttctcacatgagtctttattcttggattgatgatgttcgatgcgagggctgaaaatcacgccatgggacagtgcaagtggcgatggcgaggggtagatatcgaccctcgaccccccttcgaatatacggggaagggcccagttgaattttgatgagtatcacatagaacgtctctggatcaagatattggaacgaaaaactaaaagaccccagagatttggccgatcatgacgatcgtggcggttacagggcccttcttcccgtgtgtcgttggggagtatcgcaggaaagcggtcgcggcaacgggtcaactcgtgaacagggagacgagaacatgtggtttccaccgtagattgtagcgcgattccatgatttgaatttgggcagaattgtagttttcagattggtctcttcccatcatggattgttgatgtgtgggttttgcggtgatgacggggggtgggcatagaaatagggcgagaaaaggacagattcaactgggggaacgacaggaagacactgacctggtttgtgaaagaggaaatgaaggcgattaagggatagcaagatggaagatggaagagagtagggagttgaaagagaggaggtaggaggaaaggaggggggcagaaggcggtgttgttgggatttacctgaacaacccacttctgttcgggctttgtggttttttttcttaggaaatatcgaaaatgacaagtcgaggtcacttggacctgttctttttcttctaattattttattttctatatatatacaaaaaaatccaggaagatatggcttttttgccaatctatacacagcacaccttctctcatcgcttctgtgtggttcggtgggccgcctacagcgtcatccctcattcggcatccgccaatcgcccggttccttacttgcgcctcattcgagatcataaaccaaggcagacagcatgtgtcggaagcagtctagaacgaatggatatacagcataaaggcttggctattggcctaccgggatcgcaaaagaacgcaaaagaaggggggaaaagagtcagctgcagtagattaatgatgtgatcatccctgcaacccctgtgatccgaagtagttgaagtacaatcgtatacaactcgcaagggcccaagtggaaaatcgaatgagaaggccgcgacttatcagaaatttttgttcacatgaccttcacctgacataagcttgtttcttccgaatccccatcacatgatttggcttggcacgggacgttaccttcctcgtacccgagctcacctcgtaaatcctacctgaaccacttctaccatctaaatcatcaacatgcttcgtcaatttgttcgtcccgctgctactgccaaccgggcagttttcgcccgctccttctcggtagccgtccctcgcatgggcgaaggtgacaccggtgctccccgcactagcggtggtacctcctccgggtaagtgcgatgcacgttgactgcggattttacgctcgaagtacaattgtaccgagtagacagcccatgtctgccttgccgcagctgggtgacatatctgtatgatcgctaacgttgggtcctactagtgactcgttcaccaagcgcgaggctgcccaggagagcctttacatccgtgagaaggagcttgagaagtaagttccgcgcaaagccgagaacaatcagacaatcagactcgagcggggagctaatctattttgacaggcttgctcagctcaagaagaagatcggcgagcagcgcaagcacttggatgagctcgagagccacatgtaagtccaagtctggaaatactctcctgcctatttccttttcagttgaaagtaaacggcaaggctaactagtttctctttagcgatggcttgagccgctaaatccatacacccattcatctcatgtttaatatgaagggcccttccattgctgtgtataataccatcttcgctccaacgagctatcgtgcttgcctgctgcattgaggtcgtatcgttttcagcgcctgttcctaaacaggacatctctctaccatagcatatggaatttctgcgctctggtgtatagctcagtagctcactcggaaatattattgagaaacctcggtaaaataaaccatgtttcaatctgtacggagagtagtcttaataaactacctatgtactccatatgttcttggtctttgtacaagtacacgagattcctcatcttttcgcaatgtttatgctttcttttggcctcaactaacccgagaacattgtcttgcagcaaatgtttacccaaccaggtttaccagcattgtacaaggattatacgagttatatgactaagttgtatcttgccagccgtctccacaaaacaaagcatgatcacccagcttaggctgaggctccttccatcttacctcgacccaacgcccaaccccccagaaataccccgccatgtctctcctcagtttgccaaacgaaattttgctagccatagcagagaaccaagactgcgaaaaagacataaatgcgtttgcaagaaccagtggccgttgctatatcctcctgaaccccttcctctatgcctacaacgtccgagagcaccagggaagcgccctccattgggcagcaacccaaggaattgtgagggcggcccaagaatcactccagcaaggagcagaaattgaatcgagggactgggaaacacaaaacccgccgttgatactggccgcttactacggccatgctgatatggttaccttcctgttggcacagggcgctgacccgtacgccgaaagcggcgggaggacccaagacgcgatcacatcagctgtgctccgcaataaaacagccgtcgctgaaatcttgcttgatagcgggattgatgcaaataggacggactacaggggaagcagcctattgcatcttgcggctgaatcatctcccctcagcctcaaggcagtggtgagaattcttattgagagaggtgccaatctggaatctaggaatgaactgagtcagactccgttacaggtagcgtgtaagtctggttccgtggaagtggcccgatgtctcatagagagcggtgccaatttgaatgtgcggagtgaaagtggaagttcgctcctgcacctggcgttcagtgaagtcaagaccgttgagttgttggtgcagaaaggagctgatatcgaggcgaaagatgagcaaggtgagacaccactgcatctggcatgtcgggatggctgggtcgaaacagcatcattcttgctggaccatggtgcagatatagagtcaagatcgctagatgggagcacaccattgatgcggggagtactctgggagagtattatatgcagggagctgggcccaacctctgtgaccaccctcttgctgtcacgaggtgccaatccaaggcagggaaatgatttcgatatcacaccattgcattgtgcgacggccaaagcaaattctgcgcttttcaggctattgctacgatatggtgccgatgtagagccaaaaactagggctggcgtgacgccgctacacaaattagcgtccactggctcactggactccgcaaggcaattgttgcagagaggcgctgatgcacaaccgagggacgaagaaggcaatacaccattgcacatggcagcggagagaaatgatgtggaattcatcagtttgctgctagcggcaggcgctgaccggctggtcagaaacaacaagggtcaatttcctatacatgtagtatcaaaagcagcacacaaatcagaagaaagacagagagaagtgatggctctcctcgaggtttggtctgataattagcattagccatagtgaccaaagacataatatacaacaaatatctgagaagagtttgtcaatcctattgcattagattctacaaaggttcgaaatttgttaatcacaaagcacatgcaagcattttattgtgacggactattagcattcccagactacaacagaaagcacatcgaggtgccacgtagccaataactccgagttcaaatcattaaaaaaagccatccagccctttaccgtccttgcatgaaggagcggtagaaatcatcagcagtgttgttgttgcccatgccattgttgggataaccgtatccgagacgggcagagattgattggcctgccttttgggcggcggtgaccttggactgcagatccgaggtgccttggtcgatgagctgcagctgggacaggtgcgcgttgagaatacggacaatctgcgaaatctatagagatgcgtaagcaaaagaataaccctaaagaagggatcaatactggtttgtgacttaccggctcatctgcgttgttggtcttggtcaatgtggatgaagcaccgttgacctcttcaatcatgctggtaagatccttgcccatttcgtccaagcgttccgagagcttttcggccagtttgtagctaatggctagattagcaaaccatatcaaatgttgcgttgtgtgttgtacttacgttgtctcacgctcctggtcaggtccttgaagggactctccagggcccacctgcttggtaaccatctcgtcgacttcacgctcatatcgatctagccatgagctgagctcatcctgttgaccttcaaccgctgacaattggcgctcaacctcctgggtagctcgatccgcatcaacagtgctgccgtacagcttctgaaccttggtaccattgtccaccagcagacggtcccactcggaaaccttctccgcctgttcgcggaagtccttttgatatttgccgagatccgtggcccatcgggtgatgatctcatccatagttttgttcttcaggcgtgactgggctggaggagcggggccggcagtagactggccaagggcggcgggcccagctgcagcagctggagcagcggatgtagtcgaagcagccgtcgtttggggtgctgaactggcggaggtcgctggttgcgccgaggtggtagtagcagcttgactgaacaagccgcccgtaggtgcagcaggtgtagtagtggcaggcgcggtagtggccgcagtacctgaagtagttgtgggagctgaggtgttgaacaggcctccaagagaagctgttgctggagtagtcgacggagcagccgtggatgtagcacttccggcggaagggaaaaaaggcttttgaggggtagcactcgaggtagtgggtgctcctagggagagagttgtgtttgcggtggaggcaggaggagtgcctgccaggttcttgaacatagacggtgtctgtgagctttgcgcaccacccgcgggtgcagctgcgccgaagagcttaggagtgctatctgcagtactcgtgggagtggctgaatcggccggcttgcttccactgaatagaccactgctgggcgcagtagcggttgcgccaccaaaaatcggcttggttgctccccctccaaacatattgttagatgcctgtgaagtagcaggcgtggtagatgacggcgctagggtgggggtagtcgagactccgaataagctactgggtgggttagatgccggcggaggaccagcaggggtggtggagttgttgccaaacatattctttgcacctgctccaccaaacatcgtactaccggcaggtgcggccgattctgtagacttgttgggagtctggttgccagcagtggcgccaaagaggttaggctgcgtgccagttcccgatggagccttgctgccgaagttgaaggccgaggtaccgcccttggtcgcattggcagcgcctgcgtttccgaaggttggtgtgctttggccacttgcggaatttcctccaaacatcgatgtgctgttgccggtggacgaagctccaacattaccgaagagcccaccaccagacgcattgttatccttgttggcaccgaaggcattgcctgctgtgccgaaaagagatccactagaggcgccagtagaggccggggagtcgaaagagaacaccatggtgctggtgaccgagcttcaggattgggagggaaaaagctggatggagagaaagcaccagcgacacggagcaggaaaggtgggcctgcagaatggatcaaaagacccaacagtaggagaatggagctcttgatcgaatgaagtgagacaaagagcccaagggtggaatgagaaaagaaagtcgaagacaatagacaatagacaataataattggaaggagtttggcaagcacgcgctgaaaacttggcgccttgaatacaaggcagtaattatgcctgaataaagtggctaacatattgataattagtgcctaaggcatacatgttctggactcacatcgatcgcagggaaacaagtcctcactgcgcactacacacgaccccattgcattttgaattattcatttatacgtgccccttctttcatgttaacaccctgaattcaagctgcaatcatgtcggaggggccgtccgatttgtctagttcgcatctagagccacccagcagaactacggaaatgcaagatccaggagctggcgaccacagtacttaacccttccatatacttgaatatttgtttgaaactgacatttgttatagtagcttctgaaagtgaagatgaacacttctcagatgccagcgaaggcaatcccgaactcctcccacaatctggtcgcaattcccctatcccacgaacgcgagtcgagagggttgacagcagcacccaacatggagagattcctggcacagcagcattcgaaaagagagagcaggatgcagttcctgatgaggttgaggttatcccagaaggctcggacagccagatgccttcgcctgcagacgaccaaagcttgagcccagaaggcttaccgtttccacgcacagtggttgagaaggtggacccagatgaacctagccatggcgaagtccccggaacattggcccatgaacaacgtcttgccgatgctgtgcccgacgtggtgaccaaggcttcagattccgagagcagcccaacgccaccagcatccgaccctacacttcctgagaccgatggatcttcaatagaaattcccgagacacggctcgagcgggtggacacagctcccgctgacgaagacctgccgccacacccacaagctcataaaagctcagcaagtgacgcattacccgatacggtagaaaccgtcccggatgtctcaatacatgatacagacctggaaaccaaagacccctcattagaggatgacatgaacgatgaccacggatatgaaaagcaagaagcgggtgatgattttgatgaatttgtagaagagcaggaagacatgggagatgatgattttggggattttgatgacggcttccaggagcccagtgcagaggaagcccccatagacgataccgcggcatctcagcaatctcgagcacccccacctcttattgacttcgacacatacacatccacctccgcactcctcgattccctcaaagacaccctcgacattctcttccccgaaacccaagacataagctctctcccccctgtcgagccaatccccgactccgcagcaatcttcagcaccgagcgatccctctcactgtggtcccagctcgtggcaccaccacccctccagcctcagaactgggtaaaatcccgcattcgccgactattcctcgtatccttgggcgtgcccgttgatctggatgagattctcccagcctccaaacagaaaaagctcgttcttccttctattgaccttgaaggcaccggcgcaaagagccccggcgctcgttccgctagtcaagtccgcaaagaagaaggtaacgacaacaccggcgaaaaggggcaagccccctcccgccagaaggctacttctcgccgcggcgcaccaccggcaccggagatagacctctcggcggtccgccggctgtgcgccactaccgatgctgcactgagtggtctcacagattcagagttgaggctgcatgtccatgaactggagcatgttgctcagcgcgctagttcggtattggagtactggctgaagcggcgggatggcttggtcggcgaaaaagaggctttcgaaggagtcattgagaacctcgttagtcatgttaggagggtcagaaagtagtctttccttactcgggcacttggtgtactatctgaatgcccaatataatatattttatataatctaatgtcgataccagagaaaatccacttatacctgcgaacttccctgcgtagactgcagcgtacgagaggacgtgtcccaagggattttaccccgtaaaagaggggtccacccccatcaaaagctccgacctggctccactgtattgttccaaggttgatcttgcgacctaggtatgtccttgatggctatcattgttcacgatgcccttgttctgcgagatacttaatccctccccctctcgttcctctctcaaaaagaatgcactgaagtatgatgacgcaataatggggggttggttatgcacctctttcagtagtctttttagccgtcttttggcggttttttgtgtatggatgtcttcttcccctcctaacttacctttctatgtatctgggtttctgccttgttcgtacactcccaagccagctcacatcctgccttcctagccgagcacaatacaacccaaaggcaagtatctttgtactcatctcatcaggatgtcaaacagtggtgtcactgccgctctatcttttccgtccgctctacctgataaccacatggttcgggtgtttacctctatgaaccgtctccgtaccgctgcaaatgaggtcttcgcatctcttgacaacaaacaaagcacaaaccaatggcttcttgttcttggcctccccacaacagtcatcaagcgcctcgacgaagaccgtaattgcctagaggcgattaattaccggttccaatggcaaggcaggagcggtctgataaaagtcatcccgacagcccaacacgaaatcatcaccacgagggttatgttctctgtgaatgacgctctcgctgcaatgggtctacactggagtgattcagaatgggtcggccatactacctacaagccaaatcttgccaaaggcaaacagcccgacaatgcatttctcccgccctcccgctgcacgataccactcagttcgacgggctggccaactcttgtcattgaattgagaccggagtgtctgaaagcttgagccagctccgcgcagacgcagcaaagtggtttgcagattcgaacggcgatgttagaatcgcgctggttatcgccatcaaggacagcagggttgacattgaaaaatggcaattggctccagaaggtgcgtccccgctggatctccaggtccccgacagccaacaaccatattgcgcccaggagataaccatcacaccacaaggtgttactgggactccccttgtcttgcccttcaatgctttgtatgatagagtcccgggcccaggggaaaccgatgtcctcatcacaacggcagactgtttgaagattacgacgaggatgtggtgaagagcacgaggactgtgtgcctgaatgacgatgttttgactttggctacttcccggtatggcttcgagggaaacgctggacgagttgatccatgatttatatttggtatttctctgtatatgctaggaaaaacgcagcatttatgtaaacttctctcgtcatggtgtttctaaatgtaatactcccatcagttcaaaaagcagcaatgtctgagggaacggaatgccgagaagtggcagaggaaatccaatacataggtatttatcttgatatatgtaagcaagttctagtctagtcacaacaccagagagctcaggtaacctggaaaataagatgggagttaaaaaatgagctagccgttgagtttcacgtgaagcattggataaataagaaaaaggcggacgcagccgtgaaaccagtctccctaacgccggagataacatatcataagagaacatggaggaaatgcatttgaaaagcacgcaataaggggtatcttcttttcaaatgcatgcaaagataaacgaaagacagtggaaggccaaggccgctagaaaaaaagaagaagggaagaatattcgttgaaaccccgataagctcattagtccaattcaataaccgtatgttcttgggtgcgaacagccgggctgtgactgccatgagatacattgttcctagggcgtacgggaacagggcccaaagagccttcagccttgcgcttcggagagaaggggttgtctgtcacaggcgagatctcatcagtgtcgtacttgggggtccaggttccatcgactttgatctggattgctctaatcccatcgagtccgttcgttctagcaagctgggcgtggacatcgacaaggaactgatcaacgaccaagaactgcgggcgtgcatctcccttgcagatcgggcagcgccagttatcgaccatcggtgtcgggccggatacggaatttctggttcttataaaagtgtcacggtcgaagcattcgtggtggaagcaatagcgcgagcgaacgggaatatcgaagatgcgtgccatgaaagggtccaccaggtcgatcgtgaggttgtcggtgaccacggccaaatcatcgtcatcggtggtaggagcaagacgctttttgatggctgcacgagattcggcagctgggacggattggatcaggctgagtatctggtcgaactcggcaacctccatgacctccaccccgaagacgaatttggaggtcttacactcatcctgtcctaagatcatatcgagccgtacgctgttttcgcctgttttgatgtactcggtaatgtccaaaggcagatcttttccgttgtgaacctttcggcgcacatagagctctttgtcgttcacgctaatatagaagacactgggccagaaagtgttcgcagtacaccaggtcttctccgccacagtgtccggattgccaggaagacgaatgcatcgcaggcgaatagtccggcaaccgggcctaaaggtccaaaccgaatgttggctctgtttcccgtgagctatgtgtgggaacttttggcgctcatcatgcgtgaaagagaaattccatgtgtagattggctggtcaacgttgacgatggttgggtgtacaacgaatgttttgagataggtaaacaaatcagtctcgatgtcattaccatccgaaccctgttttaccagcctcttcataggatcgcgaagatcaaccagatgtagaccgagacgcgttggatttggattcaccgtcataggtgctctgtagccaggtaccgggaagaaagcagagttaagcgaaggctggtgatgctgtccctgagccgcacgtgtgaccggtgaagcagacgactgcaaagccgtcgaatgttgtcggttatgatggttattaggcctttgtggtggcatcgggtgctgggccatgtggcttgttgtagtcggcgtcgtggatatggacgatggagcatggagcaattgcgctgactgtgtaggggtgagagcacttgattggagggaggggttagcaggcgatattggagtcattgttcgaccgtgtaattgttgactaggtatttgttgaccatgtgagcctggcagtgattggtgcctcggagaagatgctacttgtccgatcgatgtctgtatgtgcatttgcatctgtgggttcatatgtggatttgtatgcagatacatatgctgttgctgattcatatgtggactccccggataccaccatccgtgttcctgtctcggcccttgcccctgtggtatgggattgtaatgagattgcggggtattctgcatttgtgggtttacgccagattgatagggcccagcagccggtccaacaacctgaccccggggggaatttgagggaagctgctgcaaaggtgcaccaattgggcttggagcaggtgaatttgtggcaggttgactgacaccagcaaccgaagatctgggataggaaggtactcctggagtagcttgaggcatggctcgattctgaggtctaggaggtggtgcagagtgggaggatggtgtttgtggtgtttgtggtaggtatttaggcgggaagctgcgatactcttggacgaatttccagttgagagcctgctgagtggtcccgggaagtctagagtccctacacttctcaaaagcttccaaatctttccaaaataacttcagcagggcatccatgtctttgtcatggtgaaggtgccgtgcaacacacgtgaacatcaccgacatcaaaatctgagatggacaagcgagtgactgccaaaggtgagataccaacgggggatgacgagcctggtgcaagattccatgccattcattcgcaagccgtgctaaaaactcaggaacaccagacagcacctgaatgtaccagtttgtgtgcatcaactgctgtggagatgccgggaaatgggcaaatccattggtagcgccatcatgcatctttgcattatcatccagaataagcctgagcaatttcatgcccgcgttggggactctaatttgacccaatgtgcttgcatccgtgctatatcggcagtacaattgatgtatcaccaaatagaaagcatccttacgattaatggcctgctgcaacaggttaatccgaggccgaacaatagtggtctggctcaagtgagcagggggtaatgctccctttgcagacaaatcgtccaccaaggcattcaattgagcagaccattgttcccatgtctcattggggatagccgcaatcccagctcccacattctggagcggactaggtcgtgaccctgacactgcgtgttgctgtgtgctagtacctgtgcgtgtgtctgtgagcgagggggagtctggggggcgatccgctcccattcgagaggactgggtcacgcgttgtgacgcggtgagcccgctcggaggaggttggaccgccatgcgctcatcatcgccacgctgtgccgtgagttgtgtagagattggcggcagcgtggaaggtctatctgagatgatcgcatcggcgttgacgggacttgggtgagaatttgtactgagaaccggtgagggaagagccgtcggtcgcgtgtcgggcttttttgccgcatcaacaggaccacgtgcgggaggttgggttagggtctcaccaggcgtgacgggggacattaagacagtctcgctgggaagggatttgggagggactggaggatcaacctcaacgcgaggttttcgcgcggccgaattctccggggcgttagcctgcgggcccatccagtgtctccgcacgccgcctaagaacagactggcagtagtgttggactcctcaatatgatctgcactagcgagcgatcgcgatttaggtgataccatgatgatcgagtaagtgtctgaggcatcaggatgatttggaggttcctttcaataataaagggcgcttacaccgatgtttgattcaaagaatcccagacacctaagcgcctagagaccataataggaatggatccatgcagttgagagtgaaagcgcagtaagcagggggagatgttgcgatagtgacggtcattcgatatgtttgctatagctatcctatactcgattcctctggatctgaatctcaagtgaatctaatccaatctaatccattctaatcctctaatatagatcgggtggacttgggcaagaatgaccgggttcatctgcatacaaggcacatgtacttctgaagtactgtacgaaaacggacctaattgcccaggtatgttgctaattactattcaagctaagcgctaggtagttggtacttatagtgattgtaatcgcaatccctatattatatgtaatcgcagttgtgccacctctcagctcctctccctcaaccacgggaaagtctcccaagtccagactttcttacaatcgcacacgtcactctcgcctttctcttcgaatttgcgtcttaggtttgatattgattcaaatccgagttctgtcaataatttaccaatattcttggtcgcgttgaaaaaagaaaaaaaaaagaaatccaatctatctctacaaggtcgagatccttcgttcgtgctcccgagccccgcgagttgtttaacctaatccttctaatctcccgaatctctagcctttggacttctcacattctctcccctttctcttacccttccgccaaatcacattactcccgagtctcccccagtgggatacgcaattgcaatctgcaatttgcaaatctatccccaagggtgccatgttttgtgttggctcttgactaggatacacggaatattgagatggttaccatgggcccaccgaagggtgttcgtccaggcgacattctggaggttcttcgtaagtgacgtcgtgtgcgacacctcgatttctgtgactccgcgtttttcaggatgcgcccggcttctaacactccaaactagatgaatttggcgggcgcggagaagacgaactggtcatgttaccccgcgacaagattaaactgatcgagttggatgaggaatttggagatgcctggtactacggacagaacctgaggacgggacaaactggtctcttccctgcaagtatgcgccccttccccaggacccccccccctctcaccacccccgactatgatcccaactaatatttgttgcgcgacagactttaccaaagtgggctccccaagaaagaccctcgccgagtcgccagttctggtagaatcgccgatccaattggaatccctcgcgcgcccagattcatcattcgcatcggctgagagtggacagagcacccctcaagcatcgcgccacgttagctccgacgatatgcagtcaccgcaaatcagttctcccacacagcatcgatccgcctcgtctccgctgcctcgccccagcctggcggccgatattcagcaagcctttcgtggatcgatagacaatcatttgaacggcgaagaaagtccggtcatgaacgagaccttgagcgtcattgacgagcacatcacggatatgaacaccccacgtcacagcgtgtcgacccaggaacccaggacgatcaacgattccggcagcgagtacagcagccatatcggccacagggcttcttacatcaatggaaatgagaccgacgacgaggagcagagtcttccaaccgagcaagaggtgcggaaatggagtccaacacagacctcaagatgcttgcgcagccttggcattgatcaaaaacactgtgacatctttgaagaacaagagatcaccggtgacgtgcttcttgatatggatcaagattttattttcatgaaggagttcgattttggagtcatgggcaggcggctcaagacctggcacaaggtcaaggccttccaagaagagaccaagggcttcagtcagcagcaagccccaagaggctctatctcctccaacttctcaccttccgatgaacgtgcattgtctcgcgctggacacaccggaccacttcttcctcggattcctaccttgtcagaaaagaccggcgctggttatccacgaggctctgtgccggtgcagcacccccgactggccagcaacagcagctcccccatgacaccgcatacccctccgtacagccatgaatcaacgagaaggatttctgcggcatcgctccgtgatctcaaccaagcgcgtcgtcattcttccattgacgccacccaacgaggcatgcctgattcgggttttgttggtcaccagcaaaagaaaccctcattcgaccggtcctggactctgaattccggcccccaagccatgcccgctcgcccaggaacctccgcgggcactagtccgggtggcttccggaatggaccgctgaccgctgagtcagattcttacaactcctatgtcaccaccccggatcagattgaggacctagatcggggttatttctcgggaaccgaggttgattcgcgccgggcccgccgcgttctacagaaacgggggtcggccggtgtcgatgtaaacaatcagtcacgaaagtcaagctacgcagatgattcataccaagtgatatccccagcgaagcgccactctcgcattggcagtgtggactcgatacgtgacgcagcgaatcgtgtctcccccgcggccaaggcctatcacggcacgccaccgaagagtcggctgcgaagcttgagcacgcgcgtcttaacggataaaagtggaaccagctctcagtcgtcaaccaccgatagcaaaactagtaacggtggtggattcttcgccaatttctctcgtgtcggtggcaaaggtgattcggaaattcctcgcgcttcgccgttgcaattccagccactgaaaaatgccgggcccaagtttcgccgagccatgggccttcgagccatatccgacgttgctggaaagaagcttgacacatctgcgctgcctgattcgccgctggagtccgatcctacctctgctcgcactggatccacaactccatcggcgacgtccaagagctcggaacggcatagtacagatgggtctggtaaggccaccactgacggacagggattcgtagcccgtcctcgaacggccaagtctaagaaagagactagtgcctatactcggggtcttgagaagaagacaccgcaggagcaaatggatggttgtgactacagtggatggatgaagaagagatcttccaacttgatgaccacctggaagccccgtctgttcgtcctgcgcggtcgtcgtctgtcctattactattccgaggacgacaccgaggaaagaggcttgatcgatatcaccgctcaccgtgtcctacgagcagatcaagatccgatcattgctctacacgcaaccatcaccggctcaaccgcattacctgccaatgccaacaacaccgtggatagccctagcgggacgaaactcaccactccctcggtcatccaatcgctgaccactaaggacggcagtgggccgttcttcttcaagctggtgcccccaaagtcaggcaactcgcgcactgtgcaattcacaaaaccagccacccactttttccaggttgacaatgtccagcagggtcgtctgtggatgggagcgttgatgaaagcgaccatcgagcgtgacctaggacaggcagtggaaaccaccaacaagcaaaagactattagtctaaaacaggcccggctgctgcagcagcggccggcagatcttgttcctgcttcgggtagcaccaagaccgcgcagaccatcgatgaggaagaggaagaagcgggtctgcaaattgagggtttgaacctcagtcagtctgatgttaactctctcgaggacacgaacggcagtattgatattaacaacacagatgaaggcctcgaacgacctatctccaacccccttggggatttggataatggccagtcgtccttgcttccggatcctctagccaagacggaatctaagtgaacatttattgcggcctctattatttgagtgtgaccttgcttgcaattatgtgaaggacatattttgcccattcttgtttttttttttttttgctggcgtttgatgtgatatacccctcgctcagacttcttccctttgttgactcggcccaatttcgtcattacaggtactttggtcgccgggggatttatgtgggagtatgtgattaacttgcttatcgacacaaagttgactggatctgagcgttcttttctattaatcgcgattgcaaatgtagataatacaataattcatacaaccatccatcccatggatggctaattgcttctaatcctcatttccatagttcccaccgcccagtataccgccaagtcttagcactggcagtatatagccaccatcctactaacattgtatacaaacagcttaattgggatatctttgatactagatcatcaatccttggatgggactgttcaaaatgtcatgactataagttcttcttttgtcttgggtacttcgatcctatagcagatgtcaccgtgtatatgtgcgctgtctttatcgattagcgtccgcacttttgtttcttctccttttcaccattaaagacaactcttttcaatatgctgtataggtctttataacatttattcttttcctgtcattttagattcctcatgttcctccgctggctgctctcccgcacctttgcgctccttcttccactcacagtgatcgccactgtttacctctatctctacccagtcttcaacggatgcgcctttcctctaccacagtctacctcacggtcgagtgagcagcagctataccataattcagtgatcaacacacttctccaacaccttggcgtttcaacctcagactcaaacagtcaacctgccatctttagactcctagtcctcgcagacccccaattggaaggcgacacctcgcttcctctccccgaatatgaattatacccccgcattcagactcactggcgcgccatccaggaagcaatcgggaacgcctccacttcacctctactggacgaggacgtcctctcaaacattacaactggtctccagaccctcgcaaccgaagacatcccacgcgccttcaaatcaggcctgaaacgcatcgacctctttggcaacgactactacctcgcgcatatctaccgcacactcttttggtggacccggccgacacacacaacggtgctgggcgacttagtggggagccaatggatctccgacgacgaattcgcccggcgcagacaccggtactgggaccgcgtgttccgcggcggagagcgagttgacgacaacatcaccagaaccggtgctgcgggttggagccagagcgaaggcagcaatgcgccgccattagaacccctaggcgcggatcgggcctgggccaggcgcgtgatcaacgtcgcgggaaaccacgatattggatatgcgggggacatcagcgaggcgcggatggagcgttttgagcgtgcgtttggccgtgcgaattgggatgtgcggttcgaacacccgcccgtcttgtcctcatctgggtctgctggagaccaagttgttacccctactctacacttgattaacttcaattccctcatgtttgatacccccgcgctttctacggaggttcagagccatacgtattcttatctgaatgagcttatcgccgatcgagtctcgccggtcgaggaccgatcggcttttactttgcttctgacacatatacccctgcacaaggaagacggcgtttgcacggacgggccgtatttctcatttcgtgattctgacgacaaggacggtcccgacggtgtgccccggtggcttaacggtggtctcaaggagcagaaccatctcagcgacacactcagcgctagcgggatcctgcaaggcatatttgggctgagcggcgatgagaatgcgcttgctggtggccaaggccgaaacgggctcattcttacggggcatgaccacaccggctgcgatactgtccatttcgtcaaccgcactgaaacagtcggtgacgacggttcgcctcgatcttgggagtgggctgcgaagcgcttcaatgagagccagcacattgacgacccttctatccgggaggtgaccctccgctcgatgatgggagagttcggtggtaatgccggtctcctttcggcgtggtttgatgaggtcgctggcgaatggagctatgatatcactatgtgtccagctggcgtgcagcatatctggtgggcggttcatatcctcgtgctagtgacgctaggcgtggctctgcttttgttcttgtctggtaatgctcagccgaagacgactacttgtaacgtccagtcagaccagaagacccaaaacagacagaagaaataattgggtcgtagaactgtgttttcctgtattaatagcattggatgaccgagcgtcttgcatttggatacatatattgcagactagtactccgtatatattttcaaaataccctcaatcagatatagaagtgtatgagttgacctttgttggagtcatgccttgttgtacagttgcgtagagatagatccgtttacagaaggcatataaaggacctacgaagggtctacgtaaagccattggtggtcatatcagagttcatatatcggccaaagaacaaacaaccaggaccaggtccccctcccatacagctcgcctagagcctctaggccagccctcgaggtaatgggcaaggcgttgcgaaaggatgtgattattttaaagtaatacttccgagagtcgccagcaaagggagggagaaaagacgaagatgggggatggaaccggctttaaaataaaaacagttggatttcgtcaaatggacaccacctgtccagctcccattttaatcctatggtctcatatgcaccgcattccaggtcccaagcagatttgaggtttggtatcgttctttttctttaaaattcgggttttctctctttacataacgacaccggagttggaggcaatacgctggaaaagaagtgttagctttttgaatgagagcattcgggaatggaaaaggaatccatttcccatgtggaagtgtataacgtacgggccagagctcagcagcttcctttccgacgggaccggtgatagcggaacccttcatctcacccttggcgttgacgataactcctgcgttgtcctcgaagtacaggaagataccgtcggggcggcgccaaggcttgctctggcggacaaccacagcgggcatgaccttcttgcggagctcgggctttcccttcttgacggtggccatgaccatgtctccgacaccggcagcggggagacggttcaggcgggcaccgatacccttgacggagatgatgtacaggttgcgagcaccggagttgtcgcagcagttcatcacggcgccactgtttgacgaaaatagacccgttagtaaattgttctagatcttgaagacgtcgtgttttcgaatgctgaaagtggagatccaattttcttttcctttcttcccgccgatctttttcgtttgttgcatggcgagtgttttttctgatgacgtttgatcgactgaaaatgacatgtgggatccggcgggcaagaaaggcgcattcgaaacagactagacgataagaaattggtagacgtacacaggcagaccgagagtcatcttgagcttgttgccggcggcaccgccacgactgtttgatcgttagtaatttcctctttgtcgattcgttcttttcccaatccgagccccattcgatcctctcgacacgaaggtgttgtgttgcttgtcgcttgcaaaattattctgtatcggttcggaatcgaatgggaccacgtagggaatcgctggaagactcaccctctcttagacatgatggctgatgatcacgggggaagttggtgaaaaaggttggcgacaagaggtcgaacgtcgaggatctaaaccggaggtgtgctttctcgcttagtgggcaaagtgcgtaaaatcttggcattggaaggtgattggctgttcagacccatcagctttgccctaatactaacccgatctgggatagtgccaaattttaatgcctgaggcataaactctatacttctagggttcagatgttgtgacgttttgaaagattgcatttcactgaatagtacatttgcaaaaaaaaataggtgaaaggaaaagcagatagcacagggatgaagataaaatatgagatgattcattgaaagtccataaaagcaacccgccatcccctgaaatatttcgaggttaaacctcgatgtgagtctgctacgagtaatgccttcccagtgccaaacaagattcgagcacgctgttaaaccgataacacctttctgccattgtccgttgcgccagatccgatattgtcgtctttgcatcacagctgattactcctctttcttgggttctgtcttgtgttccaagctctcttccttggtggccgttgcctcggtgtccgcagtaggagcagaggcttctgcagtcctctcaagggtagagtcggtagcctctttcgtaggggattgggcccgcacaggggaggcagtggagccctcggtcactgatttctcctcaataactgacgcttgagccggagcttgttctgatgtagtagcttcagggacagcagaagcgtcctccatggtagtatcttcatcatgagggggaggagactggtgttgagaggtagtagaggcttcatgctcctcactttccatagccatgttatcagcatcagtcatgggcgtttcatcagcgtgcgaagcttctaaggcggcagaaggcgcctcgggttcagtgcgtggggcattggccatcttagtatcaaggccgaaatccatttctacatcaaccgtagatgagccatcttgcggggttgccatgccactatccagcccggagtccggctcgagatttcggtagttgacttggttgcgacgccgcatgacgcctggttggcgacggataccgttggcggcgttctcgtcttcgtcctcgctgtcactgagctcgccagtcttttctgtgcgctggtcgaatcgtcgttgtgtgaaccgcttgtctttgttttcatcctcatcgaggtcatccataacgtcatcagcctcgtcgtctatgccacccacgatagggttacgcggtacatctgtcatttgaaccgaaggagcaaatgccgtgcgcttcaggttttcaacaacctggttgcaaatcttgtccaggtattctctggtgttggcgttgtccatgttggaggggcggacatcgagctgataatcaggagcgaagtactaatgcaattagtaagtgttatttgatctggaagatataagaaacttacctcatagtagtcattgtatggcagctcagatcccaggggctgtccgacaaggataccggtctcataagcccatgttcgtgcaacgttgcgcatggtgtagccaccaccgccaacaaccaaggttggcagatcgaaactcttgacgaagttgacacagttggcatgtcctcgcatactcagattgaagcagcccaagcgatcgccggatagactgtcaccaccgcactgaaggaccacggcctcgggacggtaccactccatcacgctcttaatgacaggctcaaagatgctcttatatgtgacatcagtgatgccatcccggagaggaaagttgactgcgtagtttttgccctgcccgacaccgatgtcgcgaagctcaccagtaccagggaagtactcgccgtacttgtggaaagaacaggtcatgacgcgatcagtcgtgtagaaggcctcttcgacaccatcaccgtggtggacatcaatatcgacataaaggactcgctgtttgaagcgcagaagctccagaattccaagaacgatatctacatagatgttagcttctgagacagatgcttggagaccaagggactataccattgacatagcagaagccactcgcttcgctcttcttggcgtggtgaagaccaccagcccagttgacggcaacatcgcatttgttgcggttcagtcgcgcagcaccttccatgctgcctccggcgctaattccacagaactcaaagagaccgtcaaacacggggcaatcgtctcctacattgtaccggctctgttccttcacgaagtggtccatattgtccggtgtgaccttggacaggaagtcgatatattcgtcggtgtggaactgggtcatctcgtacttggaggcaggtttcgcacgctgatttattagtgcaagggtcaaacaaataaaaataggagagtgctcacgtagatctccattttcttatagaggccatagttcatcaccaagctgtgtgtcatgcgtatgcgatggggcttcatggggtggccggatacataggcatagttgcccacatcggagtcgtagaagtaagcgactttcttatttttagacccgagaagcctatcagagataggttccaaagccatgttgcagagagcgctgatgattcacgaggttgagagtggaaaagagagtggaaaaagaagtgaagttcaagaagtgtaagtgagatccggggaatgaagtagcgaagttgcaggcgcaatgcagatatgcacccaagaggttgaataggcaacgatggcacctattgtcaccagatcccgcaatgcgaagattaggtagcagtacttaatcacaatagcaagccaatgtcattgttcacgctattgaagaatagattgaggagagagattcgcccgcgaaggagcggaagccgaccgaaccacacaccgccttcgtcaggcaaagctcccacggctttgctcatcatcacttaacacgtcttcgacaaccttgttatcttctcgctaaaatcacatctgtcggggattttcgctaatttgtatctctctttgaacgctgttccggaaataccaagctactagagacaaatcgatttgctccggagctcccaaatagcgatagcttcgtcctctctactctcgtttcatcaagtcttgtcggatatctcttaactatggatcgtcttaaccggatgctccaggccgctcaaggcatggggatggggggcgctgctcctggtggtgtaagttggataagactaatctccttgttggaaggcattaatggcaacatcctagcctagcttcaccacgtttctctacattgactaatgagagccgttatttaggatactccaaacctgatagataactcagaaaccgtccacatctcctccttggctctgctgaagatgctacgacatggccgcgcgggtgtcccgatggaggtcatgggcctgatgctgggcgagttcgttgatgaatacacagttcgggtagtggacgtctttgctatgcctcagagcggtactggagtcagtgttgaagcagtggaccccgtgttccaaactagaatgatggaaatgctgcgacagacgggacggtaagcctattagctggtatataataggggagtcctccatgctgatgatttcgtacagaccagaaactgttgttggctggtaccactcgcatcccggtttcggctgctggctctcctcagtcgatatcaacactcagcaatcctttgagcagctcacaccgcgtgcggttgccgttgtcgtcgatcctatccagtcagtgaagggcaaggtcgtcattgacgccttccgtctcatccaacctcagacagtggtgatgggtcaagagccccgccagactacatcaaacttgggccacctcaacaagccttcgatccaggctctgatccacggtctcaaccgccactattacagcattgcaattgattaccgtaagacaggattggaagagaacatgttgatgaaccttcacaagcatgtatggaccgaggccttggagatgagtgacttccacgaggagggtcagcacaacgtggagcgcatgaagcagcttgttctccttgcggagggctacgagaagcggatcaaagaagagacggagctgagcaaggatcagctgaagacgagatacgttggcaagcttgatcccaagaagcgtatgtttttcccaagacccccccccccccccaaannnnnnnnnnnnnnnnnnnnnnnnnnnnnnnnnnnnnnnnnnnnnnnnnnnnnnnnnnnnnnnnnnnnnnnnnnnnnnnnnnnnnnnnnnnnnnnnnnnnnnnnnnnnnnnnnnnnnnnnnnnnnnnnnnnnnnnnnnnnnnnnnnnnnnnnnnnnnnnnnnnnnnnnnntgatcccaagaagcgtttttttttcccaaagcccccccccccccccaaaaacatagactgacgctttgcagacatcgaggacgtaagccaaaagttgattgaggataacattgttgccgtctcgcggcagatgattgacaaggaagcttcggtggcacggcagtcattcaaggaagacacgaacggtgctgccatggaagttgatgaagatctctaaagagttagaaaagggtgccaatcaaaccgcattaattatttctgattggttggactttatgttaccaaaccagaccaacagatgaatgaaatctactcgaattttcacataataataagaaattcattgtcaacaagaatggcgcttggcctattgttggaagtaagtgtacctataattctgtttcatgggatctatgcggcgcgcaatatatatatatatataatcgtaacagtatgaataatatccaccgaataatgaactatcatgactccaacttgactgtctgaagcgagttgctcaaggcttcgagaacactaggggagtaggcccgtaggccatcaaaggcaacatcaacgtcattgtgctcatgtttctcgtgagtgtcgtattgagtgtcgtattcagtgtcgtattgagtgtcggtccagcctctatcaggaccccaaaggacctttttctgagcatctcgagtttccgtaagcaagcgagtcatcaaaggtccattcttttctacagagggccaggcatcgaactcaacctgaactagacccggcagccgttccaaaatttgatgtaacaatttgccacagaagttggtatagtaatccttggagatacgaaagccctcgaacacagggtgtgaagggtcacactgcacaaacactttcaacgtgcgcacaagctccatgtcgtgtaagcccaagccttggtttacaacccatgacttcgggggtgcagtccagcttgatcccacaataaattcgattgtggtgatcgaagagcggtggcgtggaggcaaagcccggatcgtgggcatgcgcaagaaatcctggatgggaaacacacggaaggtctgggttgaatagaagtagtgagtggcttcgtcgtggatttgtctcgagacaaggaacagggcgatgcggtgtgagaacggcgctagaggtttgctcttcttcgccgaagacccaacattgccaccagtgcgtttcgatgcactctttcgagtcggcgtgaataggacaagattataaatgcgcaggcgaatctcagacggtagatggaggaagggaaattgcagtaagatcggaggttcagcgtctgtttcggattcggcgtcggaaagttgctcctcaaaacggagcatgttctttttgaaccccatgattgaaaggtatgtagatgaaatttatgggatacaggcgagtctagatttggacaggaagatcatatttctggtaaacaggtagaaagagaagaagaaaactaaaaagatttgtgtcccacgatcggagcgcagcttcacgggtaaatcctttgctgcgctcttggtagtgggaatgaagaaggtcttcgttggtctccccagctaatacaacccggcatgcagagagaagttgcttgataggtcaaattaatgtctgggtgaactttctgaagaagaaaagaaaaaaagaagaagactcggtggccgaggatgtcgatatataaacaacctgcacggatggttcgggtccaccgccgtaccgaatcgcgccgacttttaacgggagaccgtggtttatcccatcattcagaacatatttgtttcaacccaatacacaatgcttagtcgtgcagtcttgcctctaacgaggccaaatgccttcgcatctgccgttcgggcatcaaccctgtcggcgcggccttcgttgtacgctgcctacaagctttccccgggtatccagctaagggcgaagtcgaccaaaccgaagtcgaaaacttccaaagcagctccgaaagatgctccgaaagacttcgacgcagagcaacccgagtttgatacaaaagctgaacctacacaaccttctgaacctgtgaggcttctttcaactttccattgaaaggaatccctctgacgttgtctttctaggtcgaacaacccccacagacgcctcttcccgatctgacgcaaggtattccatcgacgctagccgcagaattggaagggcgtatgaagaagggaccattgaatctcacagaagaccctacccagtcagaagattatggcgcggaaggcagaggtggtggtgacatccccaaaggcggatatgagacatccatcgaccgccgcaaggcccgtatggccaatatagtatacgcagtcatgttgcttggtggtgtcgctggtatgggctatttgggtcgcaactgggaaaccgaagaggagcagcggcaacaccctgagattccgtcgggatggagcccgggtctttggtacagccgtatcaaagcccgcaccagcgatctcaccagctattacaaggaccctgctttccccaagctgcttccggatgaggacgccgagatgcgtcagccatacaccttggtgctcagtcttgaggatctccttgttcacagcgaatggacccgtgagcacggatggcgcgttgcgaagcggcctggtgtcgactacttcctccgctacctgaaccaatactatgagctcgtcctgttcactagtgtgcctagtatgatggccgaccaagtcctacgcaaactcgacccttaccgcatcatccgctggcccctgttccgggaggcgacccgatacaaggatggagagtacatcaaggtatgtattcttctttcccccccagtcatataatgctaattgtctgataggatttgcaatacctcaaccgcgacctttccaaagttattctcatcgacactaaggaggagcacgcccgctaccagcccgagaacgccattattcttgacaagtggactggagacccgaaagataagacgctggtcgccctcatccccttcctggaataccttgctggtatgggtgtcgaagacgtgcgtaccgtgctgaagtcgtttgatggcactcccatccccattgagtttgccaagcgtgagaaggcgatgcgtgagcgctttgagaaggacctcgccgaggagcagaagaagaggccctcgcgtggtctgggcaactttgctgctgcacttggcttgaagtcttctgtcaccctgaacggcgaacagacaccctccgagggtctggcgcagggtaagatgctctgggatcagatccgcgagcgtggtcaaaagaactacgaaatgatcgagtcagagatccgtcagaacggcgagaagtggctcgctgagatggcagccgaggaggagaaggcccgccaggagcagatgcagagcatgaagggctctttcaccggcatatttggtgctggctccaagaatgagtaatcggcgcaagccaattacttttctcctctagcagatcatcaggggtctgtttaatgaactagtgtaaaataggtagggtttggggttttggatttttgtacaaaattttagtcagaaattttaatatgagaaagactgagatttggactgatatcgaggtcgttgggctttggatcccagggtatattgttgaaataggaatctagaaatatatgttcaatgagcttttttgatcatgtcaggttcacatcttggaagacggagacatcccatattcctgtcatatcaaagggaaaaccgtccatcgttccaaaagtattcgatatcgacatcatgtcgtcaacgatatcgttatttgtttgggtttctggcagcgatattgcggccgggttgaccagcccgctgtctgccatcgcggttgtgaatgcctggtccattgtggcaccagttccgggaagtcggtgcataatgcgttcgcagtggtctaggcacatgtctgctacatcccagtcttcttcttcccgcacacgacgcaatactgagcgcagggtttcgacgttggaaagacaggatcgtgcaacatcgctatcggtggtctcgaatgcacaacgaactagcaatgtcgccgttgacgtgagatgaaaagcgctatctgtcaagaagattaggaacaaaaagcgatgtatagaaagaatacttcaacttacagggtagccagaactcagtgaaattatcttttcgcaaagacgttatgaatccaacaatctcctctgcagaccttctgcattccgtttggaaatagcgacgtgcctcggtgttttccgtttcagagttgttgacttcctgcgaggttgttagaaaccatcctttcgattttcccgctcctccggcttacatttagttcaactcggctgacaagcattttgacggccaagaaagccagttgcaagctgcttgctccatatatccgttccccggtatggattgtgggtcctctcaaccagtccggtagtgagtcttcccatatatctaaatctgttcgtatttgtctaagcttcttggatgtctcgcgtgcaggtttgtgttgcaacccataaaccagtggcaacagctcgcctaaagtctcggtcaaccggcataggtagatgtgacagtgtgctgctctcacacgctctgtagtgcggaggtttgatgggactaatacctctacggtgggtagaggcacgtcatattgatttttggaaatctggggtgggacaccatgaccaaagcttcccctatttattgtcaggtttgttgcaagccaaaagaaaaaccgaacgagcttaccaacgatcgtgaatcacaaccccccaccacaggcgaatccgctggtttttttctgcttgtgagagcttccaattgctaggatcacggttcaagccaaggcaatttgccaaagataacatgcggccacagctgacggcgttgccagtcatggagaaaatgggtcttcctgttaggtcgatcagcgcggcgctgattgtgtccaatccgggtgctgagaattcctcatgcaacgcggcgacagtcatgttgatcgcatatcgtacgtcgggcttcggatgacacgcaagcttttgggtgtgtttccaatatacgagggacatggaatagacttgacacactagtgcagctggtgggtcgtgcaggtcatcggcgatgaatgattcccagaacgattccccgtcaaagattggaaaagaaacgttaaaacgatcaatgaagctagagggggaaatattagcagggtagaaaatggaaggaaaggccaatggtcaacatacagtctcactaggtcgtgtttgaagggcccgagtatttgttcgagtacctccttctggttctcaccaggaggcgttcctttccgcatacctttccttcgccgggagatggtggtgtaaaggactggtttccgtgggtcgctagagtagatattgtacgggtggctgttgggctcttccgattgactcgaccgctctgggggcatatgcttttcaatgacttgggcatcctcggcaaccatagggccaacaatgagaactgactcattctgaggatcatccatatctttccgccgcagatcactttctcgacgaccacccgacgaagtcgttccatgggggctcggcccatttatcggctgccggggcgggttattttggcccatgtgggtgagttcatctgaactacgtttacgcttatgtcccggcatggcctccaacgatggaggccccggccaggatttccggtccgcgccactcaaaaccgaagcatccgcgttggcttcctcttgatagtgacagtcggcaccttgaacgcgacatagaagacaggattgaccggggatatcgacggtacatcgagacttgcgcttgcgacacaagtcacaggcgcggaccttatgggaacggtacggtcgggcgccggcattgaatccgggagatggaagtttggacgaggaattgacttgaactggtgcaggcgacatgatgtgcacccaagtatgaggcagttatgccgagggataatacggggaaagcgaagatggtgatttggagattttggtcggggtgttctgggagtcggccgattggcggttggacaaagtgaggggtatgagcacgaggcctgcaaggtagggagaagaccagatcggaattgggagctccaaattggctggaaaccgtacacgagatgtcgaggctacatgcacatcatattgtgcaaaggaggtccccccagatatcagaatccggcgatctcattttcttatcaaaaattgaactgcgggcatccatggatccatgtggggaatgctgactcatgccacgtgaaatcgctgacataatgactttctgcctcaggcgcgttctatttttatctttggacttggcgtgcgtagacaataatgcaggcgatcgacatgagttgtttcattgacattggtgtcccgcattgccttatggggcaagaaactgcacagccacaaggtcatctttttctcaacaatgtccgcggcgagcttgatctgttgtatgtaggtcgagagcggtcatcatggtggatacctcccctttcgaggactctttcgtccatcaagcgggctcttctgtatcgcccggcctaaagacatactttgaccggctaccacttaacgtgattgagcagtaagtttctatctcaccaggtagtcgcaaccttgtgttcgtccgacatgtggccttacggtcagtcattgactgcaattctgactaagtcaatagtatcctgtatgcgtccgatgccaatacatttgcatcactatctctgctaaaccgaagatggaaacatgcgtccgattccgcggcattgtatgcctatcaattgtctcgctgttcatcattttcctgggctcgcggggtcatttctgaggcagaaaatctgactaaactcaagcgccaatttgttaagcaggtcaggcaaaacgcgtttgatgcatttttacggcctcggcaaactctcctgcgattaatttcaagttctatgagctcgtcgatggccttcccacagggtgaagtttttcgattctcattttcaggaaatggtcaaatggtgctctgcatcagctcttctcgcattgtcatactagacgtggccaccgacccagtcgccgtcaaacatgaacttataactcgaaggcggcccctaagagccgcaatccgtgatgacggctctctcattgccgttttgtcctccacgcatcgagttcatatctacaagctctctgacgatgaagccaagcacattcgagttatcactctggatgatgctccaagatatattaaattctctccatcaggtagtgtgctagccttagcctttgaggatagtattgaggtatacgctgtggctgaagaggctttgtcgaccgaccgtcgggcggtgcgttgtcaccgtgtcgatgcactttcattttcgcctgacggatcgatgcttcttggctttacggctgaaggtatcgtcaccatcactcctccgttttataccgagactggaacggatgcctcacccgaagaactcgagatgcgaatgtggacaacacaaattctcttccctgagacaattagttgccctatcactcacgtctccctgattgctggttatgaggaagccgatgatcactgggtgatgggatatgacaaacatttgggggcgttcagagcaatccaattaaacaagaatgccggaatcgtttatttcgccagtccattcctcgcagatgaatctcgggaaatgcaaccaagcatgagacccgccacagatgaaactggagagctttcagctttagggttccaagattcagaactgtggatatatgggatgcctggcttgggtgctagtggaatcactgatacccaggttggtggtgatcatcattatggaggttgcgcgcctcgcgacaatctagcacagcttcagaagatcgttcaacaacctaagatcttgatacgggggcggcgggtgagtgacatgcacgggatcacatccgctcattgggtacgttcggattcaaaatgccgtcggagactagtcgcggtagcacctggtggtgtacgaccacagaaccttggccgagaagatattccagttgatggtggtcgaatcctcctccttgattttgagcgctccaccatgaatggtgaaacgactgagcttgacatcgaagttggagaaacggcacccaagattcttatggagccggactcctctttggccacggaagttgagcttgaaagaaggcgaacacgactacatcgtggcgatactgctacaagattcgcggatcttggccattcagcgactactcgagaatcccgagctctgccacttcatttccgccgcaacagtctcgcaattcctacctcgccaagcgagacttctcccggcgatataatcgaccttccatatgacaatacgcagcctcgttccagtgaagttctccatcgagctgccactgtggctgcatcaacccgtgggcgatatgaccctcgatatcgtaattcccacgcccctcgacagattccccatgagagtgacgccgataactgggtgccaccccctcccccctacacagcggatccattgccagatggtctaccgagaacgcctctttccccagtcaatgttgtcgattctgtcccccagcctgaaagagaagaaaccgctcgtgtcgcgcagcatccaacccgcccacgtccacaatctgtcaatctacaggggctcggcggtatgactggcgccaggcgcaggggaagttccatcggcagagacttcaacccagatcaattaatcccccaagattctttcacaaacaacttcgcaccacaacagcctggatctgccttaaatccacctacagtgatccaacctaccacgcctacgtttgctgtgtatccatccgaaccactcctacaagagagcaacatgcctcttccctacttgaggtcctcggcactgggcgatgcacttggcgatgcctactttccatactctgtgtcctcgccaaaccttctccatatcccacagccatatgaagacgggcagggcactgcagcagatgacgagcatgacgtacctgagaggcaacggtctttccacaggcgagtctcaaccgaaccctctagcttaccgccaccaacgaacgaggaatggcgtcggcgcattcaggattggaacgataacacaattaaggagcggagccgtaagcgaagggggaagtgcactgtcatgtagcctgttttaccatatatccaattttcccgtctagaataactgtcaaattattaaaacaaatatttgtttccagcataatagtcatatcttaccacctccctctcatccgaggtcaaccgctgattcgttcgctcccaaatcctgctccgaagtcgacgtagagggtgctttcctcttgtagcccgaccttggaaagaccacgccaggacctcacccaaatgtaagtgaatcatcgctgtagcccgttggtggaatttctcgtatgcatgttgcaatctttccctcggtttctttgtgccgaatctgggctaattgccgcatcggggtgactggaggggtgtgaaaagtgacgcctgtactacgctttgaatgccatgagctctgctcggtcaaccaggagggacgaattgataaactcggttaagttctcctggttcggcatgattgctccaatcctatcgtttgcgtagagggtctagagccacagacgccggttggaccatcaaacagcactgggtccgagcctctcttgcatgacgaggatggttcttgcagatctccagtctcttgttaatgctgtgagaacaacaagcattgatactgttagtcaaggtgatcggaacccgatcccattttgtcgatgttgtcagtataatctttagctggcggcctgactgtctccccatcagcaatcgactttgccattttgttggcatctaatagtagccttctctggctgtaatgctgagttcttttaagacaatttacatattgaagataattatgtctatagtatcagtagatcactcctctatacacaaagggtctttggagaaaagcctgtgctgagtcgatcctgccagcttcaactgcatgtttcctttccttcttgagatctaccaccattagaccacagctgctttttaataggactacaagatcaagaataatcacaacggaacaatattattgaattgaccgaggtgaagaaagacaatcaaaaatcaacaacaaaaaggctatgctttgtggggtatcactgaaacaacaaaaaaagatcccagtttggatctgtacaaacaaaacacaaggaacccacacaacgcgcatgctcatcccagttttaatatccccttgtaccatgtcccatgtttcatatcccatcatgatccggagaccatacaccaaagccggagtttaaccggtaagaaaggaaacactgggagcactgatgaatcgatggaaggagtcacggaccctggaaaagctagcagtcagtaaatggaaatacaaagtggagacgaccataaaataccagaattttcttctttcttcgaaatgatagttgtttttgttggttcctattcaagggcctcttttcttggatgcccgaggaggatgaaggtagaaagtggtcccgaaggttgtcggaatgtctgtccaggaggcctattccaaggtctgaatggaaggaaacgtatcgagcaaaattgatgatggacgtgaagaggcttgtccagaaacctgtttcaaggcccgcggagagaagaaacaaaggtaattgaatctgaattgagtgactgatcctctcttgattttgttggattgacgtagaagcatgctggaaatcaacggtccgatatatggtcatggcgttcttgatccagccaaggcttgtcccatagcccagtgagaaaccacttaacctgagttgaccggcaggtggtgtggttatgataagctgagatcaaattgtttggttttctcccaatttccgtccaactgaagccgtcccgtaagctcagtggaagtctttcttttccaggtaatcaaagcctgatctttttgggaaaactgactgttttcatgtcggttgaatgatggatgcacatgaatgaccgtggggtcaagtggttggagtatggaatggcaggttcggtgattgttgtcctgcaaaagaataaggaatgaactcagccaagacctcgttaccaagaggctgtggcgaggaatgtagtacatggaatagtgttcacagatagtcgatgtgaacccaacaggattggatttgaaggcatgcgaaagacgatcaagatgtgtttttaatcgaacatctctccaggaggtcatgaacagcccgatcgtacgagattccgtttgattgttgatgcagccgagggcgaacgacactggagagaagatgatgataaactcgaagagggtaagatggtcgactaaggatgcagtcggctcgccgtggataaggattgaccgatgcgacttctgttcttcgatttaatggtcgcgcccttggactgagcctcaattggagaatgaggcacagcgaaggaatattttgcaagggtggccgtggtcgagagccgaagaacagaaatagaatggacaaatcccaaaagtgacgtgtcgcaagagagatctctcaccttaagtgaaggtgagaaatgaagtgagagtgaggtgaggccagatcttttttttgttgattgtcatcatttttttctcactgtctctttttttttgtttttttttgtttttgttttttttttcttgcatattggtcagtcaactcaatctccaacccaaataccatacgaaaagcttctgagaacgctcaacgcggccccaacacagcattgtaccagcaaacaaaagcgctgcgggacagccaagaaggacctaaacaaccctccgaagagaggagttccttcgaggtgtcccactcagacacttttgcggctggtacatgtcccagcttcaccgaagcgtctaggcaggacgctgtcgacggcgacggccgcgggactgctggggaaggacatcattgggcgaagtcgtaccacagtccgtaggagtatcaatgcccacattcgcgaacaagggagttggagagagaggaccactctgcggatcaccctgctcctccagacggccaggaacgaagaccggagccacagccgacaaaggcgtcgagctcgaagacatcgcaagagaagcactggaagcgtaagaggctaaaacattggaatgttttagttccttcttttcctgttgtgctttctttgcatcgcgacgtctctttgcttgcgacggacggcatttcctcctgtagtgccgcggggtggaaacaggacgctcatcttccgcaccgttaccagtcgattccgcagccggagcctcagaatcggactggtcggaggcgtagatatcactcgagttccaagggtgccgagaaaccaagttcgtgcgagcgtcatccgtagtgttaaccggtattatggaatcgcaggccgattccgggtccagtgacggctcatctcccaggcctttggtgatccggtggacccagataccggcaaacagagagagaaccgacacatgagacacagactcgggacaactgtctgcagccatgacccaagcaagaatttcctcatccgtttcagtcgggcccgcgagcagacgatccatctccctttcaaaggaagatgaatcatcctcggccacaaattgcacacgtgcaatctgcggttggccctcgagagccttcagagtccactcaatcaaggtttcaagaccggagaacaattgccgtgagtaagcaatcaaagcccaggggatctggacgaagcaccatatagcgataaacaacaacgtggcgacgaaaccttgcccgggtttggacctaggcgagtggatgtcgacaaactccttgggatcagaagatgtcactccgtcgcttgaccaagaggaaaccgggatgggtaccaggaacggggttggaaaccaggacggcatatcatcgaccagctcaggccggacgatgatatccgtaccaaggaaaagaaccatgtccgtcgagtttgaatacccatggccaacgtgagagcgcgactcccatacaggatgctcgcgccgggaagcatgtccgcactcggaggcaacaacgtgaaccacgtcacagaaggcccaagattccatcgtcagctggaacgtaccagacagacgccgcacgaacgactgccctggaacagtgaaccccgggatggggaaccactgactccagagagtcatgcccacgaagatccccaagaagggaatcaacatgttgaaattttttttttctgcacagggaagacaaaaagattagcagttttgtcaacagaaagagtctgagatagaaaggaattacttttttaaaaataaaattgaaaaataaaggccggcgaggccgaggacgcgggggaagcagaaaggtcacagcgcagggggcgctgttggaaagtgtgttggtaacttagggagagaagagagagagaagaaggaaagaggaaagtgaggggaggagaggctttataggaaatcctgggaggtccctgggggctcaaacggaaggtgcctgcccaaaagggaaggaacgatggacacaatgggcacaatggcacgtgtatcccccattgtattcacgttttaggaagtggcgactaccataaaaggactagtagcccagaaagcagcccagaaagggactagtagcaacctattgtcccccagggctgacgattgagcccattgagcccattgagcaccttcaatttagaatggctggagctaccgaaaagggactagtagactattcagccttaattttgatagccatgccaaggttccattgcttcaggctctaggttttcgtatttgtattcgtagatgccagcttggatcggtctcttcgttgtagaacttgcagataagtattaacctcacttgacacttgcactagagagcaactgagagatatgtacaatgctatatacattacaggtatctgtagtctgtctggtcaaaatgtcaggctttggggggcaggtgcatgtctcatgactctaggcttttgttttatattgcaggtacactgaggcttcttggctgtctaacctctcactttagatagcattatgatcacgagatctgatgttaactagctttcattttgccttcatggtatactggaattgtaactattcgtcgtcaagatggccatcgcattgatgtatccccgcgaggtgacatcgtcacctcatatcagaacaccaggctttggagagcattcccaactcactcaaaacgagttattaagcagtgcttgtcagatttcagtacgataacgcgccggttatccagcttaaataccatacgaatgttcgagagactttacaatcatgacggcctcactggtctgtctccgtcgtgcccaaaatcgtcgtcgatctgaaaacccctgctcctccctccacgagtcgaatcacaatcacattggaaagtcctatcctcccggggcctgcggggcccatatcaagcgagaatatgatgatatggatcgagatgcaacattgggggctgtcgagctcttcgtccgacacggcttagaagtccaaattcctaggctcgcaggactctactgtgaaatttgcagctcatcatatcaaaacgacgacacgtgcaggcagcacacgaaaccgatatctaccatctcgaccgagacgacaccttcctacacattttcggagaaggtaggcaagactgaagcctccacacaccatcatcgagctaagcaaaagccccaaccgtctaaagaaccggctactgccacctacaggtcaaatgcttccgatctacgattacaaaccgagtataagtcgcaaatatgtttgccgaaacagcacaaccacagctaccccttatctgctcgggcaagcaagcatacgttccgcgaagactgagcggcgataggaaatggtttagaaaacgatgactatatttggatttgatacggtctgtggattgtcataatgattttgtatactgccgaccaacctccacatacagatgggagatcaccgtaaacttttatatatctgagtttgccaaggctttgtatgagcgttttcccttggaaagcctaaagtatgttattttactaccaccatccctaacaaatcccgggaggggcttgaatttccgtctaagtagtctcctttgccatttttgcggtgttcttggtactccagttggtaagttgtcgccgcctttgttttgtgacatctcataccggcgaagactggagtcaatataaccttcggttcgatattgaggatgtctgaaacctccagggctaccttgattcgcttgattaactctcaaatctatctagatgacagataacacctttcttttttgttggagtatttcctcctggtgctctagttgtgaggttttcaagtcggttcgaaacttgtttcgtttaaacaacgtagatcttattttatatgagaccctaggccaataagagaacggcattctctgatttcttaaatatgtgggaactgttaatttcggactctaaatcaacatctaaccctggtctggatcagatagacagtttgatatagccgatagaggaaataaagagcgatagtcaagttgctgacaagtattatgtctcttggcgatctatactcgaagaatataagttgacttaaggaacatccaagtagacaccgatgactaggatcacaacagtatcattggaatgtacgtacgcgttagtagcggattatcgtgctaataaatgttttaatgcaaacctttggtctttcattttttgtttcctctgatgttgggccttttttttttttctttattccctcggactttgtataccgaacttcaaatgtttttccaaattgccatgtacacttgaagcgaccaataaaaggcatgaatatatagtctcgctgacaagcttcaaactcaatccatggacccgataccgaagccacgtaagtgctatttttgggcgttttcaatcaaatgcgacacaactatgtaatgattggtggatagtgttccaagagtccaagagttgaacattgggaatgtgtcgaaaacatggccaataggatgatcatgtatagagaaaacacatcagattccaaatccgaggtatcgaggacttgtaatcttcagaagtctatttgttttttcttctttatatttttttctttcttgttctttctttcatctcccctctcttcatctgtctcgtttcatccgtgtgctagtctgtctagcatcgcaaggcatctacggttcccagctcgcggaggcttcctcctccaccatgcactgacccgctacttacgatccaaactgccttcgcacactacaattccccaatcttcctcaagctttcttctgcatttctattcacaatggggctctccaacgcagccatcattgtcatcgtcctcgtcgcctgtctcggagcaaccgcactgggagcatcgctcttcaagcactacaaacccgccgatggagagaccccgtggagtccaggctacgagcagaaggtctacatggccgaggtacgggctcgaggattcgaaaatctgaggcagatatactggggtggacgagatcttgagtcgcgttgtatgttctaatgatttctcgatctgctcatgtcgctgactttcattgttgattagatctcccagcggggccgagctactatcgtccccacaccacttacactgaagacaccaacacaaaatatacagcgagctcgtaacctctcctctctccttttctcgtcgcttttctcgaactttttacgaattacatggatatttgacggaacgaacacgggtgttacacgggggagaactggcgttacacggggttacatcgagtcacaacaatgatgggttcttctcaggaaacaaacactgagatgcgaatgagtttgcctggtttcacgggactaggcatatgctttgggggagtattctgattcggtcggccatggtggcttggacaattttttgtctcgaaattatggtttttttatggtatgggatggcccttggatctgcccgcgactcatctcgaaattattgccttgcagccgatttgcttgcatttgtatctgatattcacagtattgctctgatcgaatcaaagaaagtctatctttacaagacgaatccattgtgtgatctgaaaatcgctccgagctttggcttggaatatcgcgactaatcggagctttccaaagctatatatcctctcgaatccatggagacatggccagatcagtctcccgctccaatacggggtgaatcgcacagagccacacagtcagatcaaggaggccccattcaccagcgggcccgctgtctcgcgccctatgggattcaccatcgctgtggttcatcgtcccccgggaacgttccagatagcagatatggtggacaggatatgattatgtgcggcccttgcggacaggcttcggtcgcgtttcaagcgtttggccaggctgttcaggccggtggttttcggcgtgtggtctttttttccgggggtatcgggcctttagatggttctttgccatcctgaccatctgttatactctccacacacaaccagggagccggaaggagtcacttttcatcatgtctgtgtggtctgtggtctctggtctttccgtacgtacgtaggatgttttgtctcgttctccatagtattttcaccaattccgccttggatttgggaggttaatggattctcttgcctgggatgtgttttccactgccctttcgctgctgctcgtattcgtatgatcatgcagatcctgacattggcgagtcttgggcctagctcacgaatggggaaaacggcaaatcaaaagagcgcgaaacttcccaactcctcggcttgagttcgcgaatctcgccataccatacaatattgggtaggaggggattggggtcaactccacacaacttatggtctgcattataaattatgctgcgcataactcggcttccgaacttccgtaagaagtcggaggaactcttgaccgtttttcggggatccaggtgcattttgtgattgttctatgaagtcatttacatttgagccgacatcagggggtggctatgggtgtccggagaagttgaggctgtgaattgccctgtcgggcgcacggatagaaaaaacgccgagaccgaacatcagaacggctttcggtgcacaaatcctatcgagatgcgtactccgtactccgtattctgtatagggtatggagtagcgaataattggaatgccttcaaaatatcactcgagcttggaacgatctcgcaaagggaattgtagatgcctagcctgtagagtttacggccagatttacactccgtctgtgtctcaaatgtcccaggcagccaagatattcgtctctccagatataaaccagccgtattcgcgctggtttcctgtttcgacggtcccaccctattgcccaggctcgtgcacattgacatggacagcggggaaggccaaggctggctagctacatgtatttatactagaggtttcctttgagtctttgtagctctcaactctcagctctttgcctttttatcatttttcttgcctgtgtttttctggacgttcaatctaaaaacgcaaatatggaatctcccgatactattccaaactatgatagcgatacaacaagcgaagaacggtacgtaagaatgcttcggagaagaaaaaagcatatattctttcgttacactggcaattatgtctaattcaaccccagaccatcgactcaacccgtcaacaccaaaatccaggccaagttccaaatagcccggccgccctcaaaatcaagccaacgacttcgacttagccccaaactactccttcaaattcaacaactacctccaaaccaccgaccagtgcctgtactggagatatggcagccaccattccgcaagtcaaaattgaccaaaggtctccctcaacgcccaaagctcggcacgagagatatctacgcaaccctcaatgagccatatatcaccaataaacagtcaatgggacaaaaacatcccaaagaagaagatacaaaatcaaataatgtccaagaagaggatatcgtcgctgctatgtgccaaccgtcaagcagcatcagttctacatcctcaattcacttccgcgacacaaaatgcatctggaaatccagtaccaactcgacaggaactgagaaagggactttttacagattcatcattaaagaagaaagcacagccggctctgagcagccccggatgattatgcagtgggagaaacgggcactccctgcaaatggaaatggaaatgcggctccagataatgaacagttcattcttatggcgattgaccgcaagacacgccgaaagagtcgcattgctacgatgaatcggggcgggtttgatattttcataaggaagagttcgatcctggaccatcttcggacttgtatgacgttgacggtgcctgtttctgagagctctacggatttggagacttggttgtacactcttgtgttaactttgggtgtctcggtggcttctcaagaaggatggttgggttgattgttcttcatcgccggtggaaaacatgcatgtaccttagatattatggttacttgcgatacctttatgaaaagcactggggctactgatatttatactggattactgtcataaattgtgttgtagccataaatatacacccatttataggctaagtattgtcgaggccatcgccgaggtcatcgcaagcgcaagtccccatttatcagtaactaccaagtagtcaatccctcttccagcgctttgatctgcaatgccagtagacgcgagtagtatctgctaagagcgagattcccacccataaaccagaatccagggtgaccactccgccgccagatagtccgcatttcaccctctttatcaagtccccagatatcaccaaccctgtcagcaaccttgtcgccaaatatcacgcgagtctcggttctcatattctggtacccagtagcgaacacgatttcatcggcttcgagctctgagccatcctcaaaccggagtccatggggaagcacttggctaatttcctggccatgcttcacctttaccttcccatcgataatgagctggcttccaccgacatcaatatagtaaccgcctccgcgctggaagtacttcattaggagaccgctgtccgagggtccgctgtcaaccttgaagcctgccttttccaatccttgaatggtctttgcatcgttctggtttatgagcttggtgactttgacttgttgcgctttgaacagacgcgatggcatgctccacatatgaagatcggcgtcctcggttggtgggccgcttgcgtcatagagccctttgaaggcaatttccaaagtagattcagacgatatcacacaggtagagcttcgctgcaccatggtcacatcgtaccctttctcgacaaagtcctgggcgatatcgtttgccgagttacaagatccaatgacaatggcctttttcccctttgagtcggcattggcgccaggatgctccgagctgtgacacaaacgatctcccttgaaatcatccattcctttgaaaacaggcatgtttttcttgccagagtggccagtagcttggatgacgtgccgcgggtgcaaagtgcgcgtctcagttccgttttctgtcttgcgctcgagaacaaccgtccatctcttctcgttctcgtcccatgatgaagatttgatctcggtttgggtccaaacattaagctctctgaacttaacgtaggtttcgaagaaatccgctagcttatcctttggtgtatagacgggccagtcggccgggaaaggtaagtagggcatgtggtcgtaccacactggatcgtggagaacgagttggtggtatcgccgacgccagttgtctccaattctttcttctcggtcgacgacgagggtgtcgatctcgagcatcttgagacgcgccgcagcagtcaagccaccctggccagcaccttccctcctcaagtcagatcttatacttctagggaaaagcttcatcgacacataccaatgatcaataccacagggtcctttccttcaaagttaatctcatcaatacgtcgatctctccagttctttcgaccttgctgctcgccgtgtcggacaccaaatggtctctccttgttctccttgtagccctttgattcaatcagggaagtgaagacggtgaaaatgtaccagttgccctcatgttccgccaatcttataataccatttccctgtccattctcggtagtgactttgatgtaaaattcgattccgaaaacatcaccaaagaaatcaataggagccttatgtggggatttcaagtcagacgatcggtcgatttcgattttgctgggcggtgcctcggtgacaaaggcagcgatagcttgactgccctcgagggtgtggaagtcccatgaatagcacaagtggtcacgccagtagcaattctcgagaaacagtgatgcaacggcggccttgtctctggctgagaggctcgagttcagctggttgatgattctatctgcaacagtattcgggtctaggggaacatctgactcagactccgacatagtcttagggaattcgccaggttcgatgttgcatgaacctggcacaactcgctcacgcgatggcggtaggtcattggattttgtcatgttgaatttggtgattgttgatttggtttgattcgatttagggtctgacaggaagtacaaagaagaggaatagcccctcacttcttatttcgcctgttgataccccgcatattgattgacaacacatacctagtatgtacagatctgctgaatgcggggctatagcgttttaccccggctatgccattcccggggtccccatctacaaccatctacaacagtctatttacttacttttctagtggcgcagagatctgactaatgttccctggctactgagcccttggtgttaaacttgttattttctttcgatccttctgttgtcgatatataaattccagttgctttaacattggaccaaaaggcctattgtagtacgaaaacctcgacttacattttacggtgggttatcctgatgtgggtacctagataggataaatcaacccttgacgtagtattttttatggttgttggccgtttttgtctatgaggcatgtttgcttgttgtctacagctagtcatttgaaatatatacaacccgagctctttccctggtaggcaatgctatacatcaataaattttctgttcgccaaattgttatttaaagctaccgagtaagtttctatctccgttaagcattgattttccaaagttttcggttttttagctaagaaattagattattgctttggctaacagctacgaattgggaagctttttgataagtatatgatacacagtagtgcagcgtaatatatcaactagcatcattggtctagtggtagaattcgtcgttgccatcgacgaggcccgtgttcgattcacggatgatgcacaaagatttccttttttttttctctttcaattattctgctcttgatcctgattgattgatttttattttgtaaacggcggacctgcgaatctctggtttatcgtatatgctccggggctgcctggcaacatagcaaacagtcaataccaaccagcgcacactacttctcaaccgagaacccccgagagaccgtcgtgagaaaattaccatcatcaagcagggaattggtatcctctacgagaagaaattcattttaattggttctcagtcatgaaagtaatgggctccatctctctggaccccaatgacagatgtctgcggccgcaattacagtcctgtatacaaccgaagcgagcatagacgataacaactagaactcgcattgcaccctacgaactggtgcagcgcccattgtgagcctcccatacagatccgacttccccggcattgactaggccggatggattggctttgatgggacctgatctatcgctgacaaccagtacaactttgcgccagtgccaagctcagcaatgctcgcgattatcgggtcgtctggatggacagattacgagcaagtcgggtgtggttggccgggcgtcttgcttccaataccttgactaggtatacagccgcgattgacagcaacagcggaaaggccacggctttgaagtcagaggcgcattatggtggtataaaagtaaaaaagtcttatcacctgtcactttttgtgaggtcgctacacggtagagactactgttatcgcttctgatgatgactgaagagtggattggccggtttgtatggaggctatggtggtggtttcaagaacgtccagatgagcagtctggcttgagcgaactgtggtcttaattgatctatgcgacaatcggaacggggccctgtttaaatactatctcaggtccatacaggcccagaactcgacgtgattcacattttggacaatctacccgaggcaatttcccgtttgtagcagagtggagcatgagaagtcttacattcttcaactatttgaacaaatccatatcagatagttcagctatatgaagtattccccttggaattggaatattcaggcttaacactagaaagacagataaatatagactggacagtgcaggaggacaaagcgtatacgactcggaactttgaaacgtctcggaatttcgaaacgtctcaaacggcacatcgcgaaatcctcaaattaaattccattcttcgtacgagacctgagttccttccagccccctccagtgttcggaatgcggggaacctttcgtcactcccttgacaccttcctcccttgatgattttgtcggtcacccacgttgaccatatctttcctgtaccgtttatgtcgatgtgattacaacgtggaatcatcatgagtcgggcccggcgtcatgttctaggcgcttgcctcggggctttcctattgctcctgctctatcgttatcaccgcaacaacgatgcacccaaagtcaccctgaatgttgaaatcaacccgaactatctatggagaaaactaccagtgcgatacccggttgctgaattgcatccactacctgttacactgccccagacgctccccaaggttcaaccggcagactccgaagtctctcgtctcaaaatcgacctccaaacaactagacagtcggtcgtgaaagaagcctttgaacgatgttggaagtcatatcagtcacttgcttggggcgcagatgagcttgcgcctctcagcggtggccctaaaaataaattggggggttggagtgctacgataattgacaaccttgacacactgtggattatggggatgcacgatgagttcaaaaaggccgtggctgtggtcacggatatcaagtttgaaaatacacagtcgcctgaaattaatacccatcaagtcaacatccatttactcggaggcctgctagcggcatttgatctcagcgctgatcggaaattgctgaaaaagtctatcgagctgggcgatatgctttacgctgcctttgataccccgaacagaatgcccatcatccattggaatgtgcaaaaagctgctcgccgagaggagcagcttgcagagggaagtgcactcggtccagaaataggctccttcacattggaattcacaaggctgtctcagatcaccggtgacccgaaatactacgacgcggcccaacgcgtcatggaattatttgacaagcaacaagacgccaccaagctcgcaggtatgtggcctgtcagtgtgaatgccagtgaagaacttcttgacgacgatttcttcacattgggcgccgaagcaagctctctgtacatgtcgctacctcgggcatacgctttgctaggaggccaagtgcccatgtatcgtaagatgtacgagaatgctacgcgcacggtcgcaggctatactttatttcgaccgatgaaccccgagggcaaggacgtgctcatttctggcactgtccaagtagccatgacagagaatgggaatgaacaaacacacctagagccgcgaatgcagtaccaatcttgttttgcagggggtatgtttgcactaggaggcgctttactcaacatccctacgcaccaagaaaccgcccataggctggtcgatggatgcatctgggctcaccgggtcataccgctggggataatgcctgaagccttcgatgtggttccatgtgcgtcgcaaaagaactgcccatggaacgagtggcactggaagcaggaggtctggaaaaaggcgaacagcctcgaagccgaaccaaatccaaatctcaacgtcgatactttcattaaagaccaccatctacccaagggattcgttgggatcccggatactgcttataacttgcgctcagaagcgatcgagagcatgtttactctctaccgcatcagtggtcgcgaggatctactcgatgcagcttgggatatgttccaggcaatgcaaagtgcgacgcagacgaagaatgggaatgcagcgatcgttgctgtcacggatgagggtagtgaactgaccctcaaagactcaatggacagcatttggatgtcgcagacactcaaatatttctatctcatgttcagctctccagacctgattagtttggatgagtttgttttcaatgctggagggcacccactgaaacgtcccgaggcatcatgacaagaagtgcatttgttttctaccaccatccctctttttatttttaattatatggttggaagaactgatgactagaatatctataattgtaccatagtgtttattgtatataaagcaagggttatggttcattaagcccggattctctgttctctttaccaatgaaattgaccgagggaactcagtcagataggcaaattttctatatcgaatatatcaaccatttgtaacttcttacaacgaatatacaggtcgtgagtgtaaatcccatggttcgtcgccctctgcagcccactcctcctgggtcttcattcccttcaaagggatccccgtccgttcggcatactctcggagaacatacaagacgctctcgtctccggaatgtagtgcccaagagtatggcgagtgcccatatttatcgtgggggtttggatcgactcctttaacagtaagcaacagcgcaaccttgtattcatccctgcgaattgccgctaatgccaatggagtaatccctttatcatctctggcattgacatcaacaccggcagcaagaagaatctttatcgatgccatacttccatgtctgacggcaaataacaaagccgtctggtggttattgccgaggatcggccgatctagctcggatttgttcaggacaaccattagcatgatgacgcgcggacctgcagtttggattgcgtgcatgaggggcgtaaggccgcggtgatccgggctgtttgcattgaaacccggtatggagagcagtagcctgaccgcttcttcatcgtttctgattaccgcctatattagtggcgacatgccctcatgatcgggaatttctggatcaatccctttggcggcgagcagtatcctcattatatcgactcgtttggacatcaccgcctgaatgagtggagtcctgccttggtagatgggctgcggatcgacaccgtcgtgagcgacaagcagccggagagttctcaaactccccgctgtaaccgccagccccaacggtgtgaggccgtagtagcccttgcagttcgggttgacactaggcatagcaagaaggagtctagctatccggtcatgatcgaactcggctgccacatgcagtacggtgtcaccgttgtactttgccatgggattggcacctgcttgcagtgcatttcgacaaacactttctcggttgagtcttgcagcgaagtataaggcatcgctctggggtcgtgccgcatcgaatcgaaaaaggtatggaatgagtagtttgtgtagggtggtccttgttcgagcaagtgcaaatatatcccccgatgattcgagcttatctgctactgctagtagcagttcgttgggtagttcggacagaatcaattcaatttgggtgacgacgaatcgtgccactacgaaaatgggtctttccggatcaccactagttaactgactatgatcaccgccttagtttgggtttaggaggcttggcatacgtctctatccgcagaacacgcgcttctcattggctgtgcacttgctatttgcttttctctcttgctttctgttggaagtcctcgttatcatctataaacaggcatttcaatttgacgaaattcgtgcagcgtaatttaccactagaccataacaaaaatcaaggttcttgtttagggcctagaggggccatatcccattcttgatacaattctatacctgcatggtgtattttgactttttactatgcgaccgcgtctttttgttcgcgtctactccgtacttcgcttttccttcgcgcttacttcgctctcgtacttctatgttttcttttacttcttttatttcatgactcttattgctatcactttataactcttttgcttcatgtcgcctgtggcctatgtaatccttctaattcgcgctgccgccgacggaccgctgcagcattctggctcatcttccacaacagttccttttttatctcctcccggtgtttcccaatttcttcctcggtttctactttcatctgtcaagtatcagtctctatcctcatatggtctgactatatacgtacgaggtatccatcttcagtactaaactcgcaaccaatacagcgtcctggcccgatatattccactttattgaagaggcgtgtgacgtgttttaggatagttttacacccatgacatagaaaggtataatcttggcggcgtggtggtcttggagattcagacgccatgttgtagtattcgataatagagatggggttgaagtgagggtttagacgtgagtatctgcgtgatcatataccgtgtgcatatatatctaccccagggattagagttactccgttccgtgcattgacatgtcatatttcacaacgccgtgccgacccatgttgttgtacgaagtacttatttctcccctgactttccctgccttgctatctatagcagaatatggcagaattctatattgcacccgattggaaggcggtacaggatattcaggcagccgtgaactctgggcgggaagcctcaggtgtctaaacctactgagcccctgattgtaatcacatgccctaaaatatatacaatatgttcgaaagtggtgatatatactatttgatgggcgctgtccacagtaggacttcggcttattagtttaaataggagcttggcatggggtcgatgcattgtggggcagtgacacacagtgacacacagtgacggatattgactcgtgaattcagaaagataaaatgaatgagattggtctgaaatatcagacaccaaacagatattccatgcacatacaacatgaccaccatcgagtccacaaggttgcgaccagccagccagctaacaccgacatcaacacccttgtccatccttgacgcaacagtcgtgcgctttgctccaacaggagcaatctggatttttaaccaatctgcagacctagatcagaagaccctggttgaccgcttgcgaacttccttcattgaaaccctttcaaaattccctcaatgggcaggccaactccaatgggcacccgtcaaccccaaaggagaccacacagaacgtttcaaccgtccattgattgtatacgggactgataccgacccaggtgtcgaatggacagtaattgagcgccccttccgagcagacgaaatcgtccccacagcgggggaacgggcttcatcgaccaccggctctcaacccggagtatgggtaggcgatgacttcgacgaaagacttttcatatcatccaacccactggcattggccaacctgcgcgactatgccggtctgccagggatgcaagtccaaatcactctcctccaggaaggaggctacgtgatcggaatcaaaatggcgcactgtctagcggacgcacagactttaatggtattcgtgcatctatgggcgcataacagcaaaaagcaatttggaaatcagcccgaatctccgctaatgggcgagcccgtgttcgatccgacgttgctggacaactgcgccgcgggcgatattgatagccccgagccagaccaaaccctcgtacacaccgcgcgcaaattgcccttgcatcggtatagctggtgggataccagcgacgagggctacccggcatttttgataccaacgacagagaactccaaacccgcagaaatcgactacaaacaagtctcgccctccgagccagcaccctggggctcgtgggatttctccaaagaagtcaggtacacacagttgcactttacaggtgcggagctaagcaaattccaagccgcagccctcgacacaggcagtcgaggtgacatctctcgactggacgctctactcgcgcacctgtggatagccattacacgagcacgcggacaagccaactcgtcaagacccatatacatggatttgagcctcggcacacggccgcgtgtttcccccgctcttcctgatacgttcatcggatcgccgttgttcctgacccatgttggtggaaccgcttcctcgatatgtcaggaaatattaggcgagacggctagtcggatccgagagaccatgaagcggtttacggctgatgctgtgggtgcgatgttgcatgatgctgcgcacgaggtgtcgccccagcggctgtggcaggggtttttggggcctgagcatacgcttgttacgtcgtggttgcggctgcaggtgtatgaggttgactttgtgggtggggataagccacgttatgtgcacgctgttatgcctaagatggacgggtgtcttcaggtgatggatagtggggttcatgatggcggggtggatgttgcgctctatcttgacgcggtggctacggggcggttgcttgatggtgactgctttcgagtatgaatttcgatgcttttataagtccattctagtggacgaacagcaactattggtttatatccacgtaaccgcgtaaccgggactaccaaaaaaaaaaataaaaggaatcaaaatttatacagaagaattaattataaatgaaaagcaatacctaagcactcattgaaagcgcccgatgccgtgatgtccgtttccgacaatcagcatctcgactcttgcgccccattcggccaagagacatgctctcaagagtctcgggcttaccaccccaaagcttagttctgccattccgtttttgttgtataggtggaatccagaagtgcgtgactgctgcgccgatgatcatgcaggcgctgaaaacaaggagaacaatgccgtgcttgcgggtcgatgcgttacccggccctgcgccgaagtgataatatgctgagaagatttgtacgagaatagaacccagctttccagccccagcgctgataccgtgacaggttgcgcggtatcgggttgggaagatctcggcggggatcatataggttgttgcattggggcctgtgggtagttggttagaatgatttagtgcatcgtaacccaggtttgacttaccaaagttgaacatgatttggccaacgatgtacaatgccaccacagcaggagggtgggagtaaagacagacgaacatggttcccagggcgataaacagagccgctagtgcgaggaacatgtacttttgcagtgccacgcgatccagtttatgggcaaagacaatgagcagtaggccaccgacaaaacttccgatgttgagcacaatcagcccgcgcacagaggtttccatgaacatcgtgtagatatcggcgtctggtgaatcgtctgtcatccagctcggtgccgccgcggagatatgaagctggccccacgtctttgctaagaattgagggctcgacaatccgataccgtagaagccgaaatcaaggaggagccacgcgagagagcaaccagccaagctgcgccagttcccttctgtccagaagtaccgcatgatgtcgctccgtgccaaccgccagtgagagttgagggtagcggggggtaagcgggtgaactcgtcatcatcttcatcgttatcgaaagtcgaacggctagcaatggacgaaatcggaggtagttgaattgcgctaccggcactgcatgtcgcagtgtttccccagcccacagaatcaatcataccgggcgtgtcactgaaaagggtggttgcatcaaactccgccgtgacgggatcgtccacgatatcgactaggtagcgagggctctctgggatggcgaaccggaaaagagtagcgactgcgccgggcacgactccgatggcgatcacccagcgccacattatatcgacagtgcgggtgatgtcttcacccggagtgctattagcacgagccactgcgataacaaccagtgagacgatgttgcctgcaatctgaccgagtggctgcatgaagaagacggtagccatcatgcgggcgcgatgcttggtgggggcaaatctgatatttcaagggtcagtttttccacgattaaagatttcgagatcgatcgacatactcagacgtaatcactgcgctgagtggataatctgcgcctactccaataccgacacagattctccaccaaataagccatgcaaagacgttcatgcttccgtccacgcctgtcgaagacatgaccacacctagggtggctgtaatgaggagtaccaattcaacaccgtacatcttcttgcgcccgttcttgtcggcaagaaatccaaatgccacttgccctagcagggttcccccaagtgttgcgatattgatgcatgtgagtcgtaacgaggaagtgttgtctctccagtatacgtaggagatcatcggtaaagccatgttactggcaaatagctgtatcgagtattagcggttgccgtttatgcgttgcgacaacatttcaatctgctctgaaacagggggctcacgcactgtgtaaccatcgaggaagaacccaagaccggcgaccagcacgacaatccattgaaagccttgcctgtcgatagtctcgtagatctgtcgcatacggacatatcgatcctaaaaccgaactattaggaacctgcatcatgcatgtcatgctgttcggacattccatacctgctcatggtcgaagtccctggcacggtcggttttatacaaccgggcgtggaacttgcccattgtgaatattagaaggttgaaagatggttaaagacttaaagtcctacattttcgcagaagatcagaagatgcttagattatacccggggcttccaaggtttacaaacgaaatacagacggaggcccgtgatccctgcaggcgctaatgcggggctaagctgcgagcaagacaaagctttagggttgttccccccacgtgcggcgtctcttgagcttgacttgtccgtggccaccacgacggatccacatgcaacggccagcccacgaggactcccttgagacatggcgaatttagattagatggttcttgtattattaccaattgagccatttattctaattaatcacttattgttgcattcgattattcatttctttcattatatttcattatattccagacgcaattctagtctcaaaaggtatatgcaacgcccaggggtatcttggtattatgtgatacatatcggcccctctgcccaggaactccaactccatgtaaaatccatagcaattgagggatttatatccgtcctcgtgaacgcttcatccaatcgtcaggtcgtatgacaacatctgacaaaatgctgcgcagtctgggaaagagagaggaataagcgaatagtccgaaatgaaagaaactcaaatgtgcactgaccatcatcgtcaagaaactgaatcgtaagattccgcatttgacacagaatctcgaagttcggattcagatccagtagggctggccgcccggcctttttcgggggtttaattgagccgatacagttcactagtcgggctgttagcaaggtcgctgtggccggatcgaaccgaaactcacggggtatggaaacgtatcgtttgagctccctccgttgcgagttagcgaagaatagcattacacgcttcccattgtgcccgcggaggatgcgaagattttggctgatgcactcttcgccccggcctttagacttggcctcggccatccccccgataaagatcaacttggagcagagcagaagttcttgaaaccgtacgcaatctgcgaatgtaagcggatgttcatcctccaaggtttctcggtcgcgtaccatcccaatgatcgaatttatatgatagctgcgtcatgaataccgtgcttcccgtttggaccgtttgctggtccataaaggacacgcgaagagggtaatcgtcgcctgattttggatgctctaggtgggggaccggcagttttgtattggagactatgatttgaatgatcagcatgtttatctttcggagacatgcgacacaactcacagccatggataaaaggtgtttgctggcctaatcctcctccgagttcaagacatctcaatgcgcccgttgagtccttgcaaatatcaatgaatttgtatttcagcttgaatagttggccgtttttgacaaatgaactgcgaacaagtcagcgcattcccaccggagggagccatgttctcgacacaaacatttgcacagaaggagtcagctcgagccgcacgacttcatcgtagaactgccaggattgcttcctcgagctggaccctggggatgtcgcaggactcggaaagaggatactcgttgacgcggacgacacggtggaggcggaatgggagctttggcgtcgatctacccactcctggcaatctcgaggagcaaaagggttcattctctcgttctatacaagggataggtaatgttgaagatacgatcgggcggatcccgtctgaaaaagatcggccaggaacacaagtggcataattgacgatagaattatatgtagaaaaagtaaatatacactcgaacctatgatatccagaaaccgaaaatacgtcggggatgagcgtaacataatgtggagaggggatgtggaacgtgctaaaatggctggctatcagatcacgacgggtcccacttgcatcgtgctttcccatgtggctttgttaaatttcattgggacgttcagctgtttgagcttgaatgatatcagtattacggaggacattatccgagctaccgttggtataattgcatttttacctctattagccaggaccgatgcgcttaaatattcccgaggttactccgtctatatctacaccttggaagctaggctaaatgatccacaaacacccagaatacttctggaactggtctggaaattcttaccgatcagcatcccatggttatagttccgatgcctgcagcttcccgatgcgggtcgcataaactcggctttatagtagagccaaggtgccaatcaatgccgaggctcatgaagtataattgatcttgggcatccagtcacactcttcagaccctgcacaaatcggtactaaaacacgtaatagctctttccgccggagttatagctcgaaactaggctttcaatttccctttttagctctcggacccagtgccatatcgacatgcctcgatcaactatcgttttttagcccaatcagcgggcctagtgtgaagtatgttcgggactcgttagccgcatttgcagacataaatagtcttcagattagtagagctatatttgttattttatactaatatgctcccgcaattagtacacgtcacagagggtatgattgagtaaacctccaatgatagaggcgatttgatacagcatagaaagccacataactaccttggccactaccacgagtgatatttgtaagatactcgtccaatacacactgttagttagagatctgtttgcattgcctaaacagtgatcttcccagggataattgccgacctgactgccattgacaagttacataggaaaagccgcgacctgcagattcgttgttcgaactcgataaccagagaatccgacacgcagtcgtgctaggaccctcgctcagcatcggcccattgttaaatgagctggagcataagatatattagaattggcccatacgaaaatgaactagataaattgaacggaagatggctctgtttgtcagtggagattaatagtcccgcatttttgatttcaggatcgaatctgtccagattggaggtggcatgggaagacgtcacattcctctctacagcgcggagaagagttttgcctaccacttagggttatattgttcgcaactatagtcagactatgttagaaatgaatgttaactactaacgacttatctaagattcatcttacttctctctaaattgtacccgaattgtaaatttggctgtcattatcttgtcttagaagggtcagcttttgtccttcggagctcttagagtcgtctatcagggctgaatgtaacttcactgacttaataatcatagacctctaacttgaatcaattacactagcctgtgatgtaggtgggctacatataaaagcgaacttgacagcaggcatcaacctttccttgtcatcatccatcaagcttctgatccaacacagcatgtatctcaatcgtccaacctatctttggcaacttatttacatctactcgtacagctaacaattttctaacaccccagacatatccttttgacattcaatctacgtcttatctttactccgtcatacacaagacgaaatcccctgaactgatgacaaaatcaagaccaattcacgcaaaaatacacttagcgaagtcaaaatgttcgtccccgacgcagaagatccaggatctagatttcagggcgagccttacttcaacatggctccagtcgctccagctccagctcagttcggtcttgggtacttcggtcctccgtccgttgaccctagtcctgttgcttacggtccttgcaaaccgccgccaatttaccctgttttacttgggccctctcttctatcccaaataatcgaaccctcttctgaatcagcctcccgaatggtggatggctggccggtgtttcatccgcagtttggatattacctcggtcttcgaccaattgacttacagtcatttgtccctgcttcatttccctatctcccttctccctcctatggtgagtgcctttttctctcgctctcaatgccttgccttcctttgaacattacttatactaacctgaactcagcttccttccctggcgaacctgttgagatcccggggaacaaatccggcgagtgccttgctgctcatcgcaaattcatgaactggatccatacggtgtactattcatcaaagtcgcccgaaacctttgtgcaagcatggcaacgagccctcaaagatatgaagcaggcctttggacccccatatcttcccacgatcttcatcctcaatcaattccttgctgcggtcagtgtaaatcctgacaccattccatgggttgagtcgctccactttgagaaaggttctctgccagcatccatactagatgaagccttcgccgatttcttggagtttgaggcataccgactaggaaaccaacagtcgcccttaagtaacctaggtactgacgtcgctaacgtgtatcaaattgaaaatctcgccaagcattactgtccctttcacctgcgtctcacaatgcatcccattgaggaatgttttcgaaacccacagaacacgaagcgtaggagaaagtggaggcggaagcaggcacggatggcagcagctcttgaggccgaaaatggaggcggctatgattgacatgttctgttggagaggttaccggccatcaggtgagatttaatttctagtgtccttgtcgtgaagaggctacggctctttgttttaatgagtgggatctgtgttcagtcttttattctttcatttctcatgtccactgttgacattttcctaccaagatgccctctccttccgttgcagatgttttgaacatcaccaactttcacacccatgaatgcctgaaggatcggctacagcagccagattaattacttcttgcacctttccctttttcttttctgtcatttactttgcaattgatttatgaaaattttctccattccaaaattgctattttatctctggtgtagtttgcatcatcctatccaccatgcctgctataatatgtatgcgctgttctatatatcctactcttaacatagcttttaccatccatctcttcggttcactatattccttccgtgtatttcatcattgtctgtctaccatctattcctcacgttatcatatttcttctatcatctctccctgtcctattcttctaagatttctcctcccttcaccatttatacatatctgttcacgtcttatccccctttgttgatagagctatagaacgagaatgcttccatcaattggtaagatggccgagttggtctaaggcgccaggttaaggtttaccttgactccacaactagtaatagtttcctggtctcgcaagaggcgtgggttcaaatcccactcttatcataactttttgctttttgttcatatcgattgctttttgatctagttggtgaagttttatagtcaaaatttgtgtggtttggtcggttagttcggttaagaaattttctttattgtgcgtctagtatgatacgtcggcaatataaaaccaaacttacttattaagatggcatattaattcagctataggaaagctaactgcatcttatatgttagatctagaagaaaaatctctagaacaacaactgtatactatctcgggtatgacacttgcatggcatattgtgaaagactaagtcaatataaatcgttcaatcttaattgcttagggtagtcctttccatacatttttgcttcttagatacataaggtgtaataaggtcaggtgaacactttcagaaatgacagggatttccgtcaatacaagtcccttaagctggaccagatactagcttacctgatccagtaggtttggataagtccttagcgacacctcgaaaatgtggagctagatttttgggcattaagaaggtagatagaactagcctgcatgttgatctaggttataaatgagggatacatcgatgaaaacgtgtcttgtttcgttaaaccttcgagcacctagaacatagaccgtattcgataacgaagaaatccagaaagctgagagaaaatgtattcctaggcgtagaaagaagaacatgtcccatcatcccgcaatcaagttgcagcgaccgtagattatgggattgagaaagaagaacagtcacaaatgcatatatgtcacctgttccgacatagatccacttctctgacagggaaactgtctctgtgatatctttcacagcggttacctaatccggtaatacaactgactgtcactagaaatgagagctaatcgagtctccatctatttgacatctactcgtcttcctgatccgctgctggatacagtaatttcgaggagatcatgctcacgtggtggacgttcgtgaatgacacgccatggcccgcttgaggggagcgggtctgtcaatatcgacttggcaatataatgagctctccggggagtgaatttcctcattttgatctggtgaaagtgtgtaagaagatgttccaggaatggcgaatagttgacagaatcatattcatgcaaatcaaacaataggatcattagaaagtacagatatattctggttttttctgcagagttggggacccggggcgaagacgtcacttggcccctgcagatctgaggatattgtgggcgaaataccgctatccatggattttaccactttatgccacgatttgatgaattaaaagagggataatcaataatgggagacttaaatcgtactttacataacaataaccaatgtgattgtgttcaaaggccctctaggaaggcttatatgcatctcaacccaaccacccggatgtcggatacgaacttaacaccgcgatctaaatataggaagcagaaaaaactggggataattggaaagcacgacagtcaatcaattacaacagcccatcccatgtgtatgattcaacgatcgctaccaaatgtatcatcccaccttgaatatactaattttggcccgtttgtcctgtaagatttgctctactcagccttgggttgaggctgaacaaacagtctgacctcatctatctgcgttggagactagtctattcctggagtcgtatataaagaccagctaactaatgatttgatgcgctatgttttacgaagtagacgctgatctctcgtcaccactttggcttaagaaatatcatgggcccgtgtgagacagccagtacaccgcatgtcctcaacccttaaaacatcaccaataatatagaggactggtttgaaatcaagtctgaatgcgttgacatcaagtgagacccagtcaggttgcttatttcaatacctatgcaagggagatttccagtttagtttcccgattgaccttagcgtcaggctgtccgtggcttccgtgaactaactatgggatatatttgaaacttgcacagactcggccaatcaacgtctttgatacttttagaattccaggggtggctactcgggctggcccttcacccagattccgagcacataaataccccagaatcatcgcattttctacagtaactctccatacaatagaacatcttataccatctgatcatcttaccagcaaattctatatctccttcaaaatgaagtccttcttctccgttactctcttcatcgccgcggccattgctcagagtgccaccatcggactccccactgagaaccaggagatcaatcccggcacggaagtcgtcgtccaagtgcagcgtcctgtaagttccagagtgacctcatcacagaaatccgttttactaattgatcatccagaactctctaagtgggtccacggaggtgggcatagcgatcggcctctcctcgtgtgcatccgcaccttgcaggagcgcagaggatattcttggaacaattctatacaacgggcctttcagccccgtgtaccacgagaccaacctgcccccgtatgagaacttcacgatcaccgtgccggcttcggctaccgttggcaaaagccagattaatgtcgcccatgcggctctgattggtgtaagtagatctcctacattcaaaggaattcaagcatgctaattgaattgcaggccggtccttccgcgttcttggagtctttcaaccagactgtcttcgttgtctagattggtgccagcttcgtacatatgtcttttcattcttgttgtaaatcgcattttgttgtgaatatgccttgagtggatttgttgatatatttgaatacagttcagtttcgcaaataaatttggttatacatctatacctccaacaatacgctcgaatgaaagatatgaaccgttctttaatgtacaggagaatatgagcagcagacgcctttgaaagtggcgttgcccgggtctcgagggtttctttgtttaggaccaaccatttttcattagtctttcctattgaactcttcattcggacatagcctctattcaatactcaacctataactggtttgattcttctgagtcttattgatacctggaccgggccatctataaaatccgcctgttcatctactctttgtcccgattctgacatgaataagactacaacaagtctcaataaacatcatgtgcaccactgggattctccctcggaaatgagagctttctcttgtcttcgatcccacggaaaatccgcacatcgtcactcgttaattctgtcatgatggacaaggtcttctctcgcgactacaaccccatccccaaagcagatgccgatggggacagcgatgtcaccatcacgaacagaccgccccgccggggcctacaacaatttttgaaacgaaacctcgccgcaataaccataaccggcctgctgatggtcctgttactcctggtgatcgtcgtaatcacagccatcgccgtggaacccttccgcaaggtcattgtcctaaaacggccaccctctgactcgctcgcataccccgaatcactcgaaggccagcgacagtgcctgccaccagctccacgagtacgatactcatgcggcaactcaaccaaggaggccgaagcgctcggctgtgcctacgaccctcttgctggctgctggctgcacaaagaatgtccgcatgacttcacgcacgagtttgcgcatttcaacaatggaaagccctttgtatatttctatgacgaggctgccacacagcaaatgaaggattacaccgaactcggcaataacccggacttctactggactgctgtccgtgagcatctggtccattgtctgtatctccttcgtcgaggccacgatgtccacatgcgtgggggtcgtctggacaatatgcttggggatctagagcatgtcgatcattgtaccaacatgttggctaattggctgcggagaccggatcccgctttggaggagataggcacgcagggccagactcattgcttcatgtcctgtgcttgattattgggtatatatatagtcatggatcatgggatcaaataagacggatataggcgccagtaatcccgtgtcttggacagatggtgttgaactttgtattgttttactaaaagtccagaatgacagtggctttccagtgtttcccactattatgttatatatcttgatccaaaaagaagaaacagacatagtctattctgatttattccaacaatacttgaaggtaaaaataaatataggaaattcaagctttccgggtatctaatctccgacttgacttccgttatgtccgcaaccgtgaaaataggcctccacgaaattataggctcctacgaaactataggctccaacttcttttataacaatcatccaactcgcacctatctcccagaagctcctattcacatactcaaaatgcctcccaaacgtgtcgcgatagtcaccagcagcacccgcagcccccggctcaaccccacgataacgcagtacgtctatgacgtcctcatctccgacccgacaatcccaacaaaccacagcaaagcaaccgacacagacccgcgccacataaccttcgaaatcctcgacctggcaaagcagtcgctacccctctacgacgaatccgtcatccccgccggcctgcccgccgaagaccccaccccgcactacagcaaagcgcacacgcgggcgtggtccgcggtggtgcgccagtacgatgcttttatcttcgtcacgccgcagtataactggagtatccctgcgagtctgaagaacgcgctcgattatctctacttcgagtggaaggggaagccggcggggattgtttcgtatggagggcggggtggtgggaaggcggcggatcatctgcgtggtatcttgaccggcttgcacatgagggtggttggcacggcgcctgcattgccggtcaagtttactgggtttcctgttgggacgttgtcggaggaggaagagaaggtggagctagatgagagggatcttgttggatggagggaagctggggttgaggggatgatgcgaaacttgggaatggaattggtttgtgaattggataaggagtgatctagtcttcagcagatagcatggcaggttcttcctggtccgatgtgatggaacttatgatttagtgaaagaaatcgacctagtacgagtacgtatactccttaatagtagatttagcaatacactcggcgctccgcaagttattgagagactaaacggtagtatacggatttataaacctagaattccccttgaagttactattactaatagcgaacgcctcgatacagccggttacgcttccctccttattaagataggagactagaccggccggataaaggcgtagattcttaattcagagtacgacctcatcctcggccttgacttcgagatatcgaccttggagtctcgaccacgcatgaacctcgcagtgtagtcagataaatctcaaatataaatgcccatggggtctgcaccactggccagaagcatccgaacttttccggtgattaacgcgaatagcagccgtgagtggagattcgtaggtgcccatattgttcccactgacgttggcattaggagaacaccccgctagttcacgaagtgttctcttgtggtaatccaaaatagcatggaggacggctggattggagttaccagcagccctaatggccgcagactcctcaatgccccaggctacatcttctctggtgagtttatatggcatggtatggttgtgatccttaccttcttactactttggtccagtaggcaatgaaaccttctatgatcaattatgtgaggaaaaagtaagtcaacaagacaacacaaaacagtccaaaggcggtctgcacaccataatctttagcaaagtcctgcaaacgaatgcacccatgagtgagagaagatatagaactattcaccgcccacttttgcttcgggatatctatagtccgtgatcgtcaccaaccctttgattgctcttgccttgaagccactggggaaatataaatacctggtcctccccccagattggttctcttttttctttcttcttcatcctagtgcaagggctttacacgtatcagtgaggagacatccgagatcgtgtttttgctagttgaaaactaccaccttgactgcttcaagtgagcctcgcggcttgcttgggaatttttgaaacatacttactctacctcaactccttgactcttgagtcctcgagttgaattcctttgaatttgatgccatgatagatatttggactcagtcttgagttctgagtgtgcgatcacatgccatcacattaagatctttgttttgtttgctcgtttgcttgctcgcttcccgtttgcattgtttactagtttgctttcattgattgtttgtcaggtatctcagcgagaggtttggggtttgcaacgtttgtaaagtgagctgtatcaacaggctgcttcccactttgcacctgcttctttccctctccatcttagtttctgaattgattgcactctttcctacttgagaagacctagcatgtcacagtcttcacgtagagcttggtatttgcataggtagttgccataactaccggtttatttcacatgatccttccttccttctttccctatctatactccgtcccttccctcctcatctgataggtactgaattcgaaggatagtatgtattaaagtcacattagatgtgcctttgtaaggtatgtaactagaatgtatggagattatgtacttttggatcgtcaatcatctcagtcagtactgagaatgtcctcgcgcgtgataccactgcgttcacacatggcccggaagatgccatctgccttatcccacagcgcaactggtgcatccatctcagcgatccgacccttatccataacgcagatgcgatcgtagtggatgatcgtgcgcaagcgatgcgcaatacacagcaaagtcttcccctcgaagccctgagccatagtgtactggatcttctgatcggtctcgaagtccacggaagaggtcgcttcgtcgcagacgatgatacgtgcgtcgcggaccagtgcccgggccagcgccatcaattgccgctggcctagggaaaagttcagaccttcgtcgtcgacaggtgattcgagagtgagtttgtttgtcgggcgcgctttcacgtcactgtctgtgactggggttgtagttccgctggctagcccacttggcagtttctcgtcttcggattcttgctcttgttcaatgaggtacgccttgcgcagcgcggaccatagttcgaggtcatcgtgctcgttgaacggatcaaggttcgagcggatcgtgcccttgaatagggctgggtcttgggggatgatggcaaggcgggatcgaaggtcgtggaggccgacggtggaaatgtcgatgccgtcaattttgacgctacctcctgatagttcagttaaacggaatagtgcggacatgatactcgatttgccggcaccggtgcgaccgacaataccaatgcgctcgcctccccgcacatccatggtgaggccctgcaggacgagtggaagctcagcccggtagcgcatctccacgctgttgaactcgatgtggcccttgtcaggccagctggctggcacctcggcctgatgcaaaggcgcctcctcttccaattcagtaccgtagaagtgaacccgctctgtggcgttcatgttgttctcaacctcggccaactgacggactgtgaattgaagcatctgtgcgatagccaagatataagacagcaccaacccagaaatgctgggggacacgttgaaccgagaagtgacgaccagaacaccgaccacgaagaccaatacggtcgccacagcatcgagtcggacactaagccaacgttgattggagaaagtgaggaaataggccccgttcatcacatcgatcgagtctcggatggtgcggcggaattggttctctacgccatatgctcgaatgcacgcgattccggtgatggcttcgccgaacttggcatacaccattgagcgcaagacgctctcgtggcgcttcatctcgcgggcggatgctctgtaatagttcgaagctagaaggaacagtatgaatagcgggacaagtgcgatgacgaactaaaggagttagcaaagatcaaaataccaagaaaattccaagagagagggtactcacataatagaagaacactatgaccaagaccatcacggagataatcatagtcatggtcagggcatagatacgcatcgcatcggaaagttcattgtccatcacctgaatatccttcgagaagcggttggtgattcgtccaagtggtgtagtatcgaagaaagccataggcgcgcggagaacacgagacatcgcacgctgaagcatagtcttgctagcattagtaccgcatgtggtcatataagtcgagaaactgaacatcaagacgacaacactgccacccagtccagcgtagattccaatgtattggccggtcgagagccccgggtacttgtcggaagtccaataggacagccacaaactagtccagatgttggcgacattgggaaggccgagcaagatgaataccatgatagcattgaaataactaccggaggctcgaatatatgccttccagacactccagccgacggatgcggtggccttctcttcttgctgcatcagagctgcggcgggttttgctggggccttcttcaaacttggctccttttcgtctatttcatccacgacttcgcccacagcctctacctcttcctcttgcatatcctcctgtcgagaactagacatcaaccgcttgaagacctcgttgtcacgcatgaggttgtcgaatgtatcgaccgcactgatccgtccctcgtccataacgataattcgatcacatcgactgagaacatggagttgatgtgtcgccaagattcggcagcgatctttgagcaaaccacagattgccttgtccatgatgtgacgaccgacgtgtgcatcgacagctgacaaaggatcatccatgagcaccagctccgcatcgaaatatatggcccgggcgatattcaatcgctgtttctgtccaccagacaccgtgatacctcgttctccaatctcggtctggtctccattcggtaggatctcgagatctggggtcagagcgcatgcctcgatcacttgctcataccaagtctcattatactccttcccaaacaggatattgttgcgcacggaggtgttttggatccaggcgtactgaggacagaatgcgcgtgtggtgctcaggcgtacagtaccatcagtcacacgcatatctcccgctagagccgagagcaatgaactcttgccacagccgactgttccaattacggccaacagttcatgtcggccaacttcaaaggtcatatctttgagtttgaatggctctgtgggagtttcatcggtgttatcgtctttgggtgttgagtttcctgatggttcagggcgtgcagctgccttcttcttggctttgtctgcatccttttcgtctgttgggaggcgctcccaggtgaatgaagcatgttccatttcgattgcattctccatgttctcgtcccgctcaatatcttcattttgttcttcggcgagcaggaactcctggattcgactaaaagcagttgaagcatcagtcacttgaccgataaccattggaagcatgttcaacggcatccgcagggaattgaacaacgccaatgaggagaaaaccagtgcggcgttcaagtcatgatgtgatagtgcataggtaacgaaagacagcatggaggcaaaaacaggaatcgacatcgccacacaaagaatgccgtttcggatcgcaagcaaggtctggatggatcgaatttctcgtccgcgaatctctttcaaacggccgaggaaactgctctcccaaccgaagtatttcacgaagcgcacagcttgcaggatttcttgggtgagagatacacgctgatctgtaatcttgttgatactccgtcgtcggctgatcaaggatcgcacggcgaaagtcaaaaatggcattccgattaccagcaatgcgtacccagacaagcaactgtagccaatgttgaccaagagaaggatgagtgtcactataatcgagatgggtgctgcccaaatcatatggaacatgccacaagccaggttaatacggtccacgtcaatactcatgagagcagtgatgcgaccattgttccatccgcggccatcacctgccacaccaccaggtccaggtagcgcagtatctggcttatgctgtttccctttctcttcgggatttgagagagcctccttggttgcgtccagggctttgacttcttctggtgtagcttgccctcctgccttggcacgaccagacaatttcatagccttgttgaagatgtgggagatcagcactgcgcgaatctgcccaccgacaacttgaccccgatacaggaactggttcgtgcataaactctgcattgactgcatacaggtgataccaaccacgaatcccatacccctgccgatgtaaggctccgggagaccagccttttctgcgacataagcctccgtcgcgaaagcaatgaggtaccgagtcaaatacggcgcaaagaccaacaacagcgaactgagaagctgacagatgccgccgagcagaaattcaaatctgaacgtgtcgtacaatgcccagagaagcgggcggttgacgccactctcagtgcgcttttccaatgcggcgtctaatcggctggacaatacgtcaacggcccgatcgggattgacagtccagatatcctgcaattcgagtggacgtagatagcccactttcatcaacggggacatccattggaaggagataatactgaaaaacgaagcgccatgttctcgcgacacagatcgctctgttgggacgggtggtgtcttttgcaatcgaagtggattgagtctgcgataccattttttctttggcgtaggctgcacgtccgcttcgtcgggtgctgatcttaaggcatcggcccggagcttttcatccgccaccactacttcacgcagcggttcgggtgcggacatgctggatgttgaccggatactgaatctgattcccagctaggcagtgttccggagattcgattataaaagaaacggtgtgagtaatccaatcgatgtgggggtagccacgagctgctgaatgcggaaggcggagataatgtccggggataaagaattggggattgggaggaattgaggacattcaatgagattgaaggagatttcaggggctttaatggtttatagataacttatggcaaagtgaccggatgtcatgaaagggctcggacttccgtgtctgacttttttatgactccgtcaaacagggctaagcttccccagatcgggcttggtgggcttgtcatggcaaatgagagttaaaccggagataagtcagaggagaacatgcattcgcattcgtttagaacttcatcatccatcatctagtctcgtgggcagtcggcatcgcgggcttcgggactccgagtgccgacatttggattagtaatgtttaaataggcccacggaatggggaggatattggctgaagtcaagcagactactgtattcaaacctcaaattgttatggtctactccgtattctttgtgataacatacaaattttggcccccgaaaaaaaaaaaaaaacaattccatcgtcacgtcgtgggataacaagcagatccaagacagtaagaaatgtgctaggaagcttgtcaccaatgagactctccagtcgccatccctagcccagaggatatgatatgcatagtttacagatcatgagccctccaggaggcttctgtggttgtcgctgcgatctgtggacctgtgaaggttccgttctttacaaatgtatctagccatcaagctcaatcttgaccttcttctccgaaggtgggataattttgtcctcggaggcgcccttgaggttgggaagttctgtcacggcttccttgatgattccaagggccttttggatctcctcctcagtgatgacaagcggaggagcaaggcggatgatgttctggtgggtaggtttggcctggagaataagagttagcgatatccaaaccaatcctaacgagtagggactcgaatacataccaacaagcccttctccttcatcaacatgcacagatcccaagcggtatggccattggtcttcgactcatcaatgacgatggcattgagcaggccctttccacgcactgtctggatgaccgggctcttgatagccactagcccatctcggaataagtggccgagcttctccgcacgctcgaccatgttctcctcgcgcacgacctcaagcgcgcgaatagcaacggcacagccgagtgggtttccgccgtaagtcgaaccatgggtaccagcctcgaccgtgagcatgacgtccttgctacccagcacgcacgaaaccgggtacataccacccgagatggccttgccgagcaagacaaggtcaggcttgattccgctccactcgtagcacaacagcttacccgtgcgtgcgataccggtttggatctcgtcgcagatcagcagcgcattgtacttgtcgcagagtgcccgggcctcctgcaggtagtctgggtcggggacaacgatgcctgcttcaccctggataggttcaatcaggaaagcagcgaggttggggccggccgtctcgaacgcctcgcgtagagccgccttgtcattgtaggcgattggtttatttgtccctgggatggtgcatccgataccaggaagataagggccatagttctcgcgtgactcggggtcggaagatagggaaatggcggcgaactaatgcaaggggtataatcagccactgatgtacctttacgggtgtaacaaggaggggtcacaattcacttactgtacgcccatggaagttgttctccgcgctcaagataacggcttgattttccggaatgcccttggtcttgtatccccatttgcgggcaattttaatagctgtctcgacggcctcggcgccggtgttcatgggcatcaccatctcaaagccaaagtagctagtgatgaacttggcgaagcgagggaaaacgtcattgtagaatgcacgggagctcaaggttactcgcgaggcttggtctaccaatgcagcaatcaacttggggtggcagtggccttgattcacagcggagtaggcggagaggaagtcaaggtagtgacggccttcagggtcccagaccgaagtaccctgagcccgggcgaagacaacaggaagtgggtggtagttatgggcagcatattccttctcggactcgatagcctcaacagaagaggcagcatggtagtgggagaaaggcccgttggtagccatggtggatggtggatggtggattgcggggagagctaggaagttgggggaagttggaggatcggcaatggggtaaagaagaaaagaagaggaggaaagttgaggaaattgaagaaattccagagtaaaagaaacggaagacgagaagttatataggtaaaggaaaatcaaaccctttatacgctattccgttaagtgttaggcttgatagagcggatgtccgctaagtacaggtcgtgccgacgctgttccctatgcgcaggattaacctacacgggctccagtggctttgataaccacgatttccgattcgttgattggctatattggctctaataatgttccaagtattaatttgtctaatttaaatcggaaaaaaagagagaaaaactgggggtagaaattcacgtcatacttcggctatcgaaggagacaaatacatatacatgaaccttggagatatatagagaaataaagggctagttatgctccaagatctattataagccaaaatataaaaatagacaatgaatcgaaatgttagggcaattcgatcgctccgtactccgcagagtattttgaatctcggagtcggggcgctcccgccctctctcctttattgaccgtgtttgtgcatgcgctttgtgaggtcagactatcttgagccgcaatgtacgaggggatgaatgagtacctacaatattcttacccttgatcatgtctacaccaacttctccgcgccgcaagcctcaaccccgccgcgcgcccactcaaaacatactcctcttcctcatcgccttccgtctcgtcaatgcgttcgcagttcggacctttttccagccagatgaatactttcagtcactagagccagcgtggcagatcgcgttcggtcagggtcaaggggcctgggtgacatgggtgagtgaatgcgatcgcgcccacacatgactttggctaatatcgctcctaggaatggcggcaccaactccgatcctcactacatcctctcttcttcgccgctctctataaagtcgccgatttccttgccttcaccctcagtttgtctcccgccacacgtgcagagctcctaattgccgctccaaagacagcgcaggccgttgtggcagcaattggtgatttctacacatggaagctcgcagttcgtgtctatggagatgattctcttgaatcatggacaacggtatgtgattaagtatcgggtgttcataattcctctcggcagcaaagagcgcatgctaataaacgttcacagctggtcgcaactgtcgtaaatccctggcaatggttctgctcaactaggacactatccaacagtttcgaaacaacaattaccattgtcgcgttggaactatggccatggcaatggtcggtaggctctaccgccagcaatggccgcgacaaaaatactggcaatcaaatggacagggatcgaggtgtgattctgaggtatgactgaacctccaacttatgacaactgccactgacaatacctacagtctccacgaatgtctgccgctggcagcactcgcctgtatactgcgaccgaccaacattctcgtttgggcaaccctggccggcctcgcttggcttcggacctcttggccccagcgcaagatcctccttcttgaagttatgatttgcgggtaagtaatccaatctcctgataaaggacaagctgaccttttgatctggcaggtcgactattcttgcggtatcttccgttgcggaccgtctcttctatggaatttggaccttcccgccgctcaggttcctatacttcaacatcgcgcaatcactagctatcttctatggcagcaatgattggcattactatatctctcagggttatccccttctactgaccactctgttgcccttcgcgcttactggtctatatcgaaccttgtcaactcgggcttccacagtgggagacagattgcaggcggcgatccgagtgcaattggcgacagtatgccttctgatgccatttgtgctctctttgatctctcataaggaagtgcgcttcatctacccattgttgccctgcctgcatatattagctgcaccgcctttaatgcacttcttctacccagctatcgactcgcaggcatggggtcatactctccgcaggttgattctcataatcctcatgtgtgcaaacgtggtcattgcactttacacaactctctatcatgcatcaggaacacttagtgttctctcctatctccgtcatcagcacgaagcacactcggtaccaacaacaaaagcccaaacaaactcagtctccgaaaccggaatctctgttggatttttaatgccctgccacagcacaccctggcgctctcatttagtctacccgacaatcaacgcttgggccctttcgtgcgagccaccgatcgatctcaacgcaactcagaaagccgtttatcgagacgaagcagatcaattctacgatgacacattccaatttctacgccagaacatgactggtggtctccgtcaccttcctcgacgaccgagctacgcctcgcccgcgcattattctgtatcgggaaagaaccccaacgagaccccacaacatgaatggccggactacctcatcttcttcgcccagctcgagccaaccctctacaccatactgcgtacctcgtcctatggggagtgctggcgcacctacaacagtgactggcacgacgactggcgccgtcgcggcgacatcgtagtctggtgcctggacacagtagagcaggactcctggcgctcctttgcgcaacgccaagaacaggaaagccgagagaagcaattcgatcgtatcgtggaagcattcaagagtgaggggcgcaagcaaaaaaagcggggatggatgtcctcgatgccttgggcccctgcgcctcctccattgtttgcgtcgtggcgacattcattggggtcgtttttctcttcgccttcaaaatcatcaacctcttggccttggcgtgccccttctcgttgggagactgttgtatcgaggctgtcattctcgaagcagaagacaggttggcttccttcctgggtgtcgagttggcttcctgggttgccgtcttggttgggcggagctaaaaggagacctacggaggcagagttgtggtcttgagatcaccccctcttggtctccagctattttgcattatatgtgatgctgcgaggattttcctttccccttcagcttcataccattcacattccctttctctttctctttggtctcttctttcttctttggacatatagccccagactagatcttcagtacgatattctgtcttagttcactagcaatacaggtattaattcgaaatttatatgtaaaacaaaatacaacatttatgtactctttgactcgctaaccggaaaccaaaggaatttttagtgtacaataagaaaatgacagcagggaatgacaagaaaagaaaacagatgaaaatttaatgagtggcaaacagacaatgataatgcgccggacatgcacagacataacacgtctcgtcaaacttctatatccagatcagtatacaagtcaaattgaaaatcaaaaccaaaccaatgtccatacctatgtatttacattgctcggccatctatctgtgtatgatcgaaaatcgaattcatagaactcaaccatagcgagcactcagactagcaaaggcatcggggctatggcgaccattctgcaccccattcacatcgacgctcggctgactcatgtgtgtccgaggatatgccgagttcgcgggtggggggcctgaaaagggggactggcctccagcaaatggagtactgtttgctcctacaaaggagggggcgctcattcctgagaatggggagttgttcgttcccatggctggagtggttccggaagcagctcccatcccgggttgaccattcatgccgccaattcctagccctgagggttgctgctgagatgggttgatacctgcttgtgcggcaaggccggatccgctgcctgtggaggtggtgccaaagaatgggttgttggatgtatcaggctgggactggaaattttgctggggctggagttggttctgattctggtgctggaagtttgtggcttgttgggtctgaggcatggagttgtatgggtttgatggttgagagtatgggttcatcgtgggggcttggggttggtactgttgaggttgttgaggttgttggtgttgctggggttgctgagtctgctgagcttgctcggggatggatgtcatattagactgtgtaggacccatattgtacattgaaagaatgttgtttctgtccattccagtgggttgagccatagattgctgggcctgctggggttgcaggtgggactggaattggctggggtagccgcctgcgccctgtggtgtgttgggcgccgcttgctggaacgggttgtgagctcccagtccatttgatggctgcagctgttgttgctgctgctgctgtacttggagagaagcattcggtccaaatggcgaggcggaagacatgaccggcatagtatttgcatggcgaggcggttgaaagccacctgggttcattacgagcggattcatttgttgctgttgcggctgcatttgttggttttgaggcgcagtgttgaagaaagggttcgtttgcggtgcattagggttggggtatgtctgattagccaagccaccttgcggctgcggcggtgcctggtcgaatggattgtagctattgtccattggctgaggcgaggtaacatagggagaccgcgagaatgtcgctgtgaccggaggcgtatagggcccctgatatggagagtgctgcatggagcttgtctgattcggatatccaccagtagagtgagggaacaatggctgggaaacctgcaggccctggaaaggctgtgtagatgccgggttcgagttgagttgatcgaatgggttgtacggagtagtctgtggttgaggggtttgcgacttggccacaggatttgagacagcccgatcaaatgggttgttagaagcctcagggaatgtgttgtcggttgtgacggggaatgggtttttggacgtctcaaacttcgagacgcgtgcggatgcagcactgcttgtcccggccggggtcctggctcttgatgtaggggtgcccccctcacccaacctttcaagtgtttcgaccgctcgatccagatcctcatgcagtcccttgagaaccatctcgtttcgtcggtcattggtgaatcccatctgctgcaacgccgccattttggcctcaaaggatgccgttgttacatcagcgacaggcgcaccaagtcctgttgtcctcctggatggcaatggtggtggtgaccaggtttcatcgtccgagtttggcgaagtcaccttgggcttgccaccaaatcggcggaggttcgaggtagaggatgacgagcgtagaccaaacttgaaaaaccttcctggcttgggcggaagcggaggaggagaaccttcaggagatatgtcatagtccctccttcttggctgcacgggggactgggccctttggctggagtaactcgagtcctccctgctcgggggctttggcttcccattttccaaggaatggtgttgatatttctgccggataaaccgttccatgcacgcatcgtcctcgtccacgtcggtgggaactggcggcttgatgccgcgcgggttgttcaattggttcataatggtgttaccatgcgctttcatgttctgacaaagtccactttgtcagctcgtgacctttgctattgcggggttccagattgtgctcacatcaatttggtctgctgtccatgtgtccatgctcaaagatttaaccttggaaatatgtgtgcccagctttcggtgcagtgtggcgcaacgcatgcaaaggaagatgccaatctatcggagacaagcagtcagtttgtgaattcgctcggaggtaaaggaagcggtgacatacgttccaactagcccatcctattcaaataacaattagcgagatcaacaataaaagtctctggggacgaacctgggttccaggcaccgcaatcggcacatcggtcattgccaggaatggtccggatcagctcccccagggttctttcatgccgcgcctgctcgcgcttgctgataccgggagtcatgatgcagaaaaataattacaagaacaaataaacagaaggagtggcagtaatacaaagtggaataggggaagatttctggttcccagggcggagaagggtctcaattgacgtccgaggggcagatcattccaaatgagacatatatgtaccctgcggagcatacggaggcccagggggtaaagaaatagcagagtagagagaaaagaaagatttagacattttagctcagttgttccaaggttgagttgattaagttagattgagttgacaatcccattctcaatttctttttttccggcatagctttctgcataggcccgatcttctagaacactttaaatgcttctgtactgcagagactcgagcccaggctcatacgttcggaaggataagaagtcacggaatagatatatattattgatactagcgagaagaaaaattggcatgtctggacagcaatgactcgcatctaccaatgcgcctaaaggccgaagccttttcggagccgtcgagaagtcgtaatgatatccaggaatatcttctagtacgccaatatgaccaaccatcctatgatagaggaattggcggttgattatgcgttcgtaaagtgtaaagaaggaaagtctccaatttgcgcggaaattttcgatacaaaagggcacggtcacgtggctgtactagctcgatcacgtgtcctggagattgagataaaaacttttcacctcacagcttgtcttcctctttaaccatcattcgtgtgttgaagactcgagactccaatcctttaatgtcggggattgtcgaggacttggatccaacattcggatgtaaacttcaaaccacataacccgcgcggtgcctacctgtggcactgttcgtctcttgggtgattttataatcgttcgttcgtggaatatcaaaaccaaacagtttttagcagagctgcgtctactccaccctggtgttcatatctattgaacagcaggacttttttacgacggacatccccgatcataatggaaatatattttcaaattcactcttgcgtctatcatatcgtattacttgtcatggatcattgatcatcgtacttattttcaaggttcctcccgagggcatgtacggggacttacgagtaccaacaatagcatttgcctatatcacatgaccacccatactcggctgaactgattttccgtggaatagcatgcgaacgacagctgtagcagtgtttactcccatatgtagatctttcttctagcgcataagcaatggatttcgtcaatcttgccgtacagcaatctgatcggattttctaggtgtggattcaaaatctgctcggaaattcacccaaggaattggcaggcaagcttgcttctcgacattgcgatggtaaacctttaacagcttcgcgccttatgaatggtgcattcaatatatgttaccgagtcgcctttgcaaatggctatcgcgttgtggttcgctttactgccctcggtcgggtctctaatattccccacaacatctccagccgcgaacgttttgacaatgcagcagactatttcgagaagcttgctcgtcaccagctctaccatcttagactacaacgcaatgatacaattacaaatgaggccgactgccgcaagaagtatatcacgcgatgtctttttcgcaagttatcacgtcaggtatccgaggaacactgcagtggtccattccagctttattgcaatgatcttcgcccttgcaatatccttgttatgcatcgaggcttatcgttactggggtggttgattgggagttcatctatgctgcccccgtttaattcacaatgactgctccttggtggcttttattagaaaaaccagagggctgggagcctgatctcgagcaatttctattgcgttttatcccgagatttcgcactttgaggttctcaaagattgtgaggccagaaaaattcaagactgctctttgtcacaatcccaaagactatcgatcgctatggagaagtcattagaaactggattgttctggatttgcctcgctttacgatacagctctatgttcgatgaaatttattggaatttcatcgatacaaaattccatggtccatttacaacgatcgaggatcaacctactctgctcagtacagaagagcaggtagaaattgatgccttcgtggagactaaaatgcaagaggcaagcgagggcaatttggttacatatttacagcattgacgaactagttgatctataaacatatgatactgtgacgcgtttggaagattcattgagagcaagcaagaaaggacaggttttcaattgcaaaggaatgttaaaatggagttaataggaagcttagaagaaatggtatggacttttgcgttggttcgctaattaaagaggagaataaggcatatttgttcacgctcataagaactatgtatactgcgatcattcacactgctaataaaacaacgtatgctctgaccagagcattaattgatacatttaagattgagcatttatcgacttttagtggatcacacgacagcactgtcatagcaacgtacgattcatagacatagtagatagtcagttaggaccatgggtaataaaatcgtgaccattagaaacggtcagttgtgccaaggaatctcgaactcaaagattcatagatagcttatttgacgtcttcactaattaaatatagatgtagctccgtatctagacctcgattcttactgagcaaaccacctgggcccggggccagccgttcgatcaggtaagcagatcagtggcgctgtgggtcagcattggccaaacagcgctgggccgttaataatacatttccgacacctcgggatgtctttctacttacgcctctggtatcaagtctggattgccaataaatgaggacaatctcctagggctacctacagatagccacagtgtaacagtcaacaaaaatgcgagtcatgaaagtctggggttggtgtacggtgatgtatggtgatgtactggaatgcggagacgagacgaaacgccgaggcaatagcatatgtggcccccttgattggctgtgattccatgagcttctgtccaatgtaccgaagtattgaaatcagggctgtactgacactagaaatgggacagcagtacaaatcccccggttcttcccttttctcttcccttgtacttataatcccgcctttgctttcccttccttgagtgcagactcattcgacttcctatctcgcgccctctccgtcctatcacaatggcttcagctgccagaactgcttcccgggccttcctgcgctcgaccccagcgacttcctctttccgtcctgctgcgcgcagcacccgtttcgccatccccgccaatggtgtccgcgcctctgctcgtcgtggatatgcttccgaagctggctctgagaagtctagctcatcctttggcctttgggctcttggtcttggtgcccttggtgccgcaggtggagcatacctctacctgaacgactcctcccccaagggcccgttcgtccccacccaggccgactaccagaaggtgtacgacgctatcgcttcccgtctggccgacgagaccgactatgatgacggcagctatggtcccgtaagtgcagtgcttctgttcaaccccgcaatccaagatcaaagagctaacctagacgtttttgttgctctcaataggtcctcgttcgtctctcatggcacgcaagtggtacctatgataaggaaaccggcactggaggcagcaacggcgctactatgaggttcgccccagaggctgatcacggcgccaacgccggtctcaaggttgcccgcgatttcctggagcctatcaaggctcagttcccttggatcagctactccgatctgtggactcttggtggtatctgttccatccaggagctaggtggccctaagatcccctggagacccggccgtgaagacatggagatcgccgcctgcactcccgacggacgtcttcctgacggcgccaaggaccagcgtcacattcgcaatatcttcggccgcatgggcttcgatgaccgcgagatggttgccctgatcggcgcccatgctctaggccgctgccacaccgatcgttccggcttcgacggcccctgggacttcagccctactgttttcagcaatgagttcttccgcctccttgctgatgagaagtggatcccgaagaagtggaacggcccggctcagtacactgacaagaccactggaacgctcatgatgttgcccaccgatatggctcttgtcaaggataaggccttcaagaagcacgtcgagcgctatgccaaggacagcgatgtcttcttcaaggagttctcagatgtgtatgccaagcttcttgagctcggtgtgcccttcaagactgaggagcatatcgtattcaagacttctgattccgagtaagggaattgctcgaaaattgcctaatgttcctgtctcctttcgtatatacctgtgttgatatccgagtcattactcactaagatcatttttcttgttgccaatggaagtttagattttctccatatttgcatagattagtagccccaattgtattcacagcatgtaagtttcgccctgagtaggatgtagcattagcattggagcaattattcaatttgaatgtagaacagtataccttcatgaccagtaatgagaaaatgaaagagagaaaagaaatagccaacgcttgacatcaacaagtatgggaccgggaggccttttcccaaagtggcgtgcaagggcgacccgccattttcaaattctcatagaaacctctcagtaacaaagctcaccaaccccgctttgcagcacctgctaccccagattatcgcgataatttcctggaatgcacgcgattggcctctccactagactccgaggtctcaatatacagcctggcgcgtacctccggtcgctcgaacggaaacagcgcaatcagatacgacgaacaggtcctgaacagaaggaggaatttatgttgtcgacatgacgagaacggcgaacgctgtggatctatatgaagtcctgtctctctcattcacagggtcttcgtcgacagttctctccaagcagcagatcaagatcgcataccataaagcattgctacaacaccatcctgacaaggcgggtgctgtcgcaagggagaccgggctaggcagatcgactaactctacatctgcatctactccgaaccatctctctgccagctccgatggcaactcatcgcgacaactgtacaccatcgaccagattaccaccgcctacaagaccctatcggaccccgtcctccgctccgaatatgatcgctctctacgtctggacagactgaaggttgcggaacgggagaaaaccggcgatgtgttccacactggcttggagattgtggatttggaggatcttgactgcgagaaggcagagggcggcgacggcgactgctggtttcgcggatgtcggtgcggtgatgagcgcgggttcttggtcagcgaggaggatttggagagggaggcagagcatggcgagatcattatcgggtgtcgcggatgcagtctttggttgaagattctctttgcggtcgaggcagatgaaggatgaagggatgacttgccatacggtctgtcttttcctggtcatcatctcttctctagcataccgttgagattctggccggctctgcagctcatatcttgtcgctgtgcgataaattggcatcccgtggtttcatgtctgcgttggtctatgtctcgtccagagactaggctcgttggttcagacagggtacaggcttggccctggggctgttcgtgttcttctatcatgaacattcatttttccgaacgatttctcttgcgcacttggatctcccccaatctcttctggtttgtacacaccaatcttgtgggaccctgtgtaaaccaagagcttacaccaagcgtgatcttcgttttggactcatcgcacgttgactgagtaagactcaagcaccctactcaatcccaactccgacctcttgtcttcttgttggatctgtcaatcatgcatccaacaatgagcccgaatgctgtaccatagtaccatatatttacctgttaacatttagttctgaatctagataaggatacactcgtttatatatttattttataccttcccctagaggagaagaacaaagatgacaaacaatatatatccaacatcccacaagataaaaacacacttggtaattcggcattcgagttgacctcagtaatcctgcattttcaaaagtatcgaatacttaccatttgaaagaaaacaacaattagttagtatacgttcctggcgttgtccatatgaggttgatggtagaggggctgatgacatatgcggaggcagcaaaacacaacctcacatctttccatcctcttccaccctccattttacactcattccccccaacttcgccatgtctgtcattgagatctcatcgaaggagcagttctcgtcgctcctcacctcctcccgtctggtcgtggccgactgtaagtatttgctacagcgcgatcctgccccgccgagaccctgtcttcccctccgaacgactagagcttcgctaaccttggcctgatacatgaacagtccacgctgattggtgcggaccatgcaaagctatcgcgcctgcgtataacgcgctggcaacccagctctcccgcccgaatcacatcacattcaccaagatcaatgtcgaccaccaacaagagctcgctcaagcctatggcgtcacagcgtatgtgaaattcctcccaacatcagaatctagcctaacccgcgcgcaaattctaaaatatcctagtttactaacaaatgaacgatatctagaatgccgaccttcatcgtcttcaagaacggccgcgtgaaccaaacagtcaagggcgccaaccccgcacagctgaaccagatcgtccagaagctcgcatccgaggcaagccagacggacgatgcagcaggagccggtgaaggaagcagctccggtgagctctggctcggcagcacagtagccaagggctacagcgacatcacagaccaggttaacgtgaagggattggagttgttgaaccgggacacggatacggcagagccgcgcgctcttttcaacagctcgaagccctccggactcgcagcgaatggcaagggcaaggctgctggccaggcggattggacagagagtgacacggacgagcagctgatgctgtacatcccattcaactcgatattgaaggtccagtcgcttcagattacttctcttcctcccgcggacgccgatgccgacgccgacgagacacccatgcggcctaagaacttgcacatctacaagaatacttcgcatgtgcttggattcgatgaggcagatggtattccccccgtgcagaaggtggagatccagtctggtgattgggatgcgaagaccgggactgcgacagtctccctgcggtttgtgaatttccagaatgtgacatcgctggttttgtttttcgttgatggggatggggacagcgagaagctgcgggttgaccgcattcgcattattggcgaggcaggtgcgaaccgatctatgggcaagctggagaagattggtgatgagcctggcgagtaaagatagactacggagaaaaaagcctacgtacgctatggagataagaattgtgagctgtcttgtgtgatgaattttcaagacagagcttggggggatcaacatttgtgtcgactttatgccagtgatgatacggagtacagttcaacgtctaatgagagagccagctggctgtagaaattttgcaaaatttgatgaattgattccattgtatctagagctatagaaaatacccgagggcataaaaaaaagtatgtttgactcccaccaggaggtcttatccttgtgatatcagaaagacccataaaggtaagaatcaatgtgcaattcccttcgtctgtggcgcaactgacacctggggtacatcactgaaagccagactaatggccgtagatgtccaggcaacacgggttatcgagttgcgccgccgcacgaagaagaaaagaaagaagaggaaaggcgccggttgagaatttcttttatgccgggccccggagatttagtttttccgcttgcctttaacggaaacttccaaggatttcggcgcagagactttcattatgtaagccatatgcgaggagccaatttttttttcagttgatgctccttccttctttttctctttcttccataaacatggtcgatgatgagaaatatggattctatgataggaagagactgactccttatgggggcgtgatctcaattttaccattcctgaggcccttttgctgtttattcctgttggggagctcgacctgcaaccagggcgcgcttcgatatcagctcacaatagttgcttccccgagtcttccaagttaggattgcgttttaatctctcaaaccttgcagttagagttagtaacgcatgcacgagcacatccattccatatccatatgcggaacatctattcctgtttcttgatcgtaccatatagatgaaatgtctgacccgaaaccccatgaccttcgaggccaaattgccgtccggatatcaccgttgagacgaaaactgtacccatcggagaaaaaaatcagacaatgtcgcacaagcgtcaaaccatcatggagccccgtatgattagcgccgaagctggtacgcggagccgcaaatatatccaattcggcccgatagctacactggttgatgaccggatgcacccggcattctcgccttctcacaatgcatcccgtacggagtatagccgaaagaggatatagcaggtagctgtatggagtcctcggtatggacacagtgattacatccgcgacccgcagatggagttggagctcttggcactctatttaccgcgatgcaattagttcatctcgttcgtaggagttgacaggtacgtagccgagatcgcaactcttgttttttttttctcttccatctccatactccatccactccactgtaggtttggcggatagatgcttgttctaggaccatggactggcttgtggtgcaagttgtgacttggtgggtatgcggcaatctgtgttttggtggctgtttcatgaacatcaaagctggattgcctgatcgctattgaagattcgggtttgccggaatccacggtgatttctcaagtttaggtttgcttgccggttccgttgtcttgactatgcgcgcttgtgtttgggcttggcatggagaggcttgtactagctatattgaggatatgagttagttgtgttgtgtgttgtacaacttatgttgtagcgagttttctttcgcgaggtaccttctacctacctataacggtaccacgtcttggattcaggttctgtagaaacaactgagacccgctctagcccgcccggagatgagcaccgtccagtgttttgctgttaataacgcacgccattcagactgtgtatccactggcgatggcgtgtcttcaacagcgatttagactggatagactcggactggccgggcgctggacagcagacaagacaaagcaagacaccggcttggagtgaacagagtcacggaatataatttcatctcgaatagaccacgggaggtttgctgtttcatctcagcttaggctgtgatttcagcttatggacctagaacgagctccaaagtcattgatgagatgttgtgttgggctttacacacacaccgcaagagacagagacagccagcgtgttcgcaaaatagcggtcttgtctcgtagttcagagtcatcgccactacggagtagctagaccgaccggcagtgaatctgttacgtaccaaatattgcgcgggaaggtaatcttcttgcctttggggttagacgttagaaggagccacttttttggtttcgagactttatgagcctaagtcctgcgacaatcagattctacccgcgtccaatcgaatacacggtgtcgtcatttgatcttcttttcagtaatatttgcaacgctcttctgaaatgtgttttttttagggatatatgctccttcttagacacgcggaaaagggcggaaaagggcggaaaagggcggaatttgtgaaaacgacttttctatgcataaccttggactcgccgagcactacatatactaactctttgttagcctagggccttctattcctagaaatctcggtcctaatagaccacatggtgattgcaggaaaaattcaataggatagttaggggtgatttaaacaacgcaaaatgtggagtttgtacctgaagtagatgggaactggagccggtcgtcgatcatgatagttcagggacaaaggtaggcagtcgccgaaccggacctctccgagttggatacagctgatacgcttaccggatagtaattagtacacttctattctgtatactccacatgatgtacacgctagatttgttcttcggggacttctagtgacttgggtggggaccgacgcccatagactacgggatagcgcgatgttggagaaggtttgcacctcatgtgaactggctgcaggtgtggaatgtttctctatcatcgtgaagccgcgtacgacaatcctaggcctcatcgggaatactccgccagatgggtacatagtgaacctcagtaccagggaaccatacaagattagatcagatagggcccggagaatcacatcattctggactgggaccccattagtaccagagataacgatactcgtacgacgatctaattattttccgacccactgcgtgtcttggggacagcccgataattggatgaaactatacaatctacggagtatgttggagtcttggtacctgagccaaggaagcattccctttttatattggggtcggtccagggcgatagagatggttccacagaaatgcgaaaaggacttgaaatccaagtgagctacctggttggcgaggccaggctatgccctaatgcatattcccaccacgggctggcaagctatctccgcactcatatatatatattgccgcgtcgcaggctcgtgccgagtccaaaaatccttcgatcgaagctggctcgttgtaatttgtccaatttgtctaatctgtgggctgtaggccgcctgtgtggagagtggggatagtcttcacgcaccattccccattctgccaagtatgctgtagtcgaagcttcataaaactctgtgcctgaagattgcaggatacataataagaagaacgtcgagaaccttccaccggcagagttagcttctcactttacctgatagagtgttagtggtagcttgaaccttccaaagctggaaatatccgaaccgtcgaggaaccatcgcaattaacgagctgataactccaagtggaccgcagactcgatgcgcagcagatcttacctgaaattatccctggcgccccccacgttcttccagccacgttagcacgccttatagttcggtagttattaagtttgatgtgcaacactccgtactccgtgcaatgccgcaccttaagaggtagaaagagctcgaaagagcaagttgcaagcgacgtacggctgatcaattggaggttatccaggtttcagacgatcggctcagggtctggatgccacactgggtctagtgtctcgggtgaagtagccagttacacgcggtcctcgactgactgagatcgcgatatgactctggagtccggagtattttcccggataccgaggaacatatctgaaacacatgcctagagactagcacgccactcttttgactgctaatgctgtcggagtgtggaagttgatacaaattttacaaattagttcttcctgcaattgtgccaattgcgtcgcattgccagacctccttctacagagtgctttgacataggatagagtacaatgcaacaccacggactccgtccatacacagtggtagcgattgcggggccgtttaaatccctgattagccaaaccatgacgatttacccgcgaagaacgatgcgctcatcctctgctcaaccatggttgtgcgactgtgtggaaatgggatgatcgagttcacgccccccgcactttgccgtatgtaacacccatggatggaccgaggaccttggaagggatatttttttttggaactgtgtatctctgctccgtatgggcgtagcagtggcgtcccgtgcgcaactcgcctaacagtagttggtggcagtgacgccacatatgtttggcgtatagatagcgaggtggttttgcggaaagcgccttgtgttgtctgattgttatattaaagatagccgaactgtaaccacctgatattaagaccacaccagattgatatcgactgagatactgagatagcaagatagcaagatcggatctcaccactacaacttatgctgtgagggcgaaacctcttagttctcgtatcggactcatttttcccgattgggaagccatctaccttccgccatcgaggcagtgagctattaacagctaattaatttcgccctttgttattattagcgattccccgtcctcgcctcttccaacagtctcctgctcattccagaaaacttccctaaccggccattttgaggccagtgccctccccaatggggaagtatgtccagaagagagaggtacaccgcgaagtgcaaagtatgggctccgctaaaaatgcgaccatcgccaataatgccccccaaaaagagtcggatccattctcgaaacgcgaaactcgaaaataaaaagagctaagccaagaccgggcccaccttggcgtcaacagcctcagaaaacgcgtgttcttgcccattctgcccagatacggctgcttcggacggtgtttcagattttaacctcaacgtgcggaagtgcccgcctaattatcctgcacagttgactaaattaattgcaaatctcaaacaatcaaattcccgagtcggtttcgggggaagggttgtgtacgtcacaaagtctcgctacttttcgaacactttccctcaaggtcactgctatccgctttagcttctttttaattaggtacatgcgccacttaattcgttccttcgttttagcgtccagtggccaacggtcataaaatctggggtccttgcgcgtcttgggcatctgaattggggaacttctggaattggaatggttcctgtccactttggagggctagtaatctcaagcgccccagcgctggtacccgcgctggtctcgggatttgacaaccctacaccctacaccgtagtacaccgtagtagagcctacaccgtagtagagagtgccagcaacatagtagtcggtctggagggctgggtctgtccattattggagtatacggtatagcatggcaaacactggagacttgcaaaagcctttttccgctccatggcatgattgagaaccaaactctttcaatcctttaataataacatatgatgtattgtatgttgtttacagagtacagagtactacgcgaacaatgaactttttttttttttctagcctctatctagaagcctcggtggtcccatgtgaatggcctcggtggtcctcaatggcgaactaatccctgcgagtcttctgccaagaaccgttgacaaaaacccaagcgcagaagggccgtgaattccttccggatctactatccacatctctttgtgacattttgcgacattttaagtctcatatcgtctggtgtatcccaaacccacaatccttgtggcgctggcacctacgtttgcggaatcctattctcctttggccttgtggattgccaattgccaattgtgggtttggatgtgtaggatacggtgaatccctggtggaccagggacgttatgctcaaacccaccgatgcatgggagatcctcaacggtacattacttccgtacctatcgcgacatccaaatctgaacccttgctgcgggctctctcggtctcgccccctccggggaaagactaatccgagactctgcatatatctcgtccggggttaaccatgacagatagactgatcaatttttgctgacgggctgatcctcgaatatgggcatattatgatcgccaaacggctacgcgcatcgcagacgggaagctctcacagacatccccatagttaaccgccagcagccgagcatgattcgtcggggaactgggaagatgctcgcatcctcggccaagcacaggttttttttatttttccaaatcgcacggtcgattctgcgatcagggcgagtccattttacttggtaattgggagtagatcaaaattgatcaatttgcctctttgttttgctttttcctctttctctctggacaaagaagaggtgtgtactccgtacaccgtcaatcgtactccgtacacttcctccacttgggtctccattcgagagccacttgggggggtccggcttccctggatggccttccgcggcctttagttggaaactaggcactgcccgcccgcttccatctccatgttctccactctgcctaagagctggtgtcaaggctagaagggccgttgggtagaagtgatttggaaggtagcttgttttatcccgcgtggaagtcttgatttatttcccctggacttttctcggggggagctctctgataggctcctgggcgtggagctattggagctgttggagctctcgagtgacgactagggaaatgtggacttcaattcaatagcgcctagatttcggcttccggcttcaatccatcgttctacataagcgttggcaacgagcccgtgggattcgtaaaagccaaaataaagtcgtgccgtctgtgcgacaacggtggcggcagggattcgggctatcaaaaagtaagtccatagtctcaaggccagggccaaattttgagatctcgagtcggaactctgtaggctcacggaataaagaaattgggtggcgcaaaggtactacggagtaattagcatcaagattagaaagtggatggatatggaccttggaacttctcaaagaaggacttgacagccttccatgcatgacccttttccatgtccacgggaagtatctaagcccaaaaggaaacactcgaggcccggagacccgggtgtctccagtgtgtctgtacgagtacggagtctccatacttcacaccgtagactatctttgttagagtggaacggcaatcaatatctatcagtgactctccaatttccccaagtccacattggcgtgctttgtatgtgtctcattggtagcggatgaagacaaatctccgctggcgccgacgctttgcctgtgaagggattagccaattggaggggcgcactatctttagaagtggccaatcacgcacgagatgctccgggttcctgacattccttaagtgccgggatattagtgtcggtttttggtctggactcgagggagaaaaaaaaagggacgttggagattaggattagtgacttggtgacttgggaaaatttgaatgattttggtggatagtttgtatcttaatgtacggcgtagagaatgtgccacgacctggaaaataagaatagaactggaccttgcttgcgtggccggttactgtatgtcattgggctgtgttagtcgatgtgtcggatgatgcatctgtttgtgcttccgagttttcaacttgggatgagaccggtcacagacaacacatgcctaccatagtgacgatgacgcccatggagtgcgctgacatatactaagcgcatattcccccggatctacaggtcaggtcagtgagacaaaaagtgctatcacatcaccctgcaaatcggaacacatcacttagcgaccacattgacccaataagatgcatcataggtgagaccccattaacgagcatctcactaatgtactggacttgggccccaaatacaatataagcaccaatattagccttatgtctttgatcgtactttagcatatgtagtctggggatccaatcaatggacttagggcaaccgaagtcggtacgaagtacaccctcgacgatttgagcatcaaagggaactgcatctgagccttgcctttcgagggccaagcacccaataagcatgttttatgtagctgcctgtgtgatcttgccccccacaggctggttcctgcagtaggccgcacaagtagactgaaatctcgcctttctcggcttgcatattgcatacaacataggaattagtgtttcctgtttttttttctttcttgctttgacgttttgctctgcctgaaatattgatgccattgacgtgtacaatgtgagatttgtctgtatggaccaaatggcatagcccttgcagcgaccggacaataaacacgggtttgtttacttccaatataggacccatgtggcaaaccaggtacgtacaacttacgaactacgaacgttatactccatactctatataaagatcttcaatatggatgggctccgaccactttgatagggttcaacggcttttgattttcggtgatgaccgcaccgaggggcaatacctaggtcatatgaaatttggccaggaatgcaccgagtaagcactgtacggccaatgccgaccgtttcacgatcgaaatcagatggttgcacggtggtcgccaccgttgatagcctgatcggcaagtgctgagcgacttggggatgggcagcctaaactggcaactgattggcggggccttggggtcttaagttttccacctgttgatcacggcggaacataccgtctggagtggacagatgggaagggattcttccgttgttaatttcctatgtgcagttggatgttgcctgccattagaagctttgcaaggtacctaggtaaccgtacagggtactccgggggtacattggtctgcggtaccggacgggatgcgtgggcccccaatgcttcggggctattggttcccgaaaaagcaatgcgaaaagaagaccgtctgggttagagcgctcttatttgtccgacatcgccttgataagacggattgagcaattgattagcgctgtcaccatcatatagtccaatggtcatgcacctcgtggccacacctcaatttttagatcaggtctcgggccactctttttgcctctgaggactttgtccaaatcaaaaggacggccaaggtatactgtaaacatgtaaacagccccggtagtgattgaatggtacggccctgcacttggccgaggtgtaggtacaacaccttactcctttggggatgaggaccgaaacggtacttgggtcaagataataaaaacgatgtattatcataaataaaccaaaatatggaaattcaatttgatttaacttaattgttcctgagtgctccaccccaccgagcccactaaactcctccccaatcaatgcgattggccgcgtctgacgggactgagcacttgatgtgcacccagtgtctttcgcaatcccgccccggactggaatatctcttattcgattattcgattattgcattattggtattttcgatttaatcggaattcctgagacaaattaaaattcagaaaagaaaaagcacccggttcctggcccacacccaaactagtgacccggcaagtagaaaatagtagcagatcactcatttatccaccgtagcctgctatcttccctcaattgtcttctctcgctcgctttttttttatattttccccgctgtctattttgcatactcacactctctctatccaatcttttttttatttgtttgactattttgcctattttgggttgggggtttcctattggacttatttgggatcctctcttctatatcactcactctccttcctcaagtactttgtctcccggttcccagaacctgtccttcctttctcgacacactcattcatcgtcaacacatatacaacctaattgcttagtccattcattctttcggactcgaatcacttataatcctactaatctaccgcgggagacttgcaattggactttcaaaaacacttcaggtatgtagtatatctctataacattggtctgcctcttgcttcttgcttctaactcatccttgcagcatcacattcacaatggactcaccatacaatatggcacccacctcggtgcaaggccagccattcgcatactactccgactcacagagacaaggccactaccagtcagacatcccatactacagccagatgcagtatggccaagagcaaccgctctacacgtcccagcccatgatgaacatgcaccagatggccaccaccaatgccttccggggagctaccatgagcctgacaccgattgcctctccacagccctcacaaatgaagcccaccatcatcatgcagcagggttcgcccggcttgatgcccttggacactcgctttattggtcacgacttgtactccttcccctcgactcctccgctgtccgcctcgggaagcaccatcagcagccccccgtctgctcatggcgccctaccaaccccgattcatgacacatttttcaccttcgacaaggtcgagggtgtcaaggagggatgcgagaccgacgtgcaccaggagctcctggccacaccgcagtgggcgcgctctgattcgcccccgatgacgcctggtgagttttatagatcacactttgataacggaatgtggatcgtgggaagcaagggcgaaaggctaattcatcctacagtcttcattcaccccccttctcttaatcacatgcactccgaccttctgtctgcaacatcctgcccctcgctttccccctccccctcacccgtgcccaccgacattcttgcctcccacaatctgggatcgagccagtctttctgcgatccccgccagcttaccgttgagccctgtgttcacgttcacgcacaggatctccctcctctaccgaatctctcatgcgaggaggaggaacctcgcgccgttgttggcagtgcgtctgtgacgctccccgttaacgagaacccatctccctctttcagctcctcgacccaggatcctctgagctcgctgccgacttttgacagcttctcagacctcgattctgatgacgagttgaatcgcctggtggaattccaccctgccgccaatgccgtctacatgggtggcaagcgccagcgtatgcacgcctacctggtggaggatgatggattcctgagcgagcacagcctcgaagactcagatgattccgagactttcttgcccaatggtttgccatcctttgagtggacccagactgctcaccctcaggccgagagcgaggaggaacccatcgaggagcccaagatcaagaagcgtagcaaccgcaagtcccgtaagaccgctgccgacgaagaggctgaggcaaaggcgctggccgcctgcgagtcctctggcgactgctgctctgatgacggatcagttgatgattccgagtctgctcctatctcagtcaaccgccggggccgcaagcagtctttgaccgaagacccctccaagacctttgtctgcactctgtgctcccgtcgcttccgtcgccaggaacacctcaagcgccactaccgctctctccacactcaggacaagccgttcgagtgcaacgagtgtggcaagaagttctcccgcagtgacaacctcgcacagcacgcccgcacccacggtggtggctccattgtcatgggagttctggatgcaagcgacgctggttctgtctcattcgacgatcaacatgacgctggtgcccttggccaagtcatgtacgaggctgcccggtctactgaagtcatcggtactccccccgtggatcgccgagcagcgaagaagcgcaagcgtgacttgtcctaagggacttttcatgatttttcttttatgagaccaggagacttcctactgcatatataatacatacattcttcggtcggagtcttttattgggagcttgaccatattggtcttgattgggtttggcgtccgggcatttacactggtgtcggaaactggatcatcggtgcacagcaacttgcgttcccttttcatttagcgttttgacatatcgcacggggacacatacacacaggctggattgcctcgaacggttcttttggtgaaggcacatgggcgcagaagagtccaggaagaaaaaaaaaacgacatataaagcgatgatggcatctgtcttcggcagtgctgggaatggtgtgatattatttcctttgtcaccttgttcttctcttttttttttcctttttccttttgtttcacttgttctctccaatatcttctggaccagcacattcggcgtgagcaatgtgcctcacactttgaatcttcgagatttcccttcgtgtactccctgtttacttcgattcttgtgacttttttaccctttttttctttttctccttcttctaccgtttcgttcatgcttgtttctgcttattcgatgtaatatttttggtgcttttttgctttttatctgcttttgtgtgctggtcacattcgtgtataagttaattgacccttgcccatcactcatacccccttgtattgcattgcccctttgtgttggttccaggtcacatctctagatgttgatttacatgcatcaaatcacaagcataatcttactacactctttcctggtaaacagtattgtactaaaaatagcgaaacgtaaagttagggcagtgatatctgatcccgtgatatctggtctcgtgacctcaggatgtcgcactgatcttatcgctctatcgattatcgataacctcggaaactcacgcaaaggtggggacagcaaaaagtacccccccatcacccgcacccagcaacatccaccaaattcgcgaaaaagagaccttggactccacacctgggcgtatagttgttatgtctgcagcacagccttcagccccagggcttaacgtgattgccctaatctccggtggcaaagactctctctactcgatcctccactgcatccgcaacggccacaaagtggtcgccttagccaacctctacccagaaccgcggaacaaaaccgcaagcgcaagtccaaaccaacgcaaaaatgacgaagaagaagacatcgatagcttcatgtaccaaaccatcggccacagtgtaatccctctctacgaaacagccctccaaatccccctctaccgccaacccatcacaggcggcgcagtcgacacagcccgtatctatggaaccagagccaccaccatggacgagaccgagtctctcgtcccgcttcttcgtcgcataaaacaggctcatccagaagccaacgccgtatctgcaggcgccatcctttctacttatcagcgcacgcgaatcgagagcgtcgctaaccgcctgggtctgattcccattgcttggctgtggatgtatccatctcttccagcccctacggctagaacggccgatgccctggcaatacgccaggcggggctgttggaggatatgtcggccgctaggtgtgatgctcgtattatcaaggtcgcctccggtggcctggacgagggcttcctgtgggagaatgtctctggtgttgggagtggcggccgcatgatgcgaaggtgtcttgtcaaggctatgagtcggtttgcagctgcggaagatatccgtggcgcggtgctgggtgagggcggagagtatgagacgcttgcgctggatgggcctggtttcttgtggaagcagaggatcgaggtcggtagtcgggaggagaaggttggtgatgggggtgttgcgtttgttaggttgaggggggctaggtgtacggctaagagcgcgtgggagattggcgatggcattgcgccgagtgatattaggcggcctggattgttagatgcggtttttgagggcgtgttaggatctgcattggaactttttggctcgcttgacgattcgaaatcgcgggcgatgacgagtactgctcggtcgccagattggcctgtctgcgagcccgtgcatcggttgtctggttctacgtggactatttcgaatattgttgcgcccgaggctggtcccggggcaggacagcagatgaaagcgattgcatacaaggtcgagaaagtgctcaagtcctttgcccaccccaagtccggttcccgatcaacagacgacattgttttcgctacggtgctgctaaattcaatgaccgactttggaccaatgaatgacatctacgtctcgctattcaagaagcccaatccccccgcgcgagtgacagtggcatgtggagaccgtctcccgtctaacgtcaaggtgatggtcacattcgtggtggacctgggtgcaagggaacggcgccaggccctgcatgttcaatccaggtcatactgggcgcccgcaaatattggaccatattcgcaagcgttgtcagttccgttgcagaacgatagcagacttgtgtacattgctggtcagattcctctagatcctggttctatggacctggcgcgagtcgaggggtcaagttcatggattgaaaattaccgtcttcgagctgtactggcccttcagcatctctggagaattggtgaagccatgcaggtaaactggtggctcggtgcggtggccttcttggctcgtggcgaccacgctaatacccaggcgcaagtggcatggcgcctctgggaaagaatgcatgctttacctgacaatgaggacgaggatgatgacgatgggccacagctggacgcgtgggatatcaaatatggccgtcgcacagaggagctgaccgatacccctgtgcccagtctgccccagttcactgctcttgttgagtctcacacatccattccaccattcctggctgttcaagtggatgaactaccacgaggaagcgatattgaatggcaaggtctagggggcctgtgcgagcaggtcaagctggacattaaaggggggacatcttccaccaccatggacagtcaatacaagtataccaatatcgagatcgacgcgggttcgtcggacgatacattgaagcaaatattgagatcagtgaaagaggcttactgtcgagattccagtctgtctcaggctgtgttatataccacatacccagtgcctgaagcttcgtggccagtgcaggttgtgccgtgcagatcagtatgggggcgagaaggacgaaggttgagtgcaggtgtggtcctgcagcagtttagttaggcactatttcacaacgaataaagccactcaatttaacaaaagatcagacaaaataatatttaggggtcaaaagatcgttaaacgtcgatgctctactccaccgatgatcgatgtacgcactgtccgctcgcatgtgataaggcaaaatcccttccgcattcaggaaaagataacagtgtcattctgcctccgccacgttctcaatatctccgccatcgaacttaaacaggactaaattgttagttaccctgctctttttctggacgttatactatcctccccatacattgtacatccttatcccaccgcggcatgacgtactcatcgacataagcatggcgccatgagttcgccgtggaaagaagaacaagaagcgacgtttcgcaccagtacacctctggaccccgaagcgttcgccgaagacctccgactatttaatcgctccccccatccataccacagaagtcgacgcctcggatcatgcactccctccgacggcgaccgtctccacccgctctcctcctactccaggtcctcacgaacaaccagcgacagtggcacagaggcagacgatgaaagcaccggtattctaaggggattacctgccccgcccctccgtcctcgaaaaggcctacggtctggtggggtgggtctcactgaggtcgatgactggctgccaagtctgcaaccgtggccgtcatttgtgcggcctattttgcggacgtcgcggcggagctcggaggaagaacttgaggaagaggcctttgaggagagactgaggttcaggcgccagagacgggtggaggttctccggcggttgttggaggctgcgcttttgttgtctgtgggtggcgtggtcttgtaccaagaccgggcgcgctccttagcttgggaatggagaaagggtatggggaaaactgatattgctaccaaaaatctggggcgcgctaattgatatacagagcttgctgctcatgccctcgtggtcttgggtctctatgccagctatccgctcgctgttcgagcatcgcaaggccgaagctggcgcatctggcgcatctggtccacgaaacggacatacttctcaatacccgcgagcttcgatccggccccccttctctatccgattcttatccccatcttcgtctcgttatcgctgtccaaccatctcccgccacttatcatgcctaatatcatcctcagcctctcctctttaccaacgcctgttataccgttccagaaccgggcgaatggatttgataacctccattggatggtctctatgattcccatcctcgtttccgaacatttctcctcggaccatactgtacccaaaccattgacgcttcgcgggctcgacgcagagtctttaatacttcttttccctttgcatcaagcgttgatacccactttagactttttgttgacgaccagcattcttcccgctgagctgcagcttttgacaactgctttgatcaacttgtacttgtttgcggcctctccccagatggagatactcaaagccttgttatggcttggaggcatgtgtttgtttgcttcttgtcgacatatactgcgttgggaggtttctttggctagaattcccagctggaaattccgccgcgccccacatggcgcgcaatctccccgcaaattcttgaacatgatggaccatcgaatttgtgagaagttgagtagaacggcgcacgttccatcggacgatgctacatcggacagcgatggccctaatggcttcatgttttcaaggccgcgcaagacgaagaccatgcaggataatcgctctttccgcccatcggcagagccgacatctgcagtcgaccaggtcacgacggaggcgattttcgagaagcatgctcgtattgtgcatcgacgacgccataccatatctacattcgacgaagtcgttcgagaggaacgtgtccacaccacccccggtggtagacgcaagaaaatgatgggtcctggcctggcctccttcctctcgctcacttcagcccaggcacaggtccgaaaatggttgtacgcattttacgtgtatgttctgtcgctgattatcattcttgggcctattcgaaagtacgtagcagagcacgcactacaaggccaggatccgttcggttgggctatcggctacctgctgggaaacttctcgaaaatccgcttttgggtgcttatgttgaaccttgaatactggatcgaactgccaccccgccctgatgcagataatctgagtgcctcctgcttccttgggtcggtcgaacatattcgccaggctacttttggagctgccgtgacccgtctactactcagtggatactgcgcgttggtactactgacaggcctggctattgtggttaagctcagctctgttgccgaggttgatacgcgccgcaagattttccacggcatgatggtggttatgttccttcccgcgatttttgtggatccagccttctgcgccatggcgctagccttggtcctctccatattccttctacttgacctattccgcgcatctcaactacctccaatttcgcgaccgcttacctactttctggctccgtatgttgacggccgtgatcaccgtggcccggtcatcatctcgcatatattcttgctaattggatgttcgatacccctttggctgtcgctttccgatctccctcggactggcctgggcccctgggccggttgggaggtaccgtcacgggatgtaagcatggccagcggagttatctgtgttggcatgggcgacgcggctgcatccctcattggccgacggtacggccggctgaaatggttctggggaggcggcaaatcacttgaaggcagcattgctttcgttgtagctgtcacctgcgggctgatcgcggttcgtgcctggttggtgctcggtggctggcccgtgtctgggctcgaatcggctgcagtgacagctttctccgctcacttctgggcctggactttgctcaaggcggttctggcggcagccggaacgagcgccaccgaagcaatccttaccggttgtaatgacaatgtcgtggtcccagtggtgttatggctgctggtgcggggtcttggcgtctgatgtgccacgttgatgtgtataaatgcgcgacatgtttgcttcctatttcctgacctttttttcatttcttttttttgctcggaggtttgcgtgtgattatttgcctatcatatccctacggcattttgtatagtatggtggggtacttagcccgaggatgtatagattgacctcgactactcaaccagagaccatgtttgggtgcctatactagcggcgcgtcattgcatatctgccttgccttagcttcccccctttctctgaatttaaccaaccgctgcgccatgactgggagccataggctgcagataagcttccgtcaccatacagttccatcgtgttttgtgatcgatcacctacctttcaatttggcagtatttatggagtacaggaagatacgaagattgcagaagacatcctccgtttatagaggagccttgctagagtctagacactatatatagagcccaaccccacagaacgcatacgtatatgtatttcttcaccccctagtctccggtataattccggtatccgtgatctgccttgccgatctcggccttatctaatcgataagcacatgacctagatcactgcgatttggacactcccaaggttcttttttgccgtccctggcgctttaaagagggttgttctcgatattccctataatttggacaactgattcatttcctctatcatttgtctctcatctctcattccccccagacttccctgtaccttttcatcttatcgggcagtccagatcatctccacccctctgaccgccttacgcgatcatcgccgcttgtcactcgttatcgttgggtcacaccccccaatcgtggagtatccctgggtcttggggctctcttcccgtttccaccatcacatcatcttgctctttcattaggacttgtcattttgcccccttagatctttggttctctccatattatactcaaatctcctaacctcccgcccttttggctattctgcatctcacctctcaccgctttaagtgttttggatcaacttgtgtttgcttccttgaagtacatcgttctacatcgacatcatttcttataatctacccgagttcaccggtctcgttccacggcactcagttgcagtaccttcccatacccattctcccggcggttcctcgtccttccaggcttcccggaggcatcgtcatccttttcatagctcccctgatgggcctctcgagtcgatcgttcctattgctgctgctgaggtagttgtggttgctggggtgtaactcgatctgatttcccccagcgttagtctaccagagacagaacaggcattggcgtgcccaccgccgtcatggcgtcccaacattcgaggagatcgcgcgaacccccccgttcagagatgtcgattggtcgctatacacggctcgatgagatcgggcgaggtagtttcgcgacggtctatcaaggtatccatacagtgagtcgtgccttgtcttctaatatgtcaagttgatggatgctaatcggttcccatcacagcaaacgagaacctttgtagcaatcaagtccgtgaacttgtcgaagcttaacaagaagctcaaagaaaacctttcgtccgagatcgatatcctcaaggggctacagcacccacatatcgtggccctgatcgactgccatgaatcaacatctcacattcacttggtcatggaatactgtgcactgggggatctttcgctgttcatcaagcgccgagatactcttggatcacataaatacactcgggatatgattgcaaaatatccaaatgcacccggcgcctcgctcaatgaggtggttactaggcacttcctcaaacagctttcaagcgcactgaaattccttcgtgaccgaaatctcattcatcgagatatcaagccacagaatctcttgttgtgtccctcaccttcgtcgtatcggaccgggactgctcaggtaattccttataaaggcagcgatgactcttacgagcctatgacggggcttgagtccctccccatgctcaaaatcgcagatttcggcttcgctcgatctctaccagccacttcactcgcagagactctttgtggatctccactgtacatggcacccgagattcttcgttatgagaagtatgatgccaaggccgacttgtggtcggtaggtactgtgctctacgaaatggtggtgggtcgacccccgttccgggccacaaatcacgttgagttgctgcgaaagatcgagaaaggagaagaccgaatccgctttcctgaagataacccggcctcagatgacatcaaaaagttaatccgaggtctgctgaaacggaacccagtggagcgattgaacttccctgagttcttcagcaacaatgtgataaatgatccgattcctggcttggtagcggatgaccttccagaaccaccacaatcgccacggccgaggcagcttgccgcaaagactgaagaatctccttataatactgggcctgaggacagacttgcatatcctcccggtccaagacctgttgcaacacgcctaagatcaggaacgccgccgaccgctacacaaatgcgtcgtgtgggaagcgctgaccggcctgctcctggtatttctagggagcaacaattgagagctgcaccagcccaacggcctggacctgtcagccttgccactgccccgggacgccaggagcttaccgaacgcaacgcaactactgcggccgtcgatcggcagagaaaccggaacacttacactgactcttccaaagctagtgactcaacagtccgtgcccaggaggcacgagatcgcgctgcacaagaagtggcatttgagagagactatgttgttgtcgaaaagcgggctgtggaggtcaatgcctttgcagatgaactggctcatagcccacgccttcgaggcggcctttctcgaccaggacaaactggcgccgccggccgtcgggcaacaacgcagggtctacctacagtgtcgccatcttccccgcatgccaatgcggctaaagccatgcaggttgtttcgggtcgttcgcgagcagattccatacatcagcgccagcattcctacgagcgacgttacgggcaaagccctacgtcggcgacctcggcaatctcgaaagcactcaacatggccagcggtcgtctgttcaaaatgggcttctctcctcccctcaccaaaggtgggcgatctccgcctctagcctataaccctttccccgcctatcctcctacacatgccagtcttttgatcaccggagacggctccaaacccaatgcaaccgtagatgaagattgcaaggcagttcaggaaatcgaggaatgtgccacgcgtagtgacgttgtcttcggatttgccgaggtcaaatataaacagcttgtcccgctagcaccttcggcaccgactgatccatctgcgagacctatggacacaaacattgaaccagactctgccgattccgatgatggcctgacagttgatgctattgttacattgtccgaggaagctttggtactatatgtcaaggctttgtctttgcttgcaaagtcaatggacattgctggggcctggtggtcgcgcaagaacagagaagaggcctatggggagttccccgccaaagacagcatgagcgcagctgccggtacccggatcaactacgttgtgcaatgggtgaggagtcggttcaatgaggttatcgaaaaagccgaattcgtgcgcctaaaactcatcgagggtcaacggcgattaccaccagatcatcctagccatccagataaccattccattggctccaccgccggctcgagctcaaccgccgatgtagtagtgagccccggcgtcacagcggagaggctaatgtatgatcgcgcacttgagatgagccgggcggctgccatcaatgaattgactggcgaagatcttgcaaattgtgagatcacatatgttactgcgattcgcatgctcgaagctgtgcttgagagtgacggaacgcgatctattccgggtagcaacgaacggcaaagcggttcgcaacctggtgacaagataattctggacgagctgcaggtggaggatcggcaggttgttgtcaaacgtgagtcttgtgcaagtccatccggcggacatatccaaaactaacaccttattctagtcgtatccagtatgcgtggccgcctcgcatctgtccggaagaagttagctgttctatccaagcgatcctcggcgccgactccaacggggggcaagacacctacatccaccatttctccggttgcatatgccacgggggtgacaccgcctagatgagcactttgttctcccccgagatatccaccaaatctattgggattattacgatattgttcgattcagtagcgtcatgattatagccttatatgtataaggttaactcacgacgctaacaattgaccctatttttcacccgcccttttatatatggtaacctctggctaaccccaatgccatgttcctctttttgccatttatctgccacttacgtttctacgaagactaatttcttcgttcatattcttcgatctatttttccagttcacctcttgccatatatcccacagcacgaaaccaggggagttcttattcatgttatttatgtcatgtcatgccttattgcttttttcttcctttactttttctttacctttcttgtcctcattttcggattggcgtttgacccggggacccacggtatacagattggcactgagtttttttttgggctgggaacgcacaaggtcatggcgttggtgtgctccaatattggatttggtgcagatgctgccagatgtattgtacatagaaattgaggaaactcattacatttttttgtctctatactgcgtaagtaacttgcagctgttataggatatggagcacgagataggtatgtgctctacaggcttggctaaggttggcagatatttacaaacgcaagtaaccctgacgatggcgtgcttgactatgtgtcataagtctcagaatttcttcctattcatttaacaccttgggcctttgcctcttggctttttctaggcacagcatattccctcaaagagatttatatgatctccctgacacatgtttgagcctaaaccattgccgaaatcactgacccgacctccatgtactatgaataatatcttgcatttttgaaataaccaacagaataactgccagaaggaccatgtttaccgtagttttaccacggcccgtcccccaaatgtatggatcctcagcagcccactcaccctggtcaccgcaccaccggtctccgaggcttttctttgcgttttctttcattgcgccatgatggttaagacagacgacatgaatcatgcgctgctatcccatttccaagacaaatgtatgtctaattgggttgccaattttcgtgcaatgtaacgtcggcatcgccaggcaatggtgcgatgcagcccgtagcccgtagccttgcccaaggcttctggaactcttccatgtgggccggattatacggatgaaacccacaaactctgctgggacctttgcctccatctggtgatactccgtacgggtcttccaacttgatttccagggtagtaaaaggcgatgcccagccgcaaggacctatggcatcacatttagtactagcacctcatttttgcgccgttgctagccgtcctcaatttgcctcttggaagcgcagctgaatacaaatactcatcgatcgattccactgtgtgggtagtgacttgatctgcataacctaataatggctgaacgggttgaccctgttgttgaggcttctgataagtcgccagtatttgctacaaagtcggccggagatgacggcctccggcgagcagatggtatttcgggattgtgtatgttcttctctatatcgagtgatggctgcgtgacacctctaatcgttctgcgttcagatgaaggaaatatcttcgaggcaacccccgacagccgtcgtcacattggagtattcagtgctgccctcttaatctttaaccgggttattggtacgggtatctttgccacaccaagcactatccttgcattgactggcagtgttggtctctcattgttcatgtgggttatcggcactgtaattgctctagcagggacggcagtatacctagaatggggtactgcaattccaaggtatgttattgaacgaaagtatcagagagaagacttgactgattaatctggctgtatagaaatggaggcgagaagaactacctcgaatacgtttataccaagcccaagttcctggccactgccatgttcgccgcctatgcagtattactcggatgggctgcaagtaacagcgttgttttcggtcaatatatcctcaacgcagcagaagttgaggttggacgatggaaccagcgtggagttggcatggcctgcctcactgccgcctttcttatccattccgttgccctgaaatggggtattcggcttcagaatgcgcttggtgttatcaagttgattgtcgtcgtgtttatcattgtttctggttgggcggcacttggtggccatacaaaggctgagacgccgcataacttcaaaaatgcgtttgaaggcaccaagggaagtggatatggcattgtcatgtcgttgtacaacgttatctggtcctttattggctattcaaatgccaactatgtaagaacatgaacatatgagttgcgtctagatcacattgctaattacatttacaggccttgagcgagacaaagaacccaacccgtaccttgaagattgcagcccctgttgctatcatatctgttggcattttgtatatgtttgtcaacatcgcctattttgccgctgtatcgaaagaagaaatgctcgggtctggcagcattgtcgccgctgtgttcttcaggaacatgttcggcaaacaggccgaaagagctatgtcggtcttggtggctctctctgcctttggcaatgtgttgtccgtcatcttctcacaagggcgaagtatgtattctcacattcacatttgaacggtatactaatacgacttcgataacagttgtccaagagctcggccgtgaaggtgttttgcccttttccaagatctgggccagcaactggcctttccactcgccagccgctggcttgcttgaacactatatcgtctcggtcattatcatgctcgccccccctcccggtgacgcatacaacttcctcctcaagtatgtgatttctgaagacaccgcaagatcaatactgaccaattctcccagtctcatctcttaccccctttccattgtcaacttcttcgtggccgctggtctcgttcatatctacctcaccaaagagaagaactaccccaactggaagcccggtattcgtgctacactaccagtcaccatcttcttcatgctgtcaaacctgtatctcgcggttgcgccatatgtgcccccaagcgatggccaaaatgtgtacgaacagctaccttactacctgcactgtgtggtagcccttgcgcttttcgcagcaggagcaatctactacgttgtctgggcggtgttgttgcctcggattggtaagtatgtgcttgtcaaggagtccgtcgtggatgcggatggttggtctcgaagtgttttcacacgactaccacaggcagaggcagtgcgttcttagggatactgggtgtgagataaaattgggttgcttgattttggatttatgtgcttgggagatatattttgtcatggtgacttttcaccagaccttactagtaataggtaatagcagaatagaaccattctttcttcacaacacctcattaccaactgctctgtcatgctgtgacatcagaacaatgaaccgcggtgctgtatgttccagtcttctatggtagcccacccaagagaatcaattgaaactgtcatgagcccctcaaacttgctggtatattgtcttgcaaaataacagcataaaagccatttccaatcagttgtctgtcatatagaaatgagacatccactgggtgaatttgcgtgatgaaggaaagaaaagaagaagaagaaaaaaaagaacaaaaagcacaagatccactggcattgaccgccttcgcatctgccggactctgatctcatgtttttctttctttttggtgacggttggtctcaagtccgtggttcaattgatctcacatttggttctatttaattatttaatactaataccctttactcttctctttctttcctttttctcccggtattcgggttcgtggagctgatgcgccgcttctccacgcgtgtgctgctgcagcaagcaaagccaccgcttctttccgccagatctcccctccccctctttgtttccgctcgttctcctcaagcttcgattcctagatcaatcacccaacgccgctctccttcgccgctatcacagaccgccaaacgatactgttcctaccgcagaatgtgtagctcacgccgcgagacctccgggtcaaccaacgtcaagggcggccgtgaggtcctacctacaaacgtcaagccccagcattatgatttaacactagagcccgactttgagaagttcacatacgagggagcagtcactatcgagtacgtcatttatgtataatgcatactgtggtgcatagttttatatgttactaacatctacatctagcctggatgtgaccgaagacaccgatttcatcaccctcaattccaaccagatcgaaattcatagcgcaattgtctcatccaagggctcagtcgtagactccaagcccgaaatttccttcaacgaggatgaccagaccgcaaccatcaagttcggccaggctatcgctgcggggtcggatgcccagttgaagctcaccttcactggtatcctcaatgataacatggccggattctatcgatcatcatacaaggagaatggcgagactaagtacattgcatcatctcagatggagcccacggatgcccgtcgggccttcccttgtttcgacgagcctgccctcaaagccaagttcactgtgaccttggtcgcagataagagcctaacctgtttgagcaatatggatgttgatactgagaccgaggtccagggtggtgcgaagaaggctgtgaaattcaccacttcgcccctcatgtctacctatctcgttgcttttattgtcggaaagctcaaccacattgagacaaagaacttccgcgtccccatccgtgtttacgccacccccgaccaggatattgagcacggccgtttctcgttggagctggctgccaagactctagccttctacgagaaggcatttgacagtgattttcctctgccaaagatggacatggtcgccgtgcctgatttcagcgcgggagccatggagaactggggtctgatcacataccgtattgttgatgtattgctggacgagaagaacagtggcgcctctcgaaaggagcgcatcgctgagaccgtccagcacgagttggcccaccagtggtttggaaacttggtcaccatggacttctgggatggactgtggctcaacgagggttttgctacctggatgtcatggtactcttgcaacgccttctacccagagtggaaggtttggcagacttacgttatcgacaacttgcaaagtgctctttcgcttgactcgttgcgcagcagccaccccattgaggtgcctgtcaagcgtgccgatgagatcaaccagatattcgatgctatctcctactctaagggttccgctgtcctgcgcatgatctccaagtacctgggcgaagatgtcttcctccaaggtgtccgcaactacatcaagaagcacgcctacggtaacacggagaccggtgatctgtggtctgctcttgctgatgctagcggaaaacccgtgcagtcggtcatggatatctggaccaagaatgttggcttccctgtcctcagtgttacagaaaacaaggaaacttcttctattcacgtgaagcaaaaccgtttcctgcgtaccggtgacgttcgtccagaggaagatcagaccctcttccctgtcatgcttggtctgcgtacggacaagggtattgatgaagacactatgctgactgagcgcgagcgtgacttccccgttcctgacctggacttcttcaagctcaacgctgatcactctgccatcttccgcacatcatacagccccgagcgtcttaagaagctcggccaggctgctcgtgacggccgtctgagtgtcgaggaccgtgccggcatgattgccgactcgggtgccctggcagcttctggtttccagcgtacctctggtatgctttccttgctccagggcctcgatactgagtctgagtttgtcgtttggaacgagatcttgacccgtatcggcaccctgcgtgctgcttggctattcgaggacgataagacaaaggacgccctcaaggccttccagcgctcgctggttgcccccaaggcccacgaaatcggctgggagttccccgagaacgacgatcacattttgcaacagttcaaagcgctcatgttcggctctgccggtatggctgaggacccgactgtggtcaaggccgccttggacatgttcacccgcttcgctgctggcgacctctccgccatccaccccaacatccgtggtagtgttttcaccattgcgctgaagcacggtggtctcaaggagtacgaagtggtcctagatcggtctcgccatgcccagacttcggacgagaaggtcaccgccctgcgctgcctaggtgcctccgaagaccccgagcttatccaacgtactcttggccttgccatgagcgaggaggtcaagagccaggatatttatatgcctcttggcggtctccgcagccatccggctggtgtcgatagccgctggaactggctcaagtctaactgggatgagatctacaagcgtcttcctcccggtctcggcatgctgggcactgttgtccagctgaccactgccagtttctgcaccgaggcgcagttgaaggacgttgaacagttcttcgcctctaaggacactaaggtaagtgacttcaccaaggtttcacctgggttttctatccttgtaatatttactaatttgaatttttcttgcagggcttcgaccgcgctgttgagcagagcctcgactctatccgcgccaagattaactggctcaagcgtgaccgcgacgatgttgagcagtggctaagcagcaacagctatctccagagcaagctgtaagtctataaaaaagtggctgaacaatgttcataaatattttggatacacggggattctttgttttccagcgttagcagctcgaacttgccttctactgcacattatctctacgttgtcacctacggaaagcacgcgggatgtgcttctttgagctaaaatcatactccactcaattatttcatatcttgtagagtaagtgcttgtatggactacggctagctaggcaagccttgattggaatgactaactgcatggtatttggcaaccggcgccactagttagtgatgacatagaagcctccgagatcatgttgattgctaacaaaacaccccatagcgggggaaaaaacaggtggtatcgatggaaaataatacagaaaaaagagagaaatggcagagaggcctacgcccaccctccctttcctccgaacccagaactgtcctcgatcttcttcccgccaggaccgcgtgagggcttggactgcgccgcttcgtgcttgcgcagttcctcggggacacgcgatatgggtgacttgatcagcatttgtttgagatcgtacctgcataagcattagtaaatcaagaccgcaaccagatgttaaacggagaggaacgggtgtaacatacatgacatcgctatcctcgctgcccaggaaggtgatagcaacaccactctttccagcacgaccagtacgaccgacacgatgagtgtagctttcgatcgaagtcgccatgttgaagttaacgaccagtgacacatccgggacatcgatacctcttcctgcgaggtcagttgcgacgagaacgtctgttgagccgttgcgcacggaagcgagcgcggcttcacgctggtcttgggttttggaaccgtgtaaagtaaccgaggagaaaccccattgtttgatttcgcgagcgatagcgtcacagtttcgcttgatgttgacgaacacgataatcggtggacggaactcgcctgatgagaggatttcgccgaggcgcttcttgcgtttgtcttcgccggagatcatctccacacgctgctcaactgtgtcgacggcttcaccaacgccaccgatggtgataatggctggtcggcggaggtacttacgagcaatgcgctcgactgcggcaggcatagtggctgtgtacatcatggtctggcggtactggtgttggctcattgcagctgaattctcagcttcctctgtatcaggcttttcgttcgtgacggggagggcatccaggatcttgttgacaggctcttcgaacccaagatcgatcatacgatctgcttcatccataatcacgtagcagcactgactgaggactagcatgcgacgctcgatacagtcaactagacgaccaggagtggcaatgataatttcggcgccatcgcgcaggctgaatgcttgctcttcaagcgagtgaccaccgacaatactgaccacgttgaaaccaaggggttgtgtaaacttcttggcttcgatctcgatctgctgcgccaattcacgtgtgggtgctagaacaatagcgtatggaccgtcgtttttgcgccactcattctcgtcaagacgcggtagcgccgagatgtagactaaaagtgggaggaggaatgcagcggttttaccggaacctgtcacggccacaccaatcaggtcacgcgactgcatggcgatggggattgccgcgcgctgaatggctgttgggtccttatatccgacacggtcaataagctccaacaagcgctttggcaatggactctcttcccacgaacgcatgggattgggtacgctgccgcctttggtggcaatgttgaaatcctccttgaaaatacgccagtctcgctcacgcatgaggtccaagcgcttctcactccaatgcttgtcaatctgcgtgcgggtactatcctcgcgtcgccggcgttccatctccagcatttgtttggctcgcgcgctaccagcttcgtgatcgcggctcaccagtgcctctgcgtatttgcgcgcaacctcatcggcgacatcgtcaccaaagcctgccaaacgccctcggccaaagaagttggcttcctgtcggcgctggtatagggggttatagtctccgcttgtgtcttcctcggtgttccattcaaagttgaactttcggtctgcagtacgcttgcgcttcttctttgccgagaagttagatgtctggtcggctcccatgtatcggtgcttagtcaatgtagctagtgctgccgcttcgtcttcttccgtcagacgcttttcgcctttagtcttagatgggggtggcggcatatcctggtcgcgattgtgttgattgtgctgacggcctccctttcgcataccaccaggtccagttggatgttcgtcacgcatcgctcgcggcccggtggggacatgacggaccactggttcatcccgcacattgcgaggctcttggcgcctcacagacgatggtgcagatatgagaccgttgcgatcagcgccgttggtgcgagccttggcttgccgctctgcctcaacctcttgagcccgtttctccagagcgattttctctcgttgagctttagacaagaatttaggctacaagaagatgtaaatgtgagtaaaaggcacggaatcttgcgtcatgtatcatcatcggaagaggacaggcttacttttgcagttgccgcatctgcttctttcttcttgcgtatcaagtcctccacactcagtggagtgacagccggtttctttgcgccccatcctagcttttgcttcttctgggtatcagctggaggcgggggtggcacatcatcgggaggaggtggaggagcgatgctgtctggcggcggtggaggagcggttaaatcttctggaggaggcggaggcgggctgggcaggcgctccactgagggagggcgtggagggaatccctcggcgccgttggtcatgacttgaatatgcaagagaagtgatggctaaggaaactagagacggaatttctatggaatacgataagagctagacgcgtagtcacgtgtgcatgatcacgtgcatatctactatagactccgatagagtacggagtaggtaagatggctatattctttctacgccgccagcctatataccccgagtagggcgcacgtgtgatgcgcgttatagtatatgacattctctactggcagaagtaaagcgtgtctggggccttgggatgcaaatcccactgaaatatgactctacggagtacggagtacggagtacgtggtgcagtgcagagaaaagcaggagcctagttgtcaagtaaagttctagagagagagagcctagtcagatcatcaccccaaaaatgagaagcaagttgtgagatgtttgtgcactaggagattgtatactatggtgaaccgtcctggatggttggtatttttgtgtcgttctcgtcttacctgcataaccaggctgcccatcgtgcatttccctcttcaatggctacattattagaaaggggtagaaaggattatacatgctcaaccacaatatactggaacgatctagttgttgtgcgtaagtctaacaaggctaagacaatcgtagacgaatcaattgaaaacagtttaaatgaatttcattggaaaacaagccaccttagaatacaattggtcccgaaggatccaaatctcagatcggcaaatcttatgtcaagccccaagaagggacaagacaccagtgcatctaacgaaagtgagaagaagctgtctttaagcgggggcaatatcgctagagaacaggagggaggaaaagttgcccagcacgggcaacggggatgatactacatgaaaaaagaactcacccacccaggtcaatatgccagggtaagaaacgaagataaaacaccgaaaaggcaccagcagaacttccataaacgcacccattcgtgaagaaacgtatccatagttgcagtcattggcttgagggacgtgcatatgactgttgggtttcaagcggcaccgccgttcgctgctgtctgttggtagtaggcatacgcctgtgcagccgcggcatcaggtgtgggctgcatctgaggaatcgaagcaaactgtccctctgcaggggtggggtgcaccgccacattcccgccagtccgaacagaagccacggatgaaggaccgtagatttctcgatccagggccaggtattccttcgcggcatccttggtgcctctttcgagaaggtaattcatgtaaatttgcacaagttccttgacagagtcgacttgcagaacgctcttggaccggatgtcggcaatgacctgcttgatacgttcatactgaaccgactcggtagccgcgctggtgggttgctcaatctcgaagacgagatagcttccccaaaagggtcggctgtcgaggtagtattgctgattctcgtggaaaacattgcgcgcctcgtcaggactgcccttgatcttccacaaaagccgggcccattcggcaacgagagcagcctttgtagccatttcacactctggcgaatccaattgtgtcttgtagacttcaatggccgcctcaagacctccgtggcgacgacacagatttgcgagtgagataatcgtctcaacatggctggggagatacataagaatagcgttgtggatatctttcgccacgtccacgcggtctgacacctcttcgaagtaggcatagtggagtcgaatcgtgggattggcaattgggacgtagagatacgcggcacgctgatatatgattcgaacctcttcctccttgtcaggctgagcagccatccagcgagcgtatcggaaccagaactcgtcgtaataggcacaagtgaccaggcaccgctcatacaggaattgagttcgggagtacaaaccctcgccttcctcaaagtcaagatacttcttccagttcgtcagctgagcttgatcgagctcagtgacatggaaatagggacgcttaatttccgattcgaaagtccaacgcctggtcgtctcagcctgagtgtgcgcgaaaacctccaggtggtaattgttcacgcgcgctgtaagagctttcgtcatctcttcttcagtacaggggccagcagcttcgatctcagcgcggaaagcggcgatggtctctgccgaggcgcgctcggccaaagggctaccctgcgcgatttgacggtaccgctcaaagtagcgagaatattggtgcataggaatatgaatgacacgtgcaagaattgcgaaaatcttatcgtgggcctcaagccgctcctcgaactcaatgtacttatcccagaagggatgggacaggaaatcaagaccgacactgctcgcacctcgttcgaaaagcctagttgatattaggttagcatgatgtggacacatgtgcctgatgggtgggaaaggagtgataggagtgatagaggtgataggagacaggggaaacatgagcagtgaactctgtccgtttgaaaacccaagtaatcaaatgagtgcggtagatgaagctaagggataggtgggcatcctgtgctccgtaaagggccatcgaacgagactattcattgccattcaatgcaaggtcgtaatttggtcaatcagaggagatatgcagcctgggtgagctatgggtgagaagtaaactccacttagatcaaagaagcaaagcagcgagtggtttctcacccatcgacaatgagaccgactggatattcagatatccagaaaaaaatatgtgaccggcatcacgagaactttcgcgagctgcgtcggtaacggttatagggaaagggaagaagaccatctctactctcacttactctcgaattatatcggggtcgtgcgaagtttccgccttgaacgaacagtagttcgtccagagatcaacagagggcgagatactagcaatgcctcgttcataaacctagggcgacaggattagtacaaagccatggaaaagaagaggctggcgcccagggagggtgtatgcataccatctcagcggcctcagtgccggtgagagagaactcttggtcggcatacttcttccagtatccaaagagcaatgggaacttggcaaggaaccggtcgtaggctgcgcgaacggttgtgatggcctgggggctggaattgcgcgttattccaccctcgagggcctccgcggcgcgaatcagtttttcccaagtttcgaagttgtcaggatcatcaagctgtaaaagatagacatgtcagtcgacaaggaacatgttcgtcaaatgccacatggaacacgtaccagctgggtctcgagatttctaatctccgcattctcctcttcggagcctccgtactgatagtcggccatggtcgtccagtgctgaggatgcgcgcgagaagttgatacctcggtataagacaatatggatggatgagcttgcaggtactaataagatagcagtgatggtaacaatgaagattgcgaaaggaagaaattcttggggttgagacgagacagacaagcgatagcaggtcctgatttatgcctgaggcgaaatatctttggcccgtcctggtccagggatttgagggcggtatagtccatggcgatgtggcagaaatacccgtcgacgccttcgggataaggcgcaaagaccactttatgccttgtcgcctgacaagcttggcgtgagcccgggcggtatcaactttttgaccggaacattcacaagcaacctagaaccacccgtgcacactaggatcacaaaccatcttgatccactatgtcggtttcgaagcagacgggcacattgttggaaaaccttcctcaacgcctggtaaatttcttcgctcggtatcctccacaaacccactccgcagctgtccgccgtcctgcccctgcgaacggagagggctatgtaccaatgaaggtagaatccccttacacaccagatcgcgatgccaagggtgcaccaggagagaaaaagcatggctggactccttcacgagcactcctcgtgaccagcaacgatgtccggaatccatttcttccacacaagcgattcggcaaatgggaagcaccgaaatatggactgcgccagcaagccgatctgatgaagctggccatcaagtacaatgtgggggcacttcttcctcctagtcgcaaatcacctgaattcaaggagacacgacgtgcagagcgtggtttgcaggtcaagggaactggtgttggccataaggtcaagggtcacaagtgggagcgcaccatggagtcacgtctcgaggaccgtcgcaaggcgatggaggcaatgccggagatggtcaggatgtggaagcaggttagttctctattggtccttcctgaagtggttagagcaatgctgactcggcgcaacagagaggtcatggccgcggctggagacaatggcccaagcggtaatgtggatgccccaccgccatccaccgtcgcatcgtcttctttcccttctttattttggccagtttgttcattctggcttttcaatgctctgtcgattccaacgcgaaccggatcggcacaaatacttgtaccagccatagcaggagcttgggacggagttttgtctttgaagtatactatcaaccccatctgtacaatacaatctacggtcacatcgcccaatggtacccaagaaaatcatttacatgaatccggccggtgttatctttcatcatcctcaacaccaataagaaaactcctagctgaatagtcatgttcagcttgcgagcacaagcagcagaacgggatgaaccccaagaacaaatagtcaataatagtatactatagtgcaccctacgaaggtcaccatgatgctgatcagttcagccccagttcagccttagaaacaagttagaacactacagtggcgctgttacagctttttcagcttttctttcacaattacaagattgatggtctactccgtacagcgttagcacttgactcacacgtactgacatagattgtttagtgtcattcgctcaacccatggctacgtgtttccagcccaatgtatcatcagtgaaattaggcacactgttcgtatataaatagtaataaacttgagtgggtaagctggcattgtgatgagactaaatgtagtgctttagctttagtaggatcctagacacccatgcaggttgggttgcaaatcgtgcatctaggacgctattggaacctgtgaggtataagttataatgatcaaataagttctcacaggcataggcaaatggttggttggaagtctatagcgatcaataatgtgattgtgtatcataatgtgggggcgtctaatcattagttccaatagtacatactcatgaacgtgtcggctgattcaaacatgtctccccgatgaggatgtccgtgactgtaaagggtctagtgaccctgatattatgcatagagtgcatgagcatcacaatgtagttagtggagtcgctgtagatcatcgtgtatatagtgtagaatagtgcgtgtggtatagtgacaacaatggccggcacgataaggcgctatgacaaagcaactattgccacgtccaatatatcacgggctacgtgcgaggggaatctcatctcgagcattcttcgtcacttcacatcacgccttgaaaacttgaaaacaacttataaaagccatatacctgactcttggaatgtccttattttctaaacctccgatagcctatctctttatagtggactggagatcatacccaggctagttgatttgttggtatcggtaacctccgatgagaatatagctactgctatcttatatgtggtaaggtctccccacctccttcttcaaatccatttgatattactcatttacacaactatgcgatctatttctggatcttccagatatccattatgctgattgtgctgattgtactgctagacaggaagtcccttctttcacaatttgccaccttgatttcaaacaaagtacgaagtacaacagacgttgaagtgcgtctgtccaaagttgaacttcaacaatggtggaatcaacctttcaggggtctatccattcaaactatagtcaaggttactccgccgatgtggacatcattcgagaccaggagtatcctctactaaatggtataagtgtccgtctgctatcactctattcatgctgaccactgttctactaggaacaacatacctagattatgctgggacaacaccctatgccaagtccatgatcgagtctttctcgcgtgatcttacatctaatctttttggaaaccctcattcgatgtctttgtcgtcgcagctttctacacaaagaacagaagacatccgagtccgcgtattgcgtttcttcaatgcggacccggatgagttcgaccttgtctttgtggcaaacgcaactgctggcatcaagctagttgcagactcactccgggactccgaccatcgaggattttggtatggctaccacatcgatgctcataccagtctcattggggtacgagagttggccgagatgggctaccagtgtttccaaaatgatgacgagatggaggctgagattttaaagctggctggtaaccagtccaaggcgcccagactccttgcctacccagcccaatccaatatgaacggccggcgtctgcctattcgatggtgcgagcaagtccgagccgcggcaaacgaaagtggagggaatgtatacaccctgcttgacgctgcgtcgctggtatccaccgctccacttgatctgggtccgtcttcatctgccccagacttcactgtcctcagcttttacaaaatctttgggtttcccgatttgggtgctttgattgtccgcaaaagtgctgcgcgggtctttgagcgacggaagttttttggcggaggcaccgtcgacatggtcctggccactggcgtgcaatggcatgcgaaaaaagaaacatctattcatgagcggctagaggatggtactcttccgtttcacaatatcatagctctggacacagccttagatacgcacgaacgcttattcggctcgatggcgaacatttcggcacatactgggttcctcgcaaaacaagtctatgataggctttcttcattggcacatttcaatgagaaaaaagtctgccaaatttatcaatcgcacacctcggcatatggcaacccgcatacccaaggtccgattattgcattcaatctttgcaatagtcgcggcgaatgggttcctaaaaccgaggtggaaaaactggctacggtgcaagatctgcagatacgcactgggtccgtttgtaatcctgggggaactgcctcgtcacttgggtggactggaccggagcttcgccggcattactctgcgggattacgttgtggtgataaccatgatgttcttggagggcgaccaacaggaattttgcgtgtcagtatcggtgccacgacaaatatgaaggatatagactccttgatcaacttcatagaggagttctatgtggagaagattccacccatagtcgccctggatcctctggccgaagacgatggggtcgttgctcctcatttttttgttgaaagcttagcagtattcccaatcaagagttgcggtgctttcaagatacccgaggggaaacgttgggaagtgaagaaagagggcctagcttgggatagagaatggtgtttgattcatcaagggactggtgcagccctgagtcagaaaaggtatgcgtatccaagcaaaagcatccaaatttataaactaatgatagtagatttcctcgcatgtgtcttctacgaccctcaattgatattgaaagaggagttctccgtattacttgtggtgcagtcgcggcgtcagatcaggtcagccttgagatttcacttggctgggaggacacaagtctcatctccacatccttctgtccgagctcgaccaaaaaatccacaatagtctgcggcgaccgagtttctctccatgcctacacatccccggtggtctcggcattcttctcagacttcctgggcgtgccctgtactctcgcaagattccctacaaagaccaccaaccgctattcacagatgcaacggacgcctaatacatggaagaaccgtttccgcaagctgatcatgccaggctcattcccacctgacttccctcctccggtacttgagggtggtcagagactaatcacgttatccaacgagtcgccaattctaattgtctcgcgttcatctgtcaaccgactgaatgagatcatcaaagcaaacgccaagaatggcaacaataagactgttgccgcggacgtcttccggggtaacattgtcgttgctgaacgacttgctcgccgtggggacgtggaacaaccatatgcggaggaccggtggtcatctcttcgaattggaccagatcaacttcggttcgatgctctcgatgcatgcgagcgttgtcaaatgatttgtatagatcagttcaccggtgtccgacgcgctgagccgttttcaacgcttgccaagacgcgaaacatcgatgggaaggtcaaatttggcagatattccgcactttctccagaagaactagagggctttgactcggaactaccagatcgcaggacggtgatggtaggggatgtcgttgtgcccttatatcaggatgactgagtattcgaatgctcgttttcggcattatgtgatttcggctcgtatttctttttggacttgggtgtttgatatgccattatataataatatgtaccttgtatacagctgtacgtatctcttcgcttattattttcgggaggtttgtcaatatatagaagtcttggcttcttaatctggtattcaacagttgcctagtaaacattttgaatttgatgaacgccatagtgatacccatgatagtacctaaacaaccacagtcgcagtagccttttctggggctttggtgaaaggcgccgcaaagccataggtctggtaacctttggaataatccttgccggcctcacgctctagaagatatatatcagcaactcggcccttaaacatttgacattccaaagaaaactcaccatgctcaggcgggaacatctccatgcgatgcttgtagtattgctcccgaagatcctccccgtcactcctcgagtgaaaggtagcataaaggctcgatcgactcttatcggtcttgttctcagcagagcgatgggcgagatgcgacccaaagatcagcatatcacccatttcaagtggaataggagtccatgggtgcgagtgctcccattcaggcttgattcgaccacctgccgcaaattcaatttgcattttgtgggacccgggcacaacctccagacatccgttttcaggcgtcgcagcgtcaatggctatgttggcggtgacatgttcaatgcgaccgatgtggtcgtaggctggtgcatcgaggtgcgcctggaagccgtttccctgtggctgcttgtagttgatcttctccttgaagagcaacatatcctacagttaatagcttgatgttagtatgatctcctgatagagcttcggtcttgtggaaatgaacatacatcgcctgagactgccttcagaatctccgccagctgctcgccgcagactagtgacttgaactgagggtggtattcaatgaacctttccgtgcgcatcagctggcgttcgcccttgatgttgatttcatcgtaaggcatccatttgcccttgacacgaggccaggcctggatttcttgagtccatcgcttgagttccgtaggatcaacgagttcatgctcgtcggcgcgtaggaggaggtaaccattctcatggtaaaaagctatttgttcaggtgtaagaggcgacatctttgagtaatttgttcgaaaccaccgaagtaggcagataatgagatgatcgaagtgagaatgcagtaaacctacgagcttttaatagtttttcgaaacgcatcgacttctgttgttcaacagcggggccattccgataattcggccttcgattgccctaggaattgacccgtgggccatttctcaattagttctagattgcgttggatgcgacttcagtgaaggtgttcgtcccgatgccaaccagaaacccatgggatgccgcacagaccaacgggcttcgtgccgagacgaatgcgattcgctcatccacgaatctttgagaatatcgtgagttattggaggggcaagtgagaagatcaccatgtgcacgtgctgagacggacttcgtgcctttattcgcgatttagcccaatgctacaaggacttctaatatgtcaccacaccctatgtacgaccaagggatctatttaagaccatcaacagaccatttcttgaggaataaccaaaagctttcatcaaaatgaacatgaaaatgactatttccaagactgagcaacctcttgactcggtcgaggaacacactcgagcaacgatcaaaacattgttccaatttctgcatgcacagggccagggtgactacctcggcgagcaagtaactcaactggaacactcgctacagtgtgcatatcttgccacccagtccccggagcatggaaacgaccctgaggtcatcgtggctgcacttttgcacgatgtcgggcgattcatccccgcggccgagaagatggagaaaatgatcactcccgacggccagtatctcggaagacaaagccatgaagctctgggggagttctacctgcgccagattggtttcagtgagaaggtgtgcaagctggttggtgcgcatgtaatggctaagcgctatttggtcgcgacggatcaatgctattatgatgcattgagtgagaccagtaagcggacattgaagttccaggtaggtcacctttcccttattacattctcaattttaggagtatactaatgacaattagggtggcgggtacaataacgagcagatccaggaggcgcaaaaggatcctctgcttgaggcaaagctttccgtcagacgatgggatgatctcgcgaaaaagccgaattggaaagtccctgatctggaagcctatgaggaaattgcctatcagtgtcttattggtgagtgtgattgcgatagcgacctctaacaacccaatatatatactaaacatatacagactcccggtcgaagttcaccctacattcgaaagaatatcacctgccaacacagcccacagtggtgatctgtgttgatggcttcgatccggaatacttgaagtctggtattgagagaggtcttctgccgactttcaagaaattccttgacaacgggttccatgccactgctaagagttgcatgccctcattcaccaacccgaacaatgtatccatcattacaggcgtgccaccatccatacatggaattgccggaaacttcttcttggaccgagaaacaggagagaccaagatggtcaccgacgactccctacttcgtggctcaacaatactggagcagatgttccggcgtggtgtacgagtgtcagccatcaccgccaaagacaaactgcgcaaaatccttgcccacggcttaaagggagccatttgcttttcttcggaaaaggcagcggattgcactctggacgagaacgggatttccgatgtggaaaagtggctcggtcagcctgcacctagccaatattcgggcgatttgtctttgtttgtgcttgacgcaggcatcaaactgctgcaggagaagagatcggacattttgtacttgacattgtccgattacatccagcacaagtatgaacctggcagcaaggaggctgacaatttcatgggagcaattgacgagcgtttgcagagtcttgcagctctagctcctgtcatcggtgtaactggtgaccatggtatgagccaaaagtcaaatgagctgggagagcccaacgttctcttcctggaggaagttctcaatgccgagtttgggccgaatgcctctagggttatctgccccatcacggatccattcgttcgacaccatggtgcactcgggtcctttgtgcgcgtctatctcaaagacatcacgcaactcggatcgatgatttcattctgcgagtcactcccagatgtcgaggttgctctcagcggcgaagatgccgccccaagatatgatatgcctttggaccgggagggtgatattgtggttatttccaaaccgcatgccgtaattggcagctgcaaagcgaatcatgatctctcaaacttgaaagaccacccgttacggtcgcatggaggcctaagcgagcaagagatcccattgattatgtcaaagccggcaaacaatgggagcaaggctaaggcgaaggactggagaaactatgacgtttttgatcttgtgctcaactgggcaatctgatatttatctatctcgatgcccgagatcaaagaggaggttccatcgatgtattataatgtagccaccaatcgtcaatatcagggaagatagtttgaaaatcaaagcttgccatgttttccatccaaattgcatcaaagactgggggttgttcctgggcaggagacgtacgatacattgtttcgtgggctgtgtgagcggacatttggcatctactcgacaaacgttccaagccctcgctgatgaccacaaggagatggtgtttatgcatagactgagtgatatcccgaagggcagccacggtgtcagtgaccagtgaaaggatcttggtcgtatcaattctgaccatgaaggcatacttcgtagcaactttgaggagaaagacaacggcgaaggcgagcatagtatcgaaatataaaggaagcccattcatgaatgatcgaaattcggcatcagaaacaatcatccgaagaattgacatagctgacaatacgccggaattggcgatctcctccaattcaggtgacatgtattgaggtgagctctctgatatcggtacgccacgaaaggcgtgtgagcaaaggtatagctttgcaaaatgatagtgaaaacccacgcccttttgcggatagttcccgacattctgatttgctttgaagctttcgctccaatctgcaaaccaggtatccaaagagatagaacatcgacgcagttggggcagagtctgcggtgcaataggggtatcaacatctaccccgaaggtgtcgaagactcgacccaggattgaccattccttgacctggctgattagtctagcatcatcttctgtggcgtgttcagtttctagtattcgactagccgactcaattataaacccttctctggacatcggaggtcgaccgtaggcgatcgaaaagtggtggtcgcatacatagacgagatagtatagtcgagcttgaagatagccatcgcggtctcctttgagggctttgtagataccactatgaagattaatgtccgatgcaatgcggacggctagttccattagctttaatccaccacaagattgcagccacatcacataccattcccgatcaaggcccaagaaagttcatgcaaccaaaacgcaccaacgcacaggccacggatgtcatcttcattcatatgccttgagaaagtttgggccgcgacaacgttcttgtattcaccgtagcaagtttcaaagagatgaccgagggaatgcgaatgcaaagcagccacggtacaaacagccgccgtcaatagtggggatgcgattcgaaccgagtccaaactaatatggtcgccaagaatacgatagagaaaatgatcaagtctgagatggtatgtttcgaacaacgaaacggcgtcgcgtagtaaaataagtcccgtagatatcaagtctggacgacgggaagttgatggattgtttggtagacctgcctttccactttctgagacgcaggaggctgggatagaagctgggccacctcggggatccattatcacttcccatgtctgcggtggctcatggtgctcatttggctgagacggttgacttgaggtggagatttcccccgcgataactttctcattaatagtctcaaccggtgggctcaaagaattatcttgtatttcgggcgcagcttgcacagtttgcaaagcttgaaactcgggcatgtcaactttggcagcaatctttgcaacagcctcttctagccgccgcatcttttgcaccacggcccctttccatctagatactgtcaggaaatgccaatgcaaacgattagtctgtacttacgtgacatcgtcttctagtaatgtctgcaagcttcggttcacgctgcaagggagacctctcttcttgcaccgcgagcatggcatctgaccctcccccatatgacatttgacctttccctgtcagttacttgctttgtcatctacttcaagaggaccaaccttttgttttcgacatgctacacaagcagtaatcttgcgagtaatatcggggggctttcgatcgccgaatgattctcgcaaagcacttacgggcggcggagacggtagttcgatgtccataatgagtgcctgaattgaggttgccgcggagtgataatgttctcgactttgcagtgtttgcatcagatccgataaattcttacaaagcaccaaccagagttcagacaattcagcatgacctttccgcgtccgaataatgttgcgcacttcgcaccgaagatatacttacgggggaaacgggggaccagctggcgggataaggccggatccacgtggggtcgatgggaaatcctgactggcctcaccgcacggtctattttagctgtgtatcccccgtggcagcttgcacgttgctcattgcatcttgcgcttattcatgacgactgctatggccgataggaagtatatcgcagaaaagctaccggtggttctctccgagatgctaatgtcttggctatacctcctattatacgtgatgtgaaagaagtatataacatcaccattcgccaaattaacaatgtgtgcaacgcaagggaatcgcattttgtttcctcgatcacttctactctccttaacctcaagaatcatttgattcgttccaatggcatcgttcggagccaaattgaggtttgtagccactgcaggcgttggattcttcgcagatggctatcttaacctgacaattggacttggtgagtggcttcaattaatcaatgaggccgaagactaatgttacacagtggtcccaattctgggttacctatacttccaagatgacaaggtaccgtcagtcgacagcgacatcatgaaaggtggtctgagcctgggaatggtggttggccagcttctttttggaattctgagtgatgtttgtggtcgccacaccgtttacggcaaagaactcctcctcaccatatttggaaccctattggtagtcttgttgccttggaacgggatgtcggcccagtctgtgacggcatgggttgcaatttttcgtgtcgtgaccggagttggaattggtgctggtaagtctttttcctttggaatagaagcatggatctaactcgagaaagattatccattgtcttcatctttggcggcagaaaaatcaccgtttggctcccgtgctattcaagtgttgactgtcttttcgaatatcggcctcggcaatatttcagccagcattgtgtttctgatcttgctcaaggcattcaaaggggcgatagccaacaacataagccatctcgaatgggtctggcgtttgctattgggcattggaattgtgccagcgttgttcactctttatgcccggctaacgatcacggagacaacaccttacaagcaatgtgagagtgcctcggtcttgtgctttgaagatagctaatactgtttagatgtctgcgatgacgctgccgggcagaaacgcacattcaagaagcagtgggaagaatttcgcgagtacttcagtcactggcaacatgccaaagtgctgttcgcaacatcagcctcctggttcttgtagtaagttaggtggacttggaaaaaggaaaagccgcaaactaacgcacacagcgacatcgcatactacggtatcaatctcaaccagagcattatcctgacaagaatcggttatgccaagggagcaacaccatggatcaccctgtaccacaccgctgtgggcaatataatcatccaggtagcagggtatctccccggattctacgtcggaatattccttcctgattgcatcggtcgtgtgcgccaacaattctggaccagtatcatggtgtgtatactttatgccatatgggctggaatcagcacacagagcgcaaacaccccgacagctggcttgatggttatctttgccctctcgcagtttttaatgacggttggtcccaactgcacgacgttcctgcttcccgccgaagtgttcccaacacgtgttcgaggcacagcacacggcatatctgctgcttctggaaaatgcggtgcaattctaactgcatttgctttcggcactgttgaagatgcaatcggcttggagggcgtccttggtttgttctcggggatcatgctgctcactgctcttgtaaccttgctgatacccgagaccaagaatcatactcttgagggcattgagaacaatgggctctatagaacaagcggagctgtcaccgaccttccaaattctagttgtattacctatgtcaacgttgaagctgggaacggggaggcaaagaccagctttggagatgatcaagttaagaagttagctgtatagacaaatcaagtgactgtggtcctatatcaccgctataagaaaggaatgaatcggttcattatttcaagagcaaatcaatctcattgagctatcataggcatagaagaatggctatgaatacaagttgtactattcgtcctcgatggcctcgtggcctgtgacatgtcgtaagtatgcttttaaccagtcattcttgtgtttcgctgtatttcatccagtctctgtgcagcggcaccactgttgaagttggcaaagctgaacgttgagatagctttcttcaaatcaaagcaagagctccgtcacaaaattgaagtcttttagcccaagaacaaggtctccctcccctggacctaggggacgatcctggattacaacgaaggggaagaccatggggttcccatccataacatttggtattcccgcaaccggttttggtgttatattcacatgataggcacaataaggttgctgaagttatgccggctgtctggttagtagtggcatgtttggggtttgtgtctggagggaccagatgtaattccaagttagcgggcggggagcaccgcttagggccaactgccactgctcgaaagagatacagtcatccctaagaagaatgagaacgaccattctaatgtcgcccctagaatctgcgaaccatttccgtgtatcttagcgaagtcggccaagcgattccataacacccgtttcaataataagtatagggtagccaaagttttaaatcggccgagtgtaacgagaggggggtataaagccattatctgcttctttacccttcctaataccagatcggtaagttatcgatccgatctaagccgatccttccctagggatacctatggccttataataatcgcgatttatttcaacgaacttatctgtggcaatgtgatgttcgattctagggacgaccttgataaggccggtagagccctcccattgaaatcgaaatgcgattcccccaagaccgcggtggtcgcttgtgggtgcttcgattaccggtggtgacagaccgagcaccacaatcactggttgccgtgttgatgctcctcaaaccattcaaaaatgtgctgtgcctctagtcgcagtctcgtcagttctgaggagactacatgccctgcaggcaggtcagacattagtgtgggggcgggatccgacttcgtctgctcattttacgcctttgccgttagcaaagttaaaagaaaggggaggagatagttgaaaagacaggtaagaagacatgtaaaaagaccactcaaaagacacaacaaggccgcatgagcgattattccctgcgacagggagtatggttaccgacagccctgcctgtgagaaaggatgagagcaaggtccttcactgagagtagttgttagagaggagaacaagaaaattgaagatgttagggatgccttacatagctatagaggtggatccatggatcacatggccgcttagtcatcctactctggatccccactacaataacaatagttatgatcgttcattgtgaatagcaaaacatcccgtcttctccaagcgcccggacaagccgaacaattgatgaaaaggagttcgcgtcgatcgggggtagtgtaagcccaatgacactgtgcaacgaggcatgcgcaagcacaggggccaagtcgcgggatccaaaaataggaataatcaaagtgtttcctggacggaaactttcagagattaaactgaaaagaacagatactacacttgatctaagccaataggcaaagagagctgaagaagaaagaaaagaagaagagattctgggggcgcgggcgggtatatatacccaattttggtcacgtgcctttggttcaaggcggtatgtgtcttgggcagtacctattagttaatctggtctgctagctcattacagcaggcggtgatggccggtgaaattctgggggcagggacaccttcttatagttatcctgagggcggtcggcttctgccactatttacaaatgagacaaacagcgacatatgctcgcttaattaaacatgtaaagggtaacgtgatgataaccacaatcactgttgatatcagggtgatactatgcactgcacttgctatagacaatactataggcggtcaaacttgcaaaatgtcaactggcattggcgtgttttgattggctcgatagtctaccccgcctatgggcccgcttaatatggtgcatcacctgatgacctcagaaggattacctggatttcacatttcgtatattggcccttatctttaacctcaaattcccgaaaatttagacatggcagaccacttacattctcgcgaaggatctgatgcttccctcaacaatgcatcgattgcttctccacgatccagcaccgaatctcgctctcgaaatccacttcgcatttcagcaaaccaccagcatagacaaagcttgagcgagtcgcttcgcggcccgccaggttccccccgtgcacgccggcagccatcactcccacagtcggccatccagagccttatcgataatccaccgccacccaaggctagcaaccctgcctttgttggtcgtgattggagagagatatcagttggggagctggtcagcccgggcgacctgaagtttgtcgagcttgatacaggcattgaagaggcgacgaacgtgagtacatcacataggcagcattccctgtcctgactaacatgctcgtccaactagattttgattgattcaggtggcgctgtgctgttgattcgcgagacacccgagtccacttctgccgtgggcacattcgactatgccgatctcaattcctatctccttttagcagcgggcctgacacatccggacgaagcacatcaagcgtcatatgacgagctagccaagaaagcccacaacggcgtgcccattccattaagagatgtgaagaagttcggtatggagaaggagccgctgatcaagctgccagcgtcggccaatgtcttggccgcggttgagatctttggtggtggtgttcaccgggttgtggttgtcaatgagtcaaatgaccaagaagtggtcgggattttcagccagttccgactggtcaaattcctctgggaaaatcgccgcagtttcccgattattgaagagctctacccgagggctctgaatgagctagttattggatctcaggaagtgatctccatcaagtgagttgttttggtgatctttagcgctgtctaaccgctaattcgtaattctcagtggtgataaacccctctctgatgctctccatgtgatgaacaatgagggtatgtcctcgatcgcggtggttgataactacttgaacgtgcttgggaatatctccacggcggatgtcaaggtatgtgacgagccatcttaactggcaaagtttactcaccatttcgtagctcttgacccgatcatcttcattgccacttctgcataacacctgtacccactttatctcgattattctatctacacgggggttgattgagggtaaagactcattcccggtcttccacgtcaatcctggatcgacactcgctcacacagtcgcaaagatcgtggcaactcgatcgcatcggtaactactgcaaacttgagatataaacacaagatgtactgactgctttagactctgggtgaccgatccgttatctcccacctcatcaggaccgccaactccatcgcaatcttccgtacacctccctctttccaacagtatcagcccagctaccggaggtactgcaaattcagaatcttctgaagaagctgtgacatcttatgcacagccctctcaatatgccgcccctcacctaccacctcctaacccacccttcacgtacccagccgtggcggtctcagtgccatcacccatctcgcattctattccctcgtccgccctagacggagcccgagtgtccggacgcctcgccggagtggtcagcttgactgacatcctgaacctgcatgcccgagccagcgggctgaacccggccgacccggccgactctcgtagccgccgccgacgcagtagttcgtcgagccagagtgtccgccgcagcggtgacattggccgggagcttttcagtcgtggtggcatgtaagagcatacactacgttttaacttgggctctactgcaaagcatgttctcagtactgtatttgaacccgatatacgcaatcgctccgacgtgcttctgttaccaagcctaattctattcagcccaactagatatgcatatttccatgttgtcacacttcatcagccatacaagataggaggcaagcggatggacctttgaacgttgcctagcctgtcattatcgtctttagcaatggatattatttccattgtggatcagcattacaccaaacaacttgaattgactatctccctacgtagttcctcacttgcattgtagactcgaatctcgattatcacgtctgattcgagtccccgccataccagataaaccagatgagccagcatccatatcaagtcaggatcaacaatcatcgggaaaagccgaccaaacccacctctccacggcgatcaggcaaatcctccatcgtacggacaaagtcgaatactatccactaatcccatacccgccatcacccggagaaccatttccggaatccacaacgcagtcttattgtgtcccatccagaactgtccagcggcgcgaacaccaccacacacgcaatgcacaaccagcagcaacggagaagaccgagtccagaccggcgtgcttattggtcctcgtatgccgtcatttaaggcatttcgcattggattactgtgtttgattatgattcgggtacagacgtcgatcagctggaggtctcgaattatgagtggatcggatgtaagcgagggtgcattttccgcttctcactggcccgtcagatttgagctacccatcctgtctggaaggtgacaggtctggaatcgccggattgagggggcttggactaactagatggtgttgcttactgtttggttgagatattgataagtctcaagtatgcagcaccaaggaacagtgataccgatatctccttgtgagattacacgtcctacgataaaaccaaagccagggtctgtactaactcaagaaggaatgagcttagaccaaatcccgaagatcctcgactcgctaaaatctggggatgatgttctcccacttgtcgtggtggcaacaccacatccacagtcagctcttggtctcgtctggactcctggagccactgatgctccactgtgcaccgagagatccggactgggcgctgatcatggagacacaccctggggaatttccgggtaaattggggttgtgattcggggatattttaggactttctgttggttgagaaggactggaaggtatctgtctaggtgatttagagaggatgttgcatgatcatggccaggtccaggtctcaagttgacatgattcatagctgtccatgaggtacagtatggatatagtttagtaagaaatgactcaatccaactaattgcacacgacgatagcgccatcccaaacgaaccaatctagactccatgtctgattggcctcaacagaagaagaacattcagtcgctagaaatcacctcaaacgtagtacgtaagccgcaacaagagcgaacagacgaggcaagtccagaatgcccgactcacgaatcattccccccagagctatcacaccggggaggcgtctatcaccaacccatgggcctatcatctaccttggaagccaatccccccatcccaatctgacaatctgacaggccacccactggatccgcaagccaccaacccagcgtcaaacgcaagggaaaaagtaaccgccaatcatgctcccacacgtgtgcacgggccagcgttgcagtcccatccagctggaaaccgacagtaagcccgtgggtgggtgctggacctggccccgttgaagctgcacggagatcccccctttgctccaccaggcgagacgagttagagttctatttgctgggtgtgccgatgatacccatgtctcgaccgctggtacgcggccctcggacttgggtttcggccgtggtagaggtgctgattgactctatactatccatgggtcagtgcggacgctagtttgctgttggccaattaacgtccggacttggcttcaaggctgggcacagctgcaaccttaaccccgcaatctgggattctgcaggtgattcttttcttttcttttcttttttttttttggtcgtgtagtcggttacatactttgagggattgcgggtcttggatttgagatctgggtataggaaatatattcaagttgttctatctaccactcatagtacgtagatagcattgatatgggctgacaagacaaacgcatcaccctgataaaacagaagtagaaaacgataagtcgatcctgcacgatcgccgttgatccgtaatcccgggaacgcaggggcgggtaggacagcagccctggagccaattccgcagggcacggacactggcactggcacggggcacggagcacgggacacttggattttcaatttcaatttcagtttcaattcttcagcacgaaattcaaatcccacccgaggagctaataactccataactgcgcggaaaaatacaggatatttaactattaggccataccaaaaatcaacatattctaatcagagaccccatccgctctgtttcttgttttgacagaaacccgcggggtcggaaacactcctgagatagcacacggtaactgtgacgagacgcgagatcaaggaaattgcaatgacagagatagagaaagcaggattcccttttcaaaagtacctatttctatctagcatgcaaggcctggcctgagatatgctagataatggtccagggtccagggtgggaaacagggaatcggggatactgtattgtattgtaattttggtaataatggaagaattgctgccatgataagtgagtagtattaggatactgtatcacactctacgctagcacagttgtatgtactcctatatcccgtttaaccctattccatgaatagctggtcatgagtgacagcatagaaattaagtcgaggggttccacagttgaggatggtctgatcgctggaatgactttaggtacgtaggcgagaacctgggtgggtttgtgttggacccacgtagcagggctagaggattactacagagtaccaagggtgcggttggtggagttgggatgcggcattttcaagggagaaagtgcgtggacacaagagttaggatttagggaaagctaactaacaccagacgcaattctggttaaggataaacgccagaagtcattcctatgtaatgtgggactggggaaagctatagctacagctctactggcacggcccgacggagcatagagtctgggactaggtttatcgcagaaaagaaaatgagatgccaataatcgcgcagttataagggatggtggagtagccccggattaggatgcggacttggcgaggttgtttgcggatggatgcaacttaggtatagaattgggggaattagggaaattagggaaattttattatgaagaagatcagtggatggattttggctcatgtcacattgaagtatagtaaaggaaaatttatgaaaagaaagagcaatcgatacatacagacatcaaccctgactccagttcaggatattagatgtaagatacgagaagatataaaaaaaggtacagcaaatgtgcaaagccacccaatatacagacccaactccgaaagacccaagagaaaataagtacctaggtatcaggtatcatagatcataataggcatgatagacagatgaggttaacaagagacgctggtgaaatcatcaagagcgagaagatcgtcaaaagcaaaaggctgatcacggtcggaaagcggaacattcgagttacccaagtggaacgcaaactgactgaaatccgtgaaatcaggatccatctcctcatgggagaccataatgccatcactgttgaacttcgcaccgggcgacatcgtagcatgcgccgtcggcgacagcggggtgttgggagtgggacagaagtccggagtggactgagtgcccgctgggagggcctcgatcctgggagagctgagactggagggagccacctgcgagtgggaaaggttcgtggtctgagtaagcagattgagtttgtgcaagttgttcgatggatgggactggccgcgcgaatgaccgtgggtaggatggtggccagtggggcctgagatggatgctgagggaatcggtggagccgtgtgttgcagaggcaactctggtgcggacgcaaggcgatcccggaactgatgcatttgggtcgctgtgtcaggcatttgagcctgctgcatcatttgctgctgccacatctgcacggcctgcgcgtcggtgggcgtttgtgcaggggttgggttctgctgttgcatgggcgcccatgcgggtacttgggagttccagcccggtgcggaggcttgttggctcatgtaggctggcatctgcccagactggttgcctgtcggtgcagagaacatgtcggagtatggcgtctgggaaccgctcatgctggccatgtaggactgggcactcgggtcgtacgacgccgtaggtgataggacatagccatcacccgtgggcattgggcttgccattgagcctgggccctgggagaaggaggagcgaatattcgacagatccaagctcatcttccgtggaccgccattgactccattgagtgatggccgcggggtcatatggcttgctcggcggctgtggatagaggagttgttgaattgagcgcgtgctgcaaaggcggccagtagatggtttttgaactgctcttcaatttgctcgttttggcgttgcagcatgagaatccgtttttcttgataccgctcatcgacctcttcatacatggcctctttctccacgatatccttggtgatgtgaaaggccttgcccgtgcgcttcttatgcaacatagaagcccggttggcagactccagccgagcatctaagctgcgatccttgcgccgtgaggcggcgataaaggctctggggaatggttagggtgcacgttcggcccctccgtgatacgagttacatacctctcctggttctcctcccgcgaacgggggataggcgtaatatcctggtcgagatctggcaggggcatcctggacatggtacctggtagaggaggtggatttatgcaggaaagagtgttatcgcctggccaccggagaagagggggacggtaagttaaataccaaaaaggctgaggggaaacccgtcagcgttaaacccaagctaagggccagaaccacggatccgagccgatcatagtttgggcgcttggaaaacttacggccgctcggtccatggttgccccgtccctctcctctaggctagtctgctcgagagcgccactacggaggagccaaatacgaatgggctagatatggtgccactcatggcccctcttcccggagactatttcctgcttttccaggtaaataatatgcagcataccagatgtgcagttagcaaattatttttcctttccagattagccctgaagggtctagaccattcgctgtgaagtggggcgttactctactccagacagatcccgatagatgtgttctgatagatgtgactctatcggggatcactgcagatcactttcctgaagcgtagactgtcatctccagggcgaaggttttttttttgagtgtcttcgacatcacgagaatcataccacgtgattggccggattaggaaggcttcaaaagaaacctgaaattcaaggctacacctaccttggagaacatcagatctatgataaggttacagtacttcggataacaccgattacttcttggcgagtataaggcaattgctattgaccgttgttattgacgcttgagaaggaaacacctggttcaggatctggatagtaccaagcgaaaattacgaggtttccgttgaatatgaagttctccctcttccttcctaaatggggacttccttggcgtatctcggcgcacctgcagggctaggcgggttgccttaggctctagggttcgcacatactactactactactactactactactactactactactacttctactactactactattactactactactcttactactactactcttactactactactcttactactacctgtactccgtactccgtacttacctagtaacgtagtcagcatttccaattagcgtagcgtaaccactatgtgaccctaatagccgccaatgcatcaactgccggcatactcccgaaagataactttctcaccagcaactcatataggaaggaggtcttaaatcaaccataattgggtacaaaatacctcgcttaagtcaattgtcgcgaggcgtagaatcatccatggatattagcacaaaccaaagtacgaaaggcataaaccaaacagtcataccagttaaacatcatacatgatgttccgagacatgccaattgatcagtcaattgatcaccgtcactagctgaaacatcctacacgacacaagatatgggcttattcaatccctgctcaccagagcatctcccgatccctattccttcttttggcctcggacatatgtattctgccggatctaccctcatctcatagacagcgacgccatatttaaagcccacggtatcgggggattcgccaccggtctaaagccgagttacctaagctcacccggccgagactaggccgcttcgagcccctccagatgtcctccccgatgtcgccactgcacgcacaatccgatatcatccgaccgcattatttctctacgcgaaagtcctcgaaagccctagtttgtctgactctgattggcatgacacttcacgaattggacttttatcgttagcgattaactacaacgtaactagtggggtactcggcgatcaccccgctgatcgtccgtatccatgtctaacggacagagtacaggatgtgtatgtacgtacacgtatccagatcatcgcgacaaagcacacatccatgcattggcatgaaatcaacatgggagatcggaattaaccctcaggatcaatagccaatccccagattccaccagaaggctagtcgagatctcggagaacgatcggggtcagaacctgctccataggaaccccacactagcagccacaatataaaccgacgacagctcatgccgcacacttccgccaggacgagtgggagggcgccgcgctgagatctgcaggcatacatgcctagaagggaatctgtggctggctatatcatggtggcggtggcgcgagcgctggagctatgcagggggaatctcggcggatttgattttctgtggtttcatggttttttctttgattcggggtgcatacgacggacgtgtttggcacatgggtttttagcgttagggttgattcttcaaggtcggtcttcggtggttactcggttaggaccgtaccgtcactctgggacacttgatgttgtaggacggagtatagcaaggacatcgtgctctcatggacgacagggattggttcattggtctgttcctactaccttcatatgtgcatcattgcgaacaatcagtaagtctaccaaaagcacatcgtcccctcgccacgaaagaaaaccattgcaaatgaaatcttgtttataaacagcatgaataggtaaaagacgctaagttctcaatgagtgcaaagccaagggaaaaggagagcaaacaaaggtagagaaggcccaaatcagccgatgctgctgcgcggattagaccattcaacggggtgaatgctagattgtccgctcaggcaaactctcatcagacagacctggagggaaacacaacagcagaataaagttatgggatcgccatggcttcttacgcgattcccagcggcggcaccatcccctgttcctctcgggcctcgcctccaagcttgtaagacaccttgaatcgaatcttgaccgagttgcccttcccagcatcaactccgtcaatgagcatctcctgttggacaccattttgctgctggggtgcaatatctcggcctgattgcggccgaagctgtagcgtgtaggactaattcatcgtcagcaaactcatccaaaactggactgcgttagtagcaaatagcttaccttctccacagcgacctggaaatggagatctccaatacgctgactagttgtgtttgaaaatatagctacaacgtggatctggcgtggctgcgtcggcacccggcgcgcagcgaagtcaacttggagctgagagttaaggacttgaatcttattggtcgatggaagcgcattgctcgctggcaatgcggatgcgaaatcccactcatcatcttccactggagcggcctgccgcggcggttgaggagacggactcgtgcctcccatcaggtcaagcaatgacgatggagcgggagcaggttggctttgcgccggtggttgaaagggaccagatgctgcccgtgggctagcagagacgagcgatgcaaatggatcagccgctggtggcggggtcgctctggactgggcttggggcgagacccccatgacgggcgtgggagattgagagacaggtcgcgaactgttcagagaagcaaggatatcataattgggtttgaaggctgttggcgcatgctgctgaggttgtgatggaacaggcggcgttgggcttgctggcatggacgcgaagttcactttaatattggtcagtgatggtgctttggggtatattgcgccgaggtacttactggaaggtccgagagagataccacctccgggggagggagtttgtccgcctaatgaaagaccgagtagatcattctccaaggagctcccaccgtgggatggcccggcctcgttaccgttggagctgggttcaggctccgggtcgaaatcgataagagagagctcgttgtttgcatttgttgaaactccagtcgtggtgcccagtgtacccttgggaatctgagatgcagcatccagatcacctttcttaactagcttataccgctcgattgtgcgatgtatgctgtcgttgatctccaatagcttgtggacggcctcgggatcatccgattcttcctcgcacattttctggattttggggtgagcgctttgcaaagcactcgcaagttcctggtacaatcgtcagagacctatcaaccggcaaacaacacacgggacgttttatcacctacctcgaaaacttcgccttctgggagaggttccccgggcttttgattctgcagcatctcttccagaatcttggctttttgttgcaccttaacaacctcctccgcagcctttgctcgataatcggttttatgccgattgtcgaatcctgccataaccttcatgagccggttcgcttcctgtagatcggcgggagtgcctctccgaatcaactcctggagtttggcagactgcgcttccctctcttcctcttccatctcatctgctgagcggaggttctagccaacgttaatttgactccgaaaataccatgtgggggccacatacatcacttggattcaagaccgcagcatcttctcgacggacctccgggaacatatatcccttataaagcaacagacggtgcatgtcccgaatgaagcctaggtcatccttatagcgcgatgtctggcagatagtctggcgccactcctcgatcgactccaaaatgcggtgttggaccctggagggccgtatgggtggccgctcggggaacctgcgaaccaattcattcagaaactcctttgtaccgatttggagatggaatggatatccgcagttcttgacggcaatatcgagtagctagaaaccgcggttgtcagtctcccccgcctcggctgtcacttgagctcacgtaccgccaacgccaacaatgcgacattctgattccgggaattgatgagatgaactatatccaatgcggcttctcgcggcctgagaagtgaatccatgagtgtgagccatacaacattgggtgtttcgcttacgcattgcctttcttggagttgattagatccgcaacttcaaggttcagggccaggttcggttcgtagttttgaggatcgcaggcatttcctgtagataagtctcagtatgaatcatttgtgccacatttatttcaacactgaactcacggattgcccgctgcaacggcgaagcgcctggctcagcgtagaccccgaagcggtccctggccgccattcgtgcagatgcagcctccaggatggcggtggacgaggaactaggagaggaagtgtattagccggataaagagggaggtactggaaagtacaagattctagaggagatgtgtacagtcgcgaacggggatgcgggcggagaacccgtttaggctgcacgtgtggcgcttgtgcttggccttgatcttttttttcaaccactacatttaccaccacggaatactccaagatactccaagcagagtatttgaaaatcctactagatttcgacctcgtcattcaccatggtccgccacaaaaaagataacttcgcgcgaggaggcaagaaattcaacaacccccgcccccgagtgccccgcggtgatgaagaagttgagggcgcaacctcctcaaggcctccttacaaggctgcctgctgggatatgggacactgtgatcctaagcgatgctcggggaagcgattgatgaggctcggtctaatgcgggagcttcacattggccagcggcaccccggcgtaatcgtctcgtatgtttcgcagtttcgcagtgcttttttggtcctcttagcttgcatgctgacgattgactagtccaaatgccaagcgaattatctctcccgcagacaaggatattatggagcagcacggtgctgccgtggtcgaatgctcttgggtgcgagtcaaggaagtgccctggtcacggattggcggaaaatgcgaacgacttcgtatgtgataagaattgggcaatgatgaactggattaatgggatgcttactatacatagttccctaccttatcgccgccaacacggttaactatggcaaaccatggcgtctgaactgcgtcgaagcgctcgccgcttgcttcgccatctgcggtcgcttagaatgggccgaagatctactcagacatttcagctatgggccaactttcttggaaattaatcaagaacttctggcgcgctatgccgcctgcgaaacagaagaggatgtgaagaggacggaagaggaatggctaaccaagatcgaacgggaatacgaagatagtcgcgtcgatggaggtgatgatgtttggactaaaggaaacactaatcgtctacccgcacgaactgatgaggacgacgacgacgaaagtggagacgaagatgacgaaaatgcgggcagtgacgaagaggaagatgaggacaaggatccatttgcgatttccgatgactccgaagacgaagagcaaatggccgagattcgtcgcaagattctcaattctaaagcgttcaaggatccggaagaggaggaaaggcagcagccggagaaaattactcggccggagcagctatatgtcgactcggatgctgagtccggctcagaaggaagcgaggacgaggcatttgacaatatcattaatgcgacgacggtcactgaccgcacgggaatcaaagcgattcagcagcggaaaggaagcgagactgtctctgcctcgttctctcgggcggagatttctgccccgaagaaatggtgaaagtgaggcttattgtacatcaattgcccatccactcaacgggccgttagcttcttgctctgagagctagcaccattttctggagtctcttggtggtttctcccctggcaacacacatagacagctttattgctttgcgagtcctgccatagcaagtgcacttgattcttcaaattgagtccggcattctgctgtgtagtattgccacttgctatctcgtcattggggtggtttcatttctctgaaggtacgcctcggtcaattcacgggatcaccaagtttccttttacgcgacctacgcaactacatccgctccttcaaatactatgtgttatgactcattacaacgatatctgctttactttgtactcggcgagcgacggactatatccaccggaaagggaaaagaaccaattatcatccatggatggcacatatcaaattcactattttcttccaaggttggtttagttcctaaaatcatagtgtgtggtctcaaaggacatagtcgtgccttccgggccaaattcggaatcggagcaagatcaccaatataaccttgcaagaccgaaattaccacacttaagactcacaagaacttgtcaactcacttaaacaaatccaataatagttctcactcactggagccacacctgtccaccaaacactgaacccagcccatatcgacgaactaaatgcgacggccaccctcgagctcaacgggcaaacagaaagatggcacggaaaaagaacagcatgaaccgcttactacccaaagagccgaaatggacagaatccgcagttaatccgcaatgcatgattaatgactttgggatatcgagggaacccacgccatcgcagcaggacaacacgattaagaagtacgaggaacaaaacatacagctaagacgtgagatgaaggaacgggggaataccatcaacaaccttgtacgacaccacaaagaaaccgtgagccagtttgaatataacatggcaaggatggcaaaccagctccagaaacaggcaaagatgatcgccgaccttgagtggcagaaaggaatgctgcttcggaatctcgaggaacagaccagaatatcatatgcgctaggacagcaagatacgaagacgagggaagtcttcggtaacatttccagcacgatgttcttagaattcgataaacagacaggcataattgacgaaaaaacgagcgctatcctcaaacttgaagcacagaaacaaaaatcgctagcgatcttgagctacaaaatggaaagatggctttggtgcttgaatatctcacaaggaacagtgaagaatgtgcctctctctgggactaggacagaagaggagaagatgtacctgatgataaaggcagtattgaatgcctgtggggagagcgatactaatggaatgagccgaaccagtcgtttcctgaagaatataagacttgtcaaatgcgaatctcgtgtcacggagggaccccggagtaaaccaacatgtttattctgatcctatcgtctcggcctaatgccggtatgatatagaaccgaccacaggcaatcgaatcgaacaaagatggaggatttgcagttcaacaaagaattacattaaacatccacgtcactgtttgctacccagcctaaccattttgcaatcatgttataccccaaattaagattccaagcgcagatccttctcactgacgttgctttccgcagaaactgacgctatggtgccgatgacatcgcgggcaatcgacagcatgatgtttgggccaagaatgcgttaacgagtgtgaagaagtatggcagatgaacgggtttgtgtctgtgtaaaccggacgaatgggagctcgactaggtcgatacttccgacggggagtgtatctaagagcgtttcgatggtgagatgaggaggagacgggtgaaattgtcgaaggcattgttggaacctccttggctgctataaattgggtttagtctcgctctgtagattggtttacatgcgacttacctgctcaagtcttgctttgtgccgctaatgaattatacaatctgatttatcgattcaagatgtgaagttggttaggctttgtttttcttactagggcaaccataataaaaggccttgacgggacgtctaggaaacgaagatctagatcatgcaagggctagaatggattttttttctgaaaattgaacccgatatgcaaggtattcacgggatgatgatcgatatatacaacgctttatatatgtctgagataatcaagaaagttgattatcgagtcattgctattgtgttggttatcactccccatatagtttgcttcatatcaaaaggtcatttcgatatgataaattaagacaaagaaaggcatatatatatctgcattgttaaagggattgtcctactggatcgagggattccatagaatattataagtatctcagtgctcctctagcgtcatagatgcttaatcaaaattcagaactatctatcttggttataaaagcccaaagttttactaggtctaaaataaataaagattgatataatccgagatatcgttcactcaaaccgttctataaaagcactgaaccccgcgatggcggggcaaacgcgcccaaggtcatagatatcagctcccccatttaggaattctcttttacatgaccttgtattgaaaatagatagaataaatgtcaataatctacttctcatttgagttagtacacgtggcgggtgaagctcaaactcaccggagtggaaatccttttcacttttcccacaatcccgcaatccactttcaacaacctttgggacaccctcgaacataggccaaaatgcccgataaagactccagcacaccccgtgtcttcctctaccgacacggtatgttccagaacgtcaatatctgctttccgtagtctgactatagtccagggcagacggaatggtccaagaacggacggtacaccggaatcacggagcttgagctcactcaagatggtgtcaaccaagtcaatgcatctggcaagatgatcgtcggatccggcaaattgattgacccagccaaacttgcgcatgtctacatcagtcctcgcaggcgagcgattcagacatttgagattgctttctctgatgccgataagcaggcgcttaatgatgcgcataaggtctctgagacagccagactcgccgagtgggactacggtttgtatgaaggtctgttgaccaaggaaatccgagccttgagaaaggagcacggtctggataccgagagcgagtgggatatctggagagacggttgcgaaaatggagagtaagtctttttcaaagagaaactctttcgaattatatccagtctacgatcattatatctgacaagtcaatacaggtctgcacaacaggtgacagaccgtcttgataatctcattcaagaaattcgcgcgatccagaaggacaatatgcacggagaaaatccttctgatatcctgctggttgcacacggacatttgctccgtgcctttaccaagcgctggttgggatatcctatggagttccctctttctctgatgcttgaccctggcgctgttggcgtcctcaggtaattcctttttctcccacttcgctggcctggcagttgacctttatttctacttgtagttatcagcaccatagcattgatgagcctgctatgttggtcggatacggatttccgttgcaggaatgatctgatatgtctggataatagatctcatagaagatagcccggttgttactaaatatagacttgatacatggtgatgaagagtcaatggggattctggcctgagtactcgaaagaactgtaggctctcctccaggggccgtagattattcatagtctaattccagtccgtccaattgatcctcgaagactgtagtaaatgggatgaatattgtatgagatcaggcaaaatagacgaaaatggattatttgcccacatgactagaaaagagaactttataacttcagagtttctaaaaccttctactgaaatcgcatcgaggctatacttcagatcaccagaccagttcatcaagtcatgaagttcaccgagttcatcagaagttcggcaatgcccgttcgcctgacctggccaactgacaacagatatgaccctgcccctgtcaccccctaaatgttgtgtcttcacttcaaatatgacatcaatacgagtgtcttcaaaggcagacaagatcaggtgggaatagaggctcttggctgaagagcaccccggatggcactaacgggggggctatatgatcgcctcacccctgatgggtttcttttatttctttgcaactttacgccctgacatatgcttttcaaggactttcctctggattgattctactaccgttctatcatagaagccttcaatcttgaaagtggcaaggtcgccaatatcatgccgcacaaatcagacgagttgtcggtcgctgaggctgaaaaggaggtccatgaggcatcaactcccacgtctccaacaccagcacaagaaaaacgcggttcgaccttgataagtttcttctcgtcttttcttggtcccaagaacccgcttgcacaaccagcagagccacacaagcagaccgtatggctgctagacaatacagcgtaccagccggtaaatgaggatgcaaacgagaatcatctgtgctggcacgccgaagtagtcgcctatatcttcgaaacagaagggcggaaagacgcgggcaacctcgtcgccgcgatcgccgaccacatcgggctggacggcgaggtgggcaatcacgacgaagcacgccaacgcatcgcagagcgcgtccagcccttccttgaccaggtgtcgccagcgcgcacagtcatgctgcaggtacccacatcgccacgggcgcaatcgcacggactcggcccgtccgaccgtaacggcatcgtcagccaaacggttgatatgggcgaagtgggcatgtatgacggggaagttgtgcggccgcggctgcaggatttcggcgacgaggctgtgtcgatgagcacgacctttgccgcccctgagggctggctggtcgtctcggatattgacgatactatcaagcgcactatgacgcctgagccgacgggagtgattcgcacaacctttgcggatatccctgagcccatcgctgggatgccggagttttataaatatgttcatgctgagctatttcctgcgtggttttatctctccgcgtcgccgcataatctttaccccttcctgcatgacttcctggatgaacactactccccgggcacgttggtgttgcgcgattactcgtggatggatatcacggggcttatcaagtcgcttactgagcagacgcaagagtacaagcttgatcggctggagaagattcgggggtggttcccgcgtcgaagggtgctttgtataggggactcgacgcagaaggatccagaggcttatgcggagatgtatagtcggtatcccgagtggattcatgctatcattattcgcaaggttaaggatgtggcgggtatggaagagaagaatgaaccggggaggtttgagaaggcatttgagtatgtgccgtcgcatatttggacagtctttgaggatccaaaggagttatataattttgttgatgggctgggtatggaagaccaggccttatagatgtaataacctgtgtatatttagttggaatggctattttgaacttttcaaacatcactctcgtgacacgcaagggaataacggtctttgctgtttgtgccatgacaaagacaatggcaacctttactgcaactatcaaatagatagactatgatttccaccgtaccttgggggataatgcaagcagcgatctatagacccattgattgtgatcttctatcgcactatccaacttccacgaatcccagactctatatataatattttcatgccaaaccaaatcaaatagagatataagatcgaattgctgttcattgcaatggaattgttcgggattgtcaagtggcaatgttgacttaagccctacatacgtcacgattaggaaatgacctctgatctatagacgaaatggcgaagaccatacttccaaatcgataacttccttacgagaaatcattgtaaagtctcaaagatctctaaactaagaagatgtatcaagatccaaatgatactatgcagtcagacatacctcccacgcagcccatcgtggaacactccccaaagcatctatcagagtcctcaacacgctccccaaaagacattaagccgccatctgagccctcaaaacgcgcatcaggagcgacaagaggcacatcagaagccataaagcccccttcacatgctggaaagctcagctcatcaacgctgaacgactcaccattcataccactgtcgatgcgagccctctacttcaccccagacggatcagacaacgacacacccgatggagtcccagaaggagaaatcagcgacgccatctcacccgacacaagcacaagcgtcgtgcgccagaaaggaacaaacatcgtcttcgacgctgggttcccgaccccgcagccctcccctcagcaatacctgctgaagatcgccacagcagccttctgtcacgacgagatccgtctcgccagactcctcaatcccccaaagaccacgccgcatatcccactgcacagtctctgcgggacagtcgtcagcactccgcgcgacgacgaggggcgggaagaaggcccgaagttcaaaattggtgacgtggtcttcggcgtggtgagctatacccgtgatggcggagctgcagactatgcagtcgcgactgagaccgagctagcgctgaaaccggataatatcacttttgctgaggcggcggcacttgcgctgccggcgttgacggcttggcaagcactttttcggtatgccgggcttgatcctgacttgcctggcgggttgggcgagggcgatgatgagtttgcgaatgggacggggcggtggctttggcagcgtcaacgccgtgagtccgtgctcggtagcagggattatggctacgggcgccgcaaaagcagtaatagcggcctgttaaatcatactataagtggtaatggtaacgaaagtgggaacgggcattgggtttggcagtggaatcgcggcggctccagaacaagtgccagtggcagcgtcagcggcaacggcaacggttccgacattgacaacatccctccagctgctagagcggtcaatcccgcccccagtcctacgaatgtgcgtcgcgagagcctaatcagtctcgtcagcggtaatcccagtggcaagaaaaccgttgctcgcgctgccagcacagttgaccccaatcccaagagtactgtccgccgcaacagtttgatcagcctgatcacgggcaacaccgacgctccatcctctcgcgctgcgagcacagtcgatcccacagctaatcccgatgccaatagcaaaccccgccgcggcagctctagcccgagacggcgcagcagcctgttaggaagcataattggcgctaattccaacggcagcgggaagccaaaaccgcctattatccgagtactcatcaccaacgcccgtgacagtgacatcggccgtatcgcagtgcagatcctgcgagcagattcgctcttccccatagcgttccggccgtgggtctgtgtaacctgcacgcaagtcgaagccgatatcatcgagaaggactgggaggtggacgagatagtcatcatcccgcacctcccgtcgcctgaagagtgtaatatcgagaaggtgttccgcacgcgccgctgggagccggttgatattgtactcgactgtgctggtggagaagtattccgagctgcccatgctgccggtgtcgttaaggaccatggggctgtgttgactgtcgtggatggccaggttgcgctgcagtctccgcttgttcctgagaaagatgtgctgggcgagaggaagcgtgggattaaaagccggtttgtgcctgtcaatcctgatgggccggctctggagcggattgcggagctggtggagcagagtctggtccgtgggagggaggttactattgttgatctttcgcatgcggtggatcttttggcttctggggctgctgggacggcggggagtcggcgcggtgggatggtggttgttagggttaatagtgttgcgttcacgtagattgtcatgtttatgcattttaatacagagatatcaaaagtaagcacgtcacagggagcaatgatgtcgaaagcaacctatggttgtctatcaatttgaaaagtgttgggccacttactcggttgggccaaatatcactttcgcaatgcccatgtcccaaaagccaagtccaagaaaagaagaagggaaaacaaggggtgatgtaaatcaaagttaatgagatattccatacaagaataagttttgacccgatgactgcatatgaaagaaaagaaagcgatgctctgccccatcccacaagatcaaactacatgaacagaagaagaaactgaagttttgtggccgaggtggaaggcaagtgagagagagaaggcgcaaaaaagaagtcgtgaagaacaaaagacaagtgtattagtacctccgttagagtaaagagtcaagtctggtaaaaacgctcaagcatgcggcgacaatctgtctacttgttagcacattcaagggttgaacgcggtatgaggtgcagcttacctccatctgaagctctttatccttgttccgattgatctcctcgttgaccacttgagctaaattggctccaatcgcctgggaacctccggccttcctgccaaacggccattgcgaatactctgctagcaattcatccacctgcgcgaaagctctctcgcgagcctcgtggctcatggtgaccaaagcgttctcgaggacgtttgcggcgtatgcggcgcagaccatggtgattgagcgaaggtatcggtattctgcgtcttcgggaagccatgggctaggagggataatcacagtgcggttactgcaaatgttgcgcacccgtcggtggagctcgtctttcgcgccgccgtcggccacaggatgcgtcgccatatcgaagagaaggaagttgcgcttttcggttcggagaatacccttgtccacaagacccttggctagtcgttcccggacttgcttcaattgatatccaatcttcatcaggttccaggtttcgcctaacaagtagccccggtcagcaacgtcgcaacccaaatttctgctatgggctgatctcaccactcagcaaatcaatccatgagttgacgctcatcttctcgcttgacttcatcatcttcagcgtctcgtccagcaagacctccccagtcaatgtatcgtcgatgacctcgatgatgcggtcggccagggggaaacgtcgccgcgacgaatccttctgcatgcttatacggccgcggagcgcgagctcaatgacgatacaccctcgcagggcatacgagatgttttcgttccagaaagacagataaccctgttgcggcgtgggcgcgaggtcagcgatcggaccacgaatcgaacaaagcaaagttggggcatgagataatatccatgaagactcacctgtttatctttcagacccagcagcaagatatcctccatcagagtcaatttgggctgcttgccccgttcctcgttttcgctgatgtcgcgggggtcgaatgcgatcttgtggccattctctgcattggtaaaagacgtttccggtccacggttatccgtcgcagagccatttcgggagattggcgatgacactcggttgtcatcttgttcgtctgccccagcgactcgaccggcgcctctgcggcgagtcaagcccccggctgctgaggccatgagatcgggtcgggttgggcgggggatcaaaaagggatggagagagatatggccggagatgaccaaaggcttccgatctgtatgccggtggttcgaatggtctgggttggtgagatgttgagagggaccgtttaggccgaaagtctgcggttgaagtgggactttcggtgtcaggggaaaccagagaccgagtgggcttagccaaaacgatacagtgtcgagtatactgaactaaacccgcctaaatacgagaggaataggcgactgtaaagaatggagttgtgaaaagggtgaagttcaaagtaagttagttcggtgatgtggctctttgagtatcggcgggtgcttaaacacccaagggctagcaatctccgcgttatgagtttatttgatggctctattttttgaaaaattgggaatatagttaagttagtatatatgtacaatctattcttatatttcgatatgcttatgtactctgtgtttttgtcttgtgttcactgttaaaccaaaatatgtagataaatcaacttaggactacatccatacattccatggcaatcatatgagatgtagaggtaactatatacctaaacatatactgaaatgtctagacgcatatggtgaataccactacgtagcagttctgcttcaaaattgcataaattgcataaattgcactcaaatgatatacacgatataggaaagaaaagccactggcatgtattcagcatacaaaatagcatgtcggttgagtgtcactgtgtccagcaaaccccactgatgccaacatcccgattctttttctatccgactctccaaccgatcccaggtattcaaattaaatatttagtgggctgtgaaaaagtcagcacatgtaaaggaggaaggggtgctatgggattcacataccatcgggctgggccaggatgtactcgacagccttgtcaactatacataatattcatgtcagctctggtaaacgaaaaataacaaggtcatcaagccctaacataccgctgtggatctggtcggcctccttgtcggggatctcaatgctgaactcctgttgagacggttagatacccatcatataatatacaattgatgcttttccgaggaaaaccgggcgcgtacctcctcaatggccatcacgacctcgacagtgtccaggctgtccagaccaaggtcgttcgagaagtgggaagtgccattaatctgcaggtcaaataggtttagtcaatgaatgttttcggtcgcctcccatagctcatagcgatgtaaaggtggcgacggtgcatccgacagataatcactgaccttgctggcatcggagacctaagcatgaaacaaatgcagttagtaatttgtttttcgtctatagccgatagatggcgagatttccggggaaacaacatgacgcaccttgtcgaagttcttgagcaaattgactatccggccctcggcctcgctcttgctaagaccggcaggggcggagtagagacggataccctgagcgaagcgaggagtgaattgagggacctgggcagcaatgggggagctgcggatgtggaagggagccggggtcctgatgacacggggggcggaagccttcaaggaacgaacaatggcggagcggaacatgatgaagtagattgatcggactagcgcaaaggctgaaaagatctaaagtattaaaaagagatggtggagagtaaacgggtagagattggggaaagacggctgccgcagaagaggaaagatgtgaggtcgcgcccagcaaaatcctgcgggccaatcaacgcccgacagaaaggaatgacctaagccggaaacctgcaaaccaccacaacctcagacttgctccccttcacctccaattgaacctcgattgccccatatctccaacctcactctcctctccaaaaccatggccgccacccgctcggtcgcgaggctaatcgcctaccgtcggccgacccccttcggattgctgggctcaaccgcaaacttctcttcttcgacgtaccgcgcagcaaccccagcgggaccccctcaggccgggttccgcctgcccccgcccaagcactgggatcagagctccgagtccgccttggacaaggccagcaaatatttcctcatggcagagatcttccgcggcatgtacgtggtgcttgagcagtttttcagaccaccgtaagtccttgtcccactcaaccttgccggcgatacggatcgcaatccaaaatcaatggcatcgaaatatatcaactaattgcgttgcaatgttccagttacaccatcttctaccctttcgagaagggtcctatctccccccgtttccgtggcgaacacgccctccgtcgctatcccactggtgaagagcgctgcattgcttgcaagctctgtgaggctatctgcccggcccaagctattacgattgaggccgaagagcgtgaggatggaagccgccgcacgacccgttacgatattgatatgaccaagtgcatttactgtggctactgccaggagagctgccctgtggatgccatcgttgagagtgagttcaacaccctcaggttacatctcaattgacattcaagccggattactaacatttttttcttacagcttccaacgccgagtatgccaccgagacccgcgaggagcttctgtacaacaaggagaagctcctctccaatggtgataagtgggagcctgagattgcagctagtgctcgtgcagatgctccctaccgataatctatttccctccaatctgattgggatcttcaggcaaatccacatctattccagatgttagatgtgtgaacacgaagatgctagtcgcaatacccatccattcaagaggcactaagcctcgaaaaacaagaatgattttaagcccatcacattactgtacataacttgccctcgattgtgttatcatcttgtactagtcaattcctaaaggaaatgccttttcctggaaccctggcccccttgtctcttttattttctatgttatggaatctagcaactctttttcttctagttgagattcatatataaatttggcaatcccatcttatatcttcgctgaacactttttcgctaaccgcataaatatagtacatcttgagatctataggtttacataggcataaagacaaaaggaagacatatacagctcgataagaaaatgatattgtattcacagataaatcaaatcgctaccgatgctgtcatgcatagacataaagtgacagactaagctgccaaagacacaaacgtaaacaccaggcaccttgatctccggatggatatttcccagttcaaagtctcaaaacactttttttagttcgggggcttctgtgtgcgatcttgttttagggatgtaaacatccaagacacaaagactgatctgaggggtatgcagagaaaataaaaagaagaacgtaaaacatgggttgatgtaaaagcaagtgagaaacgagataaaagtaagccactagatagaagcttgtttatttcttcttgccaccacccttgaagctgccctcaaatccaggacgagcagccttcttctttccactgctgctagacttcttcttgccccccttggtgcccttgtcgtcccggcgcttgcgaaggttctcctcgcgcttgttctggcgctgttccttagatttagcgacagtgtcaatgcggtccctccactcgcgctcagacttcttctttgccgtttccttgcgcttgagggccttcttcagcaaagaggtatcgtcgcggacacgctcgccgtgagcacgcttcttcgcgttcaaccaaaggtccttctcttcaacatcggcacgcttggtagggtccatctcttcgagacgggctttcttggcctcggcaaccttgagctgggaagccggatcacgggcaccgccagtcttcggcttttcgcgtacgttgtttccggtgatatctgtctgctggccgtctgtgaacatcacacggccgaaggagaagttgttgctagcggagctgacggactcggcaggggagcggggggatgccaggagcgatccagagccaccgggcgagaagcggcgggccatggcctcgtcattcttcttttcttcctcaaccttggccttttcgcggagttctttcttgtgtgcctttctttgttcggccttttgccggcgggcttcgatcagctcttggcggttgcgtgcaggcttgccgttgagtccatctgcgtggcgcttggcccggagctcatccagacgcttctgtagacgctgcttcaactcttcgggtgtgtgcttaagaggcttgggctctgaggatttgacgtcggtagagacggagggaggaacgatggaggaaatggaggaggtgccggattgggggtttgaggtatcgaaggtaggagagtcggtggtagaaggggcagaagaagggtcttcctgttcagcgttgaactcaatagagaacccttcctcgacaacaccgtcatcttcttggtcgtcatcttcatcctcggacgcttcagtgtccttggctgcattgccgttaggcttggttgcagatttttccgaatcctcggttggggtagtcgatggcttctttccctgctgggctttttccttccgggccgcatccttggccttctttttctccatttgtgcggcctttttctgggccttcttctcttccttttgctttttccgtgcctcggcctctgctgccttggcggcgtctggcttatcagtcttttcaacctgcttttgcttcttgatgttggcggctccgcggttcagtccttccttaggggtctccgtgcccatctctccgtcggacgagtcggactcgagggtgccatcctcccgctttcgcttgcgtgcgttttcatccatcacgtctttggcggtcttggcggcatcggggttcagcttcgcccgcttcgcctcgcgtgcttgttctttggtttgctttttgcgttgccattgatcctaaaaatgaggatgatggtcagacagagatcttcagaattaaagataaagccaagaacacaagctgactccagtcccaaagccgctaacgtatgaaatgcaacagggtcacatacacttgtatcttcttcgccataataatatttggcggggatcaaagacagcagaccgtcaaatgcctgcgcatggctgcgcagccgttccttgagggcagtcagctcgcattccttgcggggcattctccgagtgcacaaacctcgatatcatccataatattttccagtacacagaaattgtattctggaagggaaagctagacagtcaagcgcaacgaaaaattttggggaaggaaatcttggcgctacaattgtctccgcttcggctggttcaccgccctcacacaacaattttgctgtattggtccgtgcattttgatagacaggctccaggtcggttgattgttcccttcaccgtattctttctattcatcctttttgattgtgctcttttctaccttgatcttcgattgattccatggttatgcattgttttattcaatacatgaataggcactccatgataaatgacgtggatattctctccacttctatatcagacctgatccacgaggccagtcctaacgtctagtccagggcatccctcgcttttgatacttgtcacattcccatacggccaaggatctgtccaaatcacgtcgaatctgaaacagttagcgcaggacataacacaaggcaaacaaacgctcttctgtcgagtcgcgagtcgagggttccatgggacactcgtctcccagacgtatgtcaagcaatgcgaatctcatactaacaagaagacacatgacgataaaaattacctaccgcttatttggatattcaacaggctcccaggcaccaagctcctccacaatcccactcatagtcgagtgccgccatgcaaccaaaatgtttcccggtccgtcatacgatctgatcgccttagccacacatttcactttgttccgcttgcaatgtgtgtcaactctgagacccagatctctagcaaggggtagaacggtttcaaacgcacggccatgtgtgccatctacaggcagaaagcatattgtcagccatgtctatgacacttagtcacctgcgtgcctcgttgcagcactgtggtttcgatttgctctcgattattgttgtaaacctaccccatttcacacgaggtgccataatatgcccgatgttgtactccgagccttggccgaaaacatgtcttaaacactgtgcccgcttgactccgtctagtgtcaaaccatggtcgttgggatcctgaggcttctcgccgtgtcgaattatatagaccgttggatgtgattttgcggacacgataccgaggcaaaatcccagagctgagaagaccgattgcagtcgcatttttggcacatacactaatcaacccagtcgtatacaaagtaagcgggtaatagctaatgtatggacagtcgagcagtggaagaccacagaaaatgatctttggggacaattataagagtgtgggaaaaagcaaaacctcatggaaatttgcttatgtcgatcgggtgcccttagctctagttataagtacaggacaccattttgttatggagtcacataccgaagagcacaatagggctgacacaaaaaaaagcaaaggtggatcagcagatgacattccaatgatatgatcatccaacagcaagggcgactacagaaagcataaggttctgcaagttgacaaactacaggcaggcgttcggtcgatgtgctatgatgcagtggtttgattggtctgcagattatgcatgttcattgtactgcatcgatcgactcggggttgggaatggtctcggagatctgtacacagtacatatgcagcggtgtttatagtcaagagcacatgtacaactgcgatttagtttataaacgtatggaacagatctaatgacaatgaacctgtggtcggagtatatctcggatgtgattgaagactctcacaattcgatagtggtcagcgtgcatgctgtacaacgtaggatatgtatgaggaccctaggggtagatcaacctactgtcacccgatcggacaagtcccatatgatagtcccatgtttaaactagtcatgcatcaatcataatcgatcaactagcccactagaaacgagagcatctaagtggtccacggcatggagatatgggaatcgggggaggggcaacacacaagccaggcttggtgatttatgaaagaaaatggtctggtgactggctcctttgccaatattcattgaaggcagtaggtgtctactaatttagtaattcctcggtcgtatgccctagatatatattgttgacaccaagtgattgacgttgtacattgttgcctcccgattcgccatcatgtgatggtcacccgagcatgtcatcattatgacttcaaagcaatttgacttcgatgttgttttgacaacatgttgtcagtcgtaatagttggtatatagacttggcttcaggcgctattatctcttaggatcagaaatccacgactcgtgatgtgttcggcaaatgacgccacctttaaactgttctgttcagcttactccgtagcgtaggcagccacataaaaccgtcccaatacggccgatacagaggagacctcgggagccaatgtgcggcagcggagaaagcgattctggaagatccgtggaagccgatagatccgcgtaatctattttgggcctaatctggtaatgtataaaccgaggctgagcccggcatagccacagtaggttacagtattgtgttccaaagttggaaatgtggctgtgtaagtgacttaatcagaggctgagtgcatcatccatggatagatttcaagtccgaactagtaaaagacggtaaatgcacagatgcgcaagatgcccaggcgtacagggctgaaaatgcccgacgcttaccaacgctgcgcctcccctcgttccgtaacgtttcgcttgccatgtggggttcttaccgtcagccctgtggttacttgaagtcacctcttataaaaggttgcccccctcacttgacttctcttcatcacttaccactcctcacatctacactaccccaccttccatcagccatcaattttttatcaagccaattcaaattacatcatgtccggttacgatcagtacaaccagggtggctacggccagcagcaaggctatggtggccaacaaggctacggtggccagcagggctatggccaacagcaacagtacggtcagggtcaagagggctacggccagcaaggctatggccagcagcagggttcttccgactactactccggccagcagcaacagggctacggccagcagcagggtggttcttccgactactactccggccagcagcagcaaggctatggccagcaggaccagaaccgccaggggtatgtccttccctctccattcacttcattcattatgtactaacagatcatagtggctatgagcagcagcagggtgctcccggtgaggcccaggagggcgagcgtggtcttgccggcgctctcgccggtggtgctgccggtggcttcgctggccacaaggtcaaccacggtttcctcggaacaattggtggagccatcattggtagcatcgctgaagacgctgtcaagaagcaccgcaacagcgacaaccaatctcctcctcagtacggtgccccccctccaaacggtcaatatggcggcggccctccttcccacaatggtagcggcggcggctccatgatggatcagctcggtggcttctttaagaagtagaaggtttccgatgaacctctctcttgcgttttctgcctgacgacacggttttcatgaatttctttctttgctcttattatcccaatgggtcggcatgcatttttcttttcgccttccgccagatcgctttcatttctcatgggtttttttctcctccttaaagaggcttgtaccatgacagagctgcgttgatattggaaatcgcctttgtgtggtctgaccataattttcagaattgcaacgtgattaacttgcaacattccttgtaaaagacagtaaactaattaagtaaattgccattgcaaatcaaaatgatagacacttccatctgtgtgtatgttgtagcaggcggaggccaaaacacaaccccaagtggaatagcgtaaggcctcaggcatcaaccgccaagcccgacaaaagttcgagcggacgagtccccagtaacctcctcgtcagacatatctgcaatttagcattcccaaaatgattatacggaagctttgtatgcgccagggttagtttggtccaattgccgctatcatatttaatgtctctgctaacgacatcccacaggccgccagctccttgctctgagccgtcgagccccgatctccagtcgtttccaatcgacattgcccgaaaccccagtcgagacattgcagacatctatcagagatgagatatctcgcccagaaaaccccctctttgagatggtgcaggcgcaatctgaggccagcacacccgcacaacaagagttcacatcagacgagcctcaaagtgagccgcgaatatcttcccggagattcctccaacgcatcaactaaccttgtctttcttttcttcccccaggaagcaatttcaaaaagctcggcacaagtgtgaaatcctcctacgaccccgaaaatattatccgcaaccctcccaagccatcccagatctccctggaaatgctgctcgcagcaggaacacacctgggccactcgacctcgcgctggaacccacagaattcgcgatacatcttcggtatccgcgagggagtgcatattatctcgttggacgtaacagccgcgcacctccgccgcgccgcaaaagtcgttgaggaagtcgctgcacgtggcggactaatcctcttcgccggcacgcgaaagggtcagaagcgggccgttgtcaaggcggcgtcgctggcaaagggctaccacattttcgaacggtggattccgggctctctgacgaacggcgagcagattctcggccactgtgagacgaaggttgtcaacgcgctggacgaggaattgcctagattcaagtctgatcttgctgatcgcccgtcgctcaagcccgatttggtgatttgtcttaacccgcttgagaatgttgtcttgctgcatgagtgtggcctaaacaatgttcctactatcggtgttattgataccgatgcggatcctacgcgagttacttacccgattccctcgaacgatgatagtctgcgggctacttgtcttattgcgggcattcttggtcgtgctggtgaggcgggtcagttgcgtcggttgaagatggcacgggagggtcggacttcttacaatcctatcacagccgaggagctgcgtcttgatccgtttacgggtcaggctcctggtggtgagggtcagaagaagtaggggggtgcgagttgtgtattccttctgattgcattttcctttcatttttagtatccggtcgattgcattgaaacgacgggactctgtattgtatagatgattccaggtcttggtgttgagatatgtattaacaactttgagtcaattttggttctttttttacttgaatctagcctgtaacgaggggacgatacatcagtaacagcttctggaggggcttaagcctgtgatcttcggtatagatagttgggccaaagatgtgatctctcctttaatcccctcaaaaaatagcaggataaaaggcatcactttgccgacctgttcaacgccaactatacacttacatcaacgcagacgagatctatcgccttggaagaaaacggaaagcaacaaggttcacggtcttggtaccatccacctcggaaaactcgcggaatcgctcaaatccacatttcaacagtaccctctggcttccactattgcttgcttccgtgatagcgatgaggcactcatccactacaccttctccaacgaccattcctttctgaactccgacctcccgctccgtccgaggcaattctgaccaaaaccgcagccaggaactcaagaactctgtcgcgatgcctttcccccaagcgtccgtccgaagcatgtatccaacttcaggccacccatgcgttccaggatacagatgacagccaccgataccgataagctcgcccgttttcttcaggcagatggcgcaattggcggtgataagatcgtttggtggtaggaatgcatccagtttggattttgtctcctcgagactttcgtcgatacaccccgccttggtccatcgcatgacttcttcctgtgtgcgcaagacgtgtaactcttccaagtcggttggttggaggggacggacgagtaagcgatccgttgttattgctgcgcgctcgctatttgcggggagcgggactgtgggcaagaatgccttcacaattacagattctccctctgtggccatgttgatacctactttcagtgctgctttccagaaatacctgtgtgtgcggcgcggttgagtcactaaaccctggaatctattctaaccttgaaagtgcactagtgggacaaacccaccttggcctaactccgaactataattggcgtgttgctttggtacataaaatgccgatatttctaggcaatgtggcctattgatcagaaagaaaggctagtatgcaatttatcaagagagatggaggacggacaagagatggtagacagagcgagatttatttgccctaactgttaaatgtgggtgccccaggaaatggtacaaacccagtaccatcaatatttgaccgaacgacgagctgataaaggttgtgaattcttactggagaatcccaatttcatcaactggtaccgagcttctgattcacagcagttgatgatcttcggcgatatgggcagtggaaaaagctttgctatggcatttcttgcggacgagctggtacgaagaagcaaacaccaattacctcagcccaaggtctgctattactattgccgggatgatgagactgggaaaaccgtcttcatattatcggctataattacatcgcttcctgggcagctcacgggtctgaagaagccatttgttcagtggtataaggaggctcagacttctggggactttgatccggcgacaaatttcaaaacactgggagagttcttatgcagagtgcttgaagcaattgatcgcccggtctttatggtgattgatggcctggacgagtgcaatagagaatcccgaagtaatctcctgacaatattgcgaaaattgtcacagggggttttgctgaaaatcatactgtcttcccgtgcaaaggagagatcttggaacagcttcacgatacggctaagatcgaaatggtagctgacgctcatagagatggcattatcgtcgcaaaagtcgtcgaaagaaagttgttcgatctatcgccgaatgtcaagtcacttgtcatcgacagacttacttgtctagcaaaaggaagcgctatatggacaaggatgactattaagctgatctaaactcgcaaaatcatggcatttgatccgatgaaaagtttcttggaagaaatgtcactccccgaacagctattagaggtttacagcacgttgctctcctgctgctcttcaaacgatctcgaaaacctcaaaattgccagcaccgcgctcaagattctcgccatcattaaccgaaatttgagcatactagagctctcctgggtcgttgcattaggtacgactcaacatgtcactaccgtagatgctcttgccaagctggtggatcaccagagagtaatgaggttaattcaccagttcattgcccatgtcgagttcagagacgtaaggaagcaccaggttcgactcgtgcaccagtcggtgaaggagtttgtactgaagaatttcgtctcgaatcagccatggcgacacggcccaatctcaagagaacccgatgatatgattcttgaccagcgctatgaaagtctgcaggcatttattcttgatatttgcgccaggtatcttcttcttgaagacattggcagaagaactctgttctccgaggagcttgtggcaattgcggagctaccccaaggatccgatatattcaatgataacgaagggtcgattgagtatgacggacattgcacatgggatgcctgggaggaggatatgatcaattttgatcccactgatcgcggctttagagagttctttgtctacgcatcatgccattggttgaatcacttctgcaccattacagctgaacatattccaagtctagaaaccatagagaagatatgccaagcgggctccactcgattgagcaattggatccaacaaaactgccgcccaggctgcacgttaacgccaagatttgagtttgaaagcagtctgtacgatcctctcagtatcacttcgctttatggctcagtggcaatgctacgagatatgcttgaaaactcatccttcgacaagaacggttttctcgaacagtcagctatgagagctgctcatgagattttccgatgagggaacgtatcaagcttggaatcatcttcttcggtgatcgacttggtcatcacctacgacatcttgactttttccgacttatcatcaaatggtggtgcaaccgcactctcaccgaccactaatgcgatcttgtatttgatcttgtcaatggtgtgtcaaatcaaatggtccaggaacaatggggaaatgaacttctgtgcatagctgctagtgcaggctgcatgcaatcgagacagaatgcacggttgcactgttaaatagcccttctcatcggaatgagaggttaacagcacgtggataattggaggttataaccttggaatctagtcgggattttgttagatttctcacaggatatgtcatcttatttacttgccgtgatgaaccctatagtaagtggatggatgcaaatgccaacgtctgacttggcgggtaaaattctcctggaagtccaccggggcacattggggtaattgacttttgttcgaacgggcttccttaggcctgtgttttaaagttcaatgcggctctacaatttccatgggtatacaagttccaaccttggaaaagcttttaagcttatttttccaactcaacctttatgacttccagctgttctttgtttattggatttctttctctttgcattgttctctttggcttcgtagtctttgcgtagccttcattgcattgagagttttctttgaactccaagccgtctcaactctcaactatataaaacccaacactggccaccgttaaattccgtgagaaggacatactatacctagatgtaatagttacctagcgtctttatagactcttctattatctcatttcatccagccctttaaccattttcacaaagcagaatggacgacaattaccctctgtgggaaaagaagggaagaagcctacagaaatggatcgagaactaccgtgcagcgggttgcccgtactccatttccactttcaatctgaagcccagacatccggactataccgtcgatcgcacatctgtgcatctagacgcaaaattattgaccgcgcttaacatgagcaacgcgaattccacctgtcgaaaaattagcattaggcagcgtgacgaaggtccgccagtgtggtggattgggcgcactggaccaggtgtgatcttgattgacgatatctttaagtccaagagaagcgacgatccatatatatccgagttcaccaaggcagcctacaaactggacttccccttggacagtctgaagaatgtaattgttcccaatgtaaacgaagtgaacaccatttcgtgtatcaaaaaggtgtacaaatcccgcgaaggacttcgttatccatccagcacacagcaggcttgggagccgtcctcgtccgagttccatgctctgctaggaactggaatcggcaaaatcattgcagcgttcgttctgtgtgcatggggccaagggagaaagcgaattgtgagaattgttactttccacattggtgccgacgttcacaagctgtatatgcggttcgatctggatgatatgtgagaatttcttccttgctttcgttggccatctgatcgttttgaatgtttaccttgaggtgagtaggtagaataaattgtctgtgagagtttctttaatcgcatttatatctaggaattggcaattggcgatttcgacctaatacatctctgacaaggcgtgatttttacagcagcgcttcagagcgactaatatagaaaaaggtgcagatatctgagtcggatatcatgatatcatgatcataaggcagctggaatttcagacgaaaacaaaacaatagtatgtaaacacacggagaccgcggcctcaaatgccggaaatgaccatatttctagcacatacaacgaaaatcccaatatggcacccatcgctgcgattgcaaaattgttctggtttcaatccactcaaggaaatatcccaatccgtatctcattaaggcatatgatcttcataaaatcatcaaaaacacccggcgtaaaagaaaaaggaaagccgatcgtataaaatcaaatcaaacgacataaggcgcaggtctgctgcgactggagctgcgatgacgcgagtgtgagccagagccatgaccacgacgactagaatgactgcgtctccgaacaatcgtctccttaacaaccgggcgatgcgaatggtacaagaacagcgcaagcagcgcagtccagaagaagaatatcgtctccatgataccaagtgcgaagcaagccttcagcatagcgcaggtcttgttgacgtccagcgacagcggattatttgtgctctggccataggagccgaatggacccagagagatccagacggagccgccatgccagctggcacagttggcgttggtgataaaacggagctcgtagacggctgcaataaaggcgccgacgaagagcaggtccatgaacgcgacgaagattgcggatcgctttgttgttgagaagcggattagcgtgtcgatggcccagaagacggcgattacgctgacgatgaagaggaccaggatatatggtggggtcagcaggtttgctttcagatagccgttcacgaagtaggcctatattcagagacatcattagcgggagactcggaggggtattgctgatcggactggttaacagtggacataccagcatgccaatgattggaatcaggaagacgatctcaaccaggcgattgaatatgaagaacacgctgccaatcatcttgacggttcaaagagagattgggtttcagatctttggaatgtgcaactgtcccgacgtgcttggggtatgtccgaggcgccgtaacaagatcgtggggctacacgagcttgcgaaaaaaagcacaggcagttgcgattacagtgcaggatgcacgttttagaagacgcagaaggataacagaagagaaagtaaaaaggaaaaggaaaatagacagaataaagaggaaatcaaaaaaaaagatattcagcgtcatcttgggccgaggaggctgggcgactcacaacgcacgatgtcggtggctggggtatcccgagtcctccatgatgggtctcggcatctttgatatattgattagtctaagaacctgcatgagcagtcacttttgatccacgccttgcatttgattactccgtatccctcgggatgataggttagggcatgagaatatagatgatcgttgtcaagccaaccacataagtggagactttacggggaactactggactggacttcattgcacttggaaattgcatagaatactatttctgtttgaagagatagaggactcttgttaaattcatgcttggtcgaggcaacaaattcaggttctttgtttccagtgccaacacgctcataatcatattagtacagagttgtatcaccggccaccgcaataatccatggcttcatcaaatcataagcaaataacttgggcaattaccgctctgaactagactgcaaatcatcaatgaccccgtcattcatgtttacatggggatgttcgtcaacggacgccccggacccgccatcgcgtcagggacatggattcccgcattggccgtcagcggctgtgtctgcgacacatatgcattactggggtcatattgatgcgcattgtggtcggggccgggattctgccccatcgtatgaccatgtcgcatttcatacccgctgctaaggtcgtcctcactcgacgaccaagcaccgccgtcaagatcaaggtcgtgtggtcggcgattgtaaacattcgatggatacgggttggaggcatgaatataggtagaggtgtcgggtcgggcatgttccgatctggggatatctggcgggtccatgcgctcttcttcggggttgcggagagcagtcgagctatcttgcctgaagcccttgagtcgaactgtctccggtcctgaaggttcggtcccccaggttcggattgggtaggcgcggcccttgcgccagggttcggtgagcggtgggaaatactggcgatatgcgacaaagccgcagacgattccaagcatcgaccccgtaatcacatcgaaggggtggtgacgcgcgtccatgatacgcgatacggccacgagggttgcagctagtagaggagccatgatgacaagggatttccaggcctcaccgcgattgtccataacgtgcaacttcccacctagccagagcgatatgtagacgagaccggcgaaggaggctattgatcggactgtgttagtaatatgaaagactaggagaatcgcaaaaggtatacacacaactactgtgacctggatgaatttttaaggttagcacgtgcgactctgaaaagcagtactgggtcatatcgcataccagatggccacgaccgaaacccgtctgttaacaacgcgggatcaccggtacaaatcgttgagtttgacaatcctgggaaaaggtctttgctaccagcgcgtggttgacaacgatcaataagatcaggtctcggtttgccgcatgcgttcttcagcgcctgtgtaatgacgaacgcgagtccctgagccagcaacagacccaaaataccacaattgagctcccaaagtctgtccttccagcgatgcggacctcttagcttccgcttcccagacgccgcgtcatgtggcttatggtgcgaaaacaagccatcgataaacaaggtgtagaggatgatgagaacgagtgggaaagcaccggagatgcagagggcgtaaggcatgggaatacgttcatgtacggcgtaaggatattggatggagatgttggtgagggagaagtgttggtggaagggctcgatcgtgttgagaatggcgaagccggcaacgcaggcactatttccatggttagtacggagtaaagagaggaattgatgcacgtacataatgatcacatagtcaaagatgtagctgtggaattgttagttggatttgcggggagacctggggaaagtcgacacacgagataacaacacgcggtcgcagccgccgcttggagaaggggagttttgcggggatttccatgctgactccaaggcttccccaggaaattcgaaaattggagaagatcagaagaccagaggatcaaaaggcctgggagaaaataaacatatctgcctagtccagggcattgcttggcatcggcatgaatagcacctggcggctttcgttctgattggccgtcgcaaagtggctgagcttgtgggacctcagggcgggctatgtatacttcgatatccacttggacattaatacctagtacgggtactgctatatcaggttcaatagacagctagcggcccaaattctcatcccagttcgatatggggtagtggttaacctagcggattttcagtatctgacctccgcggccccgggttcgattcccggtatcgaagttctttttttctttccaacctgtttagtacggagtatgctgtggacaactatttcgacggcattgtatgcgtgaaagatgtacctagtttttgttgcccagccgacaaatagatccacatagttatacatattctctgtggtaatctacttaaaacggaaggagtgaattcatatactaatacacaagctgaagggacgctgacgctatgtgcatgcgtctaactttcaagatcaaccagaaatggccatattttcaaattcaccaaatagacggttagcttttgagaaagactacttccgtatagacacaggaccatcaaaatccgaaaacgagaagagaaaaatatcaactacatatcgacgtgaaagaggcgtcaatggaagtttacaaggcataagaaatggccctaggaatcacatgtctatagtcgtaaacagccaaattgcacagattccgcatttagcaagtggtgatgaacaggccgagactgaaagtgctgttagctgatatacaggcaaaagggaaagcgacgagaaaacttacggagaggggttccagtcctcgaagaagttgaagtcggtgctaccagcattcttcatctcataggtaacagactggccagccgggcaagagaaggtagagacaacgtatgagttgcccggggagacagtgatagtaccgaggtcctgggacaccgagggcacgttactaaaggaggttgaggaatcggcaggggaagagagctgagcgaagtcgatcctgccatccccattaaaggtgtaagacgaagtctcgagctggtcaagcctagggaaaaggaacacgaggctgcaggtcttcccagagtcggaatttgggatgtcgaagttgaacacggtcgaggtggtcgaggtcacgctgccgttaagcccagttccagcaggggtatcaggtgaggacgagtcgacaggaacaataaggtgagggatctcatagttgcccgagagggtagtgggacaaccaccgccggaggtcccagtggtcgatgcggtaggagaggtagggctagcggagctagtgggatgaggggcaccaccggaggtagcggggacggaagctgacccagtgggacgtgggctaccagtggggggaggcacggtagcagagccaccagggtgcgaaccaccactacctccgccaccgccgggggaagttgcactaggagaggtcccaggctgcgaactaccgccagtatgagcaggtacggtagccgagccaccagggtgtgaaccaccaccgccggggaaaggaggcacactaacagagatacctccaccgcctccgcccccgccgccaggggaaggtgcactaggagaggcgccaggctgcgattcaccaccgccagtgggagcaggcacggtagcaaagccaccagggtgcgaaccaccgccgccgccaccgccgggggagggtgcactaggagaggcaccaggctgcgattcaccaccaccaccgccgccgccgggagagggatgtgttactgtaacagtaatagggggctgcggcccggcaccaccaccgccgccgccgggagcaggctgtgtcaccgtaacagtaacagagggctgcggcccggcaccaccaggagctcctggaccaccggaggtagggcagctgcagtcagtgacagtgaccgtggtcgtggcagtgtgagaaccggtaccaggagcagggccaggcgcaggaccaggggcgggaccaggaccagcgccaccccctccagggccaccaccaccaggaccaggagcgggaccaggagcagggccaggggcgggaccaggggcgggaccaggaccaggaccagggccagtgccaccacctccagggccagcgggaccaggcgcaggactaggactaggagctgggctagaaccaggaccaggaccaccagtgcccgagcaggagtcggcagacatttgcacattcacacatccagtgacatccatcttgttaggggtagtgtagacattcataccagcgttctcgcccgtagcacatgcaatgaagtcagggctgttatggtactcaagtttaccctgggagttgacagagaaaccgggtgtagcagtcacaccctcatcacactggagttgagtagtgggagctgtcatatcatcagatgcatgtccttaagtagttgatatatagggcattgattaattcacttacgagtgaggatgcacccacggccgctggagtcagtaatgctgccattggcatcgatgcagtactgtgcgggttgcagattactatcgccaatacggttctggccatcacctagctggccaagtgtaccggaggcaccgccggaggaagtaaggtgaaagcagcagctatcagcgcggccaacgagggcgttagagcccgcagcaaagacagcgacggcaatgatgttcctcatggttgctgttcagcgaatatgaataggctgatcagctagtgaatgaacacggcaccccttcttaagaagatcgcgagcaattgaacgacctgacaatatataccggtagagttgtgcaggtggcttgggttgagggagcaaggttttggggagagtgcatctttataggcagcagtgggggttacgattcaaacagaatataacatcagggcacacatggccggcaaaagtccccgagatcaaacacagagaagttgcatgttgtcagccattcatgccaatgaccgtggggaagaactccgatggaccagtaccctggtttcggagagtagacaatagtaggtccgaaccagccggagcgagatgcgtaggaacatccacaaacgtcatgttgaacagagacccaattgattgaggtgtaaagaaatagagtatgaggatatgcttgtttctccactttaaagcaggatctgaagacatggacaatggtcactggccgggtatgagagggatgtagactcaatgttttgctaacgcccaggcaacccgattgaaagtggcaatatgaatcttcccatagatgactgctaatttgagtgctccaagaggctcaagccattcaattgagttccattgttgttattaggcagttgagagtatattcgtcacgatactcatctcatgctctagtttctgatccagtagctagtaatatcgtacatatagacagttatatgatcctagtattgcatcgaacttctccaaaacaagaaataacaatcatttgatagggctagtcgtcattgacaactgtggatctttgtgccatacatatagaatatagtacattgcatccttcaggtcatagagttaaagcaaaattgtgatacatataaaggatggctgctatgttgtacaaaacctggacttgtgtagcaaagtatagaggcactagtacagcatcaatcacttcattcataagtatgatgaaagacgaaaatcgaatagaagacaccgagagattggatcggattgtccacgggtgtcatcattaaacaatatggaagtggacccccgaattggacccgaccaacaacgccctactatttttatatcattcaaccatggcacatttatatacagtctgattttggaattattagccgcctcataccatttgctctgactgttctgcgcatatttcatatgactgagtcttttccacagtgaaggtttatcatactacagcgacgcatgtctctactgtctctattcatcgcatatccgacgaggctcccaatctaggattcattcatcgtgtcacatttctaatacaatatattgttacacagggagcaagatatggatgtgttcaggaaccaagcaaagtcactcctaatgcaacccgatcaatcgatcgcaaagctgcatcgctgccgcataggtttgatatcatgatacagatttgtgatgtcggacaaggttaagattgaaatggcggatttacaatacatagtaagctactgctttcattaacctcatcttgttattataccgtagcgtacggaatatgtttcttcgctgatcgcctccacccgttagtattgtacatatgccgggcaagtttaaaccgacgggccgtgtcgatctcaatgtgagagtgactgggtagctaagtggggcttaatgaactagagtattttacaaatgacgagtcttcatgcgtcataatgtcgtgaatttcaaatcccagtgccgagacctgtcgataattactactaatgctacatagacagaaatgcagtatccgactcggcaaagaggctgttccagtccacagcccctgagtccacattttcatcgaaaacctgccagaggtcatctagagtaggcaatgcggggtccattagaagctcatcgaagcttctgcctgttggatatgctgtgcttgtaggtgctggagaggcacagacaaggcctgaagaagccccagggccttgagcggtggattgagttattgtgttttcttcaacagccgagcccgaagcactgtgccgacggagagccgttttaagggattcaagcagccttcctgcaaaagggagttcctctttagccctttctagaattgaaaatgcttccaaaatttccgtttcctgttcctgccggtgatcactcccagaaaagtctatgaggagaacaatgatcgccacacagacggaatatagtaagcctggaagtcttagccgcattgtcgcaaaggggaccacctctagtgagagttggcgttcggtacgaatcaccattcgagctgcttccaggcatgctctccgtgagtaattgtatgtaggatctttagacgctcgcgacaaataaggcaagtgaagcctgcatctttgggcatgaagcagaaaattgatgatgtatcgttgtatgattattccgggagatctccaaggatcggtgtttggaagctcgtccgaccgatagtctaacgaaaagaacgagggtagactctctgcgaattcacaaatcttgccatcaatctgtttcgtgtgctcatagtccgggcttcctggatctgaaattccaaacggagcacaatctgtgatttcgcggcaaaattcgcccaatcgaatccgttggagacagtacgacatcgatgttgggtcggtgagtggctttccaactccgaccatcccgtccacaatatcttcatcattcgcattgcaaggtttgttggtcatcatgtggcgtggatcaattgaatatgtgcccttttgcgaaccagatagttgcgacatctgcctattatctgtgaactcgcattcttggaagaataagagggggaggaggaatactcaccaatcagtcgccacgagataccaccacactcttctacatatctctgctttcgcagaggatggcgaaggcatatctagatgggaattgtatggatgatcgatccgatgcaaggaaagttctcttccaaacgagatggcagtggaaaccatatgtcgagcttggggggtaatccccacgatgttagcagtcacaaatatgagaatgatcatcgcttggatatcctctatggattcgaagtgtttgtaacgcgagtaatcgaccatctccgacgcaagtctcatccaatgtgtagactgcgcaactgcttcttcaacggtcgaaaatatggagttgcacatgtcacgttcagcccagagcgacgtggtactggcgagaatgccgaggagcaacgaaacgtgcccaatcttgactggcttgctttctctcagattacaatagagttcctctaccatggtatgcactgaggggatatgaaccacatgatggaggaaagtgatctctgtgatgtacttttccactattatcttcgtttcgtcgtggagtggcagccagatacatcttttcatgggttgagctttatgtacgattggttcagatcccactgcattacggatggggcaagttctgaattcaatctcatacttgaaaatattaccctgtacactcttgtcagtcgatttcccatgattttaatttgatcgaggcctaccagtgagcctaacgatgatatctcgccttcaagccaatttaccgccgatgtggatgactggctttcatgaatcatggatgattgattcgattttggggtaggaggagaatggagtgacgaagcctgggtagtatcttgtgccatgggactagatgctggtccattggtgatcactatctcctccaacctccgcaagcggaccagtatatctgcatgataattgctaggcaatttatcagtctgactctgaggactggaaggcaatgctgtagtgggatagagctgacaagtcttgccccgactagtgcagttggagcaagggaattgccggctacacttgagcttccttgatcgacagaaatggcaagataccggtcgcgagcgtgaagatctaacacgctgtttctcgactccatgcattttgttccgaatattgttgaggcagtgttcgttgagctctagatgtggcgagatgccattacggagtcgaccaatcaaatgccggtgaatccgcggaagttccgtgcctccgcggatttcttactatgggaactatgtgagagacacgaggtatataagagcctctctacactagaaaatccatattaactcatcatccttctgtttcttctacaacatagaatcttcttatctcatttgtgtcaatatggactccatcattgctcagatccgagctcttgcccaaaccaccgatgaagctggtcggttggacatgattcagtccctcacacgattgaaaattgagcttcaatctccaaaagatgtcataatggaactggcagtaccggtcggtgggcacacaatgcaatttggggataccggaagtgctgacagttgtagggatcgacgagtgcgatgctccgaatttgtgcagatctgggactccttcgctctctcgcgagaagtgatgcacccttgactgtcacgcaaattgcggagctgactggagcgtctcctctattactaggtaatgttatctgagacgaccgtacttactttgaattctaaaacaattgttctgttcagagagaattcttcggtacctagccgcaacagacatgattcaagagacgggggtcaatgaatattctgcaaacaaggtcactcatgtcttggctgatcctaagggcgaggccatggtataccacgggtaggctacatagtcgcctccatctagcaaacatccctgcttaccagccttctcattagatacgacacgatgggacctgtgttgcaagcaatgcctgcattcttcgctgaaaacaactatcaagatgtcaccgacaataccaatactccgttccagaaagcccacaacacgaaactcacctcgttcgagtggcttatccagcagccaaagcagttcgagcacctgcaaaagatcatgactgcacttcaaggatcagaatggaccgaggggttcaaacttcttgatgatgaatcccgcaaggttccatccaaggtttcacccactgacccacagccttcggagaaacccttcttcgtcgacgttggtggcggccatggccaccaatgcattgagcttggaaagaagtatcccaacctcctaggctaccttgttctccaggacttgccagcggcagtgcagaatctccctccaattgacggcgtgaaggccgaggcttatgactttttccaaccgcagcccatcattggtttgtctccatctatccattggataatatcaaactgactttccttcaattcaggcgccaagttctactacctccgcagaatcatgcatgattggcccgatgacaaagctgcaagcatcctgcgcaatattcgcgctgccatgggccccgactcgcgggtgttgatcgatgaagccgtgttgccggatactggcgctgactggcaatcggccatggccgatcttgcaatgatgacctttgcgggtaaagagcggaccaagcatcagtgggagtcacttgcagaaagtgcgggcttgcgtgtggaacagattcatacttatgttgcttcaactcataccgctcttctcgttttggccgccaagtgagacagacatggcctagagcggaaatttggacttatctagcaagttattttatcactcttctctcttcatttatgtcacgctatcactccgaacgtaaatcttttttgagatcgatgaatttctactgtgcgattcgtagggttgtgtcgacactagaggtaggccttgacttcgctgaagagcttgggcagacgaagagctcaccttgagctgattcgacattcgcacgatttggtggtctgtgacgcggttatggatgtgtggatgggtatttaagatgaggcgtggcggactgaacacgcctaagaactggtaaatctaagtcaagtgcattatatgatctccattccccacctatattggatgctgtagatacattgatagcaaggacccggcatatatttatagagcaatattctttgctagccacctaaattcaaaacgccttgctagccgagtagataacacaaaatggtaaagtcgctgggggaggaagaggacaaaatataatgagtgaaagagaggactagagcctccgagactaatgcggatacaggtcgtgaatcatgtgcgtgccgagcgatatattatgggttcttgatagggtccactcaatggctgctttcagaggtggtcgaatcatggagtatgggtggtggaccacgggtggtagtcgtacgggtggtaatcgccgattctgctgacaccattcggattcccggcgtccgctctgtcggcgttggaggttcatcattgttggtactttggaattgcgactgagtcggcgtcaccggagaggcagccacgggattgggcacatcgatgtggatcgaagacgagcggtcgataggtgggagctgttgcggctgttcagtctgctccacaacaggactttgatatgcaggggcgtcaccccagtccaagtactcgtaatcgggaggcggagggatattgagcatccccagatctccatcgtcgggttgtgttcctagtcggcccgagtcgtgtgtcgtggtcgcagccagggttagtcgttcaagctcagtagaattctgcgattcgctgatcgacgaagaaacggattggcctcggccggatggttcgaaggattgcgcggagtcactttgcaatagcggtcggctgtccgaatcgttcatgtcagaattgtgcgagtcagctcgaagtcgtgatccatcgtggcgaacacgtccaatttcagcatagctaacgctagcgatgcgtcggtcccgctctctctgattctcggtcaggaccgtggatacgtcgactgcactgttggttcctgcacggcgacgttccgtccgagctcgagtctcggcattgagctgctcaaggcgagcaaaatccccccgcgaccgagcttctcgtcgctcccgacggcgcgtttcgcgatcggctagttcctgacggcgctgcaggcgtatctggtacatcgactccatctgttcctcccggcgagtttcctgttcctctgcagtctccgggtattccacgaccatatccatcccaccacgttcaccctctcgggcgataacttgttcggtcggcttcgggctttgggaataaggtgggagggtcataatcgaacggatcgaggtatcgcggcggacgccatcagtggtctgcatctccggtgctgcagccgctccacgataagaggtattttggccagttctttgattcggaacctggccgtatgatgcacttcctgggccccattttttccatttctgcttgaggtattttcccggaaggtatttcggttcgtagtgatgttgtcgcatataacggaacaggaagtagacgcccacacagaccgcgactgcaaatatgacggtcacgcaacactaagagaacaaggtcagcgttaggggaagaggtcggaagggtcggaaatgacatacaataataactatgttgttcttattcgagtcattttgacgtttttgtggaatgtacataattgttggacaggcaactgagcctagagattcttaatggaaggcatagaacaaaatccccggatttcaagagagtcgaagaatgagaaaaaaagacaaagcgcgtcagcctcggagggtctcagaggtggctggctattattatacgccaagcaatgaaacgttggcgtggccctggtgtggaggctggacaacttcggcctgtcctgaaatcaaattcttctttgtaatttacaaagtggcgatgcagttctctgcacttctcgagcattattatggattcatatcctggccctaatccttgttttgactcgtttccccggcgatcattctgcggcagatccctagccgttttagcctgggatcctttatcatcttgaattatttattgacttggatctcattattgactttcgatcgtgggagaagaactgcacgagtcccttgggtgcaagggaagaccttatacaaaaatagatacgccccttgggttcggaagcaaccggtatgagatcgtgctgagcatcatatctcgatcgcgaatcgtcaatctcccaccgttagggttcattagggcctgctaatcctcgaacaatgagaatcacctcgctaacctcggcctagattgtgagatgcgaatgaggggagtattatggtcgagacattgctcctagctcttcgtgccctttctgaaacactccccttcataggtcggtcatctccactacctgttatccacaggctcccattggcctgtagatctatgaattggtcgtgaatccaaggaaagcacctaacctttcagtgccacgagaattgccgtcccaaatttgtccggtggttcatctattttgggaacactgatatggacgacagcggatggcttcagtgtgccatatttctgcgcggctttgccccatcgcggttgatgttcattatggcccgtgccacaaaggaattatgatagtgtcctcggattatcatgttgtgtcgcttggtccagatcatgacgtggtgctcaaagtataagatcagcaacgacattgtccgggaatattgtaatgctccaatcgacgggctgctcaacacttattggtcggctatcatatatccctcgatatctctggtggctgtactatgtgcttgcagcggccagtgaggcgcagtaaatggcagataggctacagccgtggaggggggtgagaatgtgagaatcttggcgaatcttcacctaagaaggcttaagtcttttctaagtcccagtgacacttccttatcatcattttgaaatgaccattgttccttctgttatatataacagagacaattcaggatatcccgtgatcaatggaagagccgtcttactctcacagtgataaggtgtgggaaacgattgtcaggccctaacttctaatgttacgcaaagtgtgactgtagaagcttttggggaagataataaggttcattctctagctacagacatgctcgagaggcccacgtgaccgtatagtcccagtctagcccaattaggcctagtctatatttattctgccggttatattattctgccaaagttagccgatgacatctcaccgcattgaaacccatggccataggggttgaggccgatttaggcttctcttggtctccgtctgaatcgtgttcgatggcaaatgttctgctatatgagcgcagcgtgaaagtctttggagactggggagtgtagctcccatctgaaatattgagtaatcacagagatgttttaccatgttttaccatgttttggaatttctctttcaggttgtttacagatgtgagcccaggggatgctcttgaaaatcctcgttcttttcccagactccaataccctcgcttaagttaaaaccacaccttgagaaatctgtttactgcgaggctagctttctttccttctcactagaagactggatacaaatttcatacgcccaccacggcctctcaaaacttgataaacttatcttgcttttgtaggagaaaaggccacagattagtctcgttttgctaatatctcacgggctccacgatatattacaagacgtggctgagcgcaatgcaggaactgttgaatgtgagcatcaagagatatatgaagtattacacctttatagttgcctctgacctacactataatgccttagtcctagataaccgggtgagtagagctctccttctaaatgagataggcgaggaaaacgccagcaaggacatccttcagactctccttggcggactccactgagtctgtggatatactggcattgctgagtcactggaccaacttcaacctagtcataaaaagcaaaaaagtgggtagcgggatgttaaaaacttaaatgatagagaggatcaaaattgactatatgattggtggaaggtgtataagaagcaagaccctcaggtggttgctgctgccagaggtttctagtaatcctagcgtagaagtatcagttgagagactattcaacacaggaagagatgtgcttggtctacgtcgattcaccataaaggagagacgttgaggatattgacgatgctagattttgttttgctgagcgaagcgaggcaagataatatatcttacgaaatgtctcgataactcagctcacacgagaacggatttctagccaaaattcaaaattccttttgcacgttggtaagcatagatgcgaggagtttgcagtgcctggcccatctgggtaacataccataggacttgacagttggacttgagcattggatctcagtatttggtgaacaagtacattgaatatcactccactccacccagcccgtgttggatatccaccataccggcgacttctaacgatttatcacctagcaatgggccaacgtcaatgaaacctgcagtctcattggatgcacgaattgagtttgtgacatcgagtgacttcccattattgtcagctgtagaatagagaggtccctaggctgacaaaacgccccattcccccgcccccccgatttgtgtactagtagtcagtagccacttgccgcgattatctaagactcagcaggatacctaactaactagttaggtagatctcggcgcttctccgaacagttacactcattttacctcttgggccaatattctactgtccgtaccatagaaaacagtcctcactttgttcatcaccttatctctccgaatatttatcttaatctgctcaaataagccacaaggctcaaggttatcgtagcattacttcaatgggtatcttcattcctcgggcataaagattgcgataccatggcgtacgtaggtctaccagacccatcgttacaatatatccacttcaaatggacgatttggcgggatcgggatctcgggatccaaatattttgcgggaaagagatcgacgcgcggaacaaccccgttcggaaagacatcagcaagtacaatagcccatgcgccttgttctgtaccagcggggaacacgccttctcgaattgttgttcatcggcgggctagaatactgtattcaaaatctcaatttggaaggtgcagccccagcctatttgccattgccgcaaacctgcttttcggttttcttctttgatactgacttgctcacacagctatacatattacgtacggcctataagcaaaagttcaagaaaggaaagttgagcgtgaataatcctttcccatatgtaagacaggtgtcgatcgatttgacgtgccagggttctctgggtacccggatccatctccgcccgtggagctagcccgtgtggatgaaatcccggggcgagcaattacccgttgaggtaatgtgagacttcaaatccacatcactgatcggccgacagagcttttgggaataaaataggctgtaaaagctggccttgacgaatttctggtgaggtgtatattattctgcccctgaaatcacgcatatgaatacgggaacgagcatttacctgcccaagcaatactccatacaagccttccgattacattgctgatggttgtataaaatagaaaacaagtcaaaagtggaaacgataatcagagccaacgcaagatttagatacaggtgacctttgaatgggaaacatgacaccgaaatcaattattatttgatggttctgggtatacaacatagtctttagtcatatcacccgattttacgtgaagctatcagaacgggtgccggtggctgctgtggtgcgaatgcgctacgggaatgcaagccaagggtgacttcagtgcttcacgtattggaatgtattatattgtaccgtttcagagaaaggatgcgcccagtttctgcaaatcctccatgtggcgtggtatagctgatgtctaatccgacgacccagccagccctgaaagcttggcgcttattgctgaaagcttggcgcttattgctgaaagcttggcgcttattgcttaaagcttggcgcttattttgctggccacgccggatgagaaaccccacaccaacaatgagaccatttgatcgagatgcatcactagactagggagacagctcgctggagtttggctatggcatattatttcgaatcggttctgtcttgactaattgcgctacaacgtatcttgctccagagggcaatgccggaaagtacgaagtctagatacgtaggatcaagctttgatggcttcattgggagcacgtggaaatgaatgcgacgtaacaatgtactcaatagcttcttcattgcacatgaagtcggtctacgaatctggttagagtgcattcaagttgactctgcggcaggatagttgacagaaatattgagttaaacgcttatacaccttgactcaaaaaggaaaatggtgaatttactttttgaaattaatggaatggcggagtaagccgctactgggcaaatttgacttcaatatgtctcaagacatttcggaatttcttggtatcttctccgtctctgggtcggcttcgagatataaaaggcgacatatgtcccagtgaaatgcgaacatatccaaccagacatcttctcatctcccattccaattgtcttacagccatcttccaaatcaggtaagtgagccttgctttccacttttatgagatgttcgacattcttacttgatgttcctagcaggcagccatgttcatcaaaccactgtcaggtattgcgctgcttctgcatgctgcagcacttacctccgcggaatttattgtcaaaattggatattttgggggtcttgttccaggccttcctagcaccgaacctggtgttggatgtgggctttatatgacaggaatcgccgaggggcaggcactttcggtcgactttcttccggaccatcaacccacggatgactgccctgcggctgatttggtactcttttgttcgagatggggatgtccgtttgagacaacatttgaacatcttgtcgaggtcactgtcttatcggacgattccagcgacaaatcgattaccgtgacagggcttgctcttagtggtaggagtgccacggttaagtgcccatggacaccagtgactatcggtagccaaggaggcctcggtctataccaggagtgggtatgcgacctgagtgcgacccaaggatgaagagcaggtggttaagattggcagttggggttgctcaaaaccagctgacgggcaactgaagttttgtttcgtgcctgcgagcctatgttgactgttcaatcaaagtgatgagccaggtggaaaccaaatgtctgtatatctttgtatcggattttgggttacgtgtggacctgatcgtcatgaccgccgggttttgtttgtgccagtgtgactgtctcgtctggcaaatggggatgctctcaacagtctttctctgtttcatttcagcgggtcagttacttcttccatttctataagccacagtatgtatgtacaaatggcttcacctaccctagttctagatcttgagcgcagatggtgtcttctttgaataaattgtcttttgactctgcaggctggtttttatacagacaaggattatcaagcttaacaaaacaagatagaaccccaatgcgtaggctccggcaaagcgcgagggccgacccgctcggaggctaccagtcattaccgggaccgggtaacctggtgaccttggcgacctggcgacctggcgaaccccttattcgtcgggactgacagctagaatttccagcaaaaactcaaaagcatcgattagtcaaattgaagtgtgatgatgattcctgacttggcccttgaccattgtcgtacagccacctttgatagaccgctacttatacatggtggcgaaggtctgaggcacaacattacttgaaaaagaataatccctagcggtgcttagatctcgcttattcacaaatatcaggactaaatcaacccaagtgcagtgccttggttaatataacgttcgtcggatggttttggtaaacacgtggatgctagttgtctcatttgctgcttttggatattgctagacgatgacatgtgatttggaaatggggggttgacttcgcataagttatctagatagataccaacattgtagaaagaaaaaacatcaagctgaagcaatccgtgtaataatgttcaaactccgaggcatggggcgtggttctttcagaacttgggtgctggaaaaaccatgaacttcagtaacatattaattgcgatcgtctcgtggccgtacaggaatatcaaatggtcgtgctggccaataaaatcaaggcgtaaatgacctcacgcatcccccttgaccgaactgagcgaggatatcgcaagtcggtctccttgaaggtcaagtattcggcctcttgatccctgaatcaataggattttacataatggttaactcgaagttgttccccgcataaagagactaagctgaataggtggtaattgaatcacctgaaaactcagcatgatcgcgccgtcccgcagttgcttagatcgacatcggtatatactgttgttgatatcgacacgctgcttgttgtggacgatgatcgatatgtccgcttaaatcagatatccggaccaatggggtccaagctacctcctccgacaaagttgaggtcatcgccacgttgcatcacagggtcttgtcaccctgccctacctggggccatgagattggcatgaattcaacaaagaagttgagcgataatatatatataatgcgaccctgttgcaaactgaaacttcggtaacaccttcaaaccccttggcagccttgtggatcttgatacggctctcctattggacttttacgccactcatttaagatctcagtccacctgaactctcaaacccctcgagacactgatatcgcgcaaaatggcaacattgaactttgatttgaaaaacagcactggttctaacacggtctacgcctatattacaggccaggcgcttgataataacaatgcgcttttcctcttgcgatctgatggtaaaaccgcctactatccgacctcaccatcggccactggggccgctctgagcgaggattgtgcgattccgttgggtgcgtctggcaataccatcaccattactatcccgcaccttgcaggcgcccgactgtggtttgcgcaagacaacaaattgacattctttctgaatcctggccctgcccttgttgagccttcggtatccaacccatcggacgctaactacaatctgatgtggtccttttgcgaattcacctggaatgactatcagctttatgcaaatctcagctacgtcgacttcgtgtcgatgcctatcgctatgactctaaccaacggatctggtgtagaccagaccgtcaagggtctgccagccaatggccttgatctagtctgcaatgctctcaaagaacagaacaccaaggatagtgccggctgggatcagctcatcatccagcacaacggtgtcaatttgcgggcggtttcgccaaacacgggaagagccctcaataattctttgttcgacaattactacgggagctacgtggatcaagtctggtcttactacggaaacaatactttgacagtcaacacgcaagctgccgccggtgatgtcaccgccaaggttgcctctgatctcttgtccttctcagttgcaggtatttcctacaccaagccgtctaccggagacatcttcagcaacagcagtggatcctttgctgtttctgggaatagcaccaaagatgccgttaccgctcgtcttgcagctgcgttcaaccgctcaactttgttgataaatagcgaccagccgaacggggagtcggtttcaaactactacaaaaaccctgtgacgaaccactacgcccgcatctgtcattctgtaaacattgatacccgaggctatgcgttcccctatgatgatgttgcgcctaacgatggcgccgatcagtctggcagtgtttttgatggcaatccaaagctcctgacggtcaccattggcggcggctctagtaattctgtcaagcagtctgccgttgaggacaatgctacgccaatccagcgacctgtggagaatggacaaagcaaggagagtggaaggaagccgagccgcttccatgagctgaggagctttgtgaataagctgtcgcacaggaagagcaaaacctgagaaacataggcttgtctcagcgctatatgattatgctgtcgtatattgtaaatgctaacgtatatatgtgaccttcggtcgtcattctgtcttttgaattcgttggaaataggagaatatgattctatcccttgcaacatacaagagagtaaggtgcctgcaaattgatgacctgcatcgttgtaacagttccctctgcttattccctagcatgctttttaatgtaagcaaccacctgatccggcatagccaaccagggcgtgtgtccggcattaattttctcggtttcaatttgtgcccccttccgtcgtgcccgctccaccaacacctgctgaaccggcaacggaatcgcgcgatcatcctcggtcagaagatatgtagaggggatgttcatatacgctgcaccagtagcgggcgcgttcttagtcgcccaagaatgtggcttcagaagcttgacccactccgcaccatcaggaacatcatggaaaaacagcacgagtggatcgctggcagtcacagttcccttctcttcctggaataaatgtcagtggtcacatagaaagtttgcaaatagaagtcggacaacttacatcgcgcacataccacggcgggggcatcccaccaaacgcgccgatcaaactctcgccaatgctgggcaggaaagcggcaatgaagatgagtttcacgacgccgcccttctggccggctgcttcgcgctctgacctgctcagcccatctaacgcgctgctcactggtaacccggcccagctgtgcgtgacgatgacgatgtcatggccagcatctgcctcctgttgagtgatagatctcacggcctcgatatctgactgaaggtcgacaacagagctggcttgctggatggagggaaatgcgatactgtggcagctatagtcggcgaggtccttgatgattgggtcgaagatggtgggcgggcaccatgcgcccgccgcgaaaatcagagttgtctttgacattgtcgccccggttaatgtgaaagctatatgaattggatacgggcgcttgctctgtgaaatgcaagcttgtaaggctgagaggttgcagtggtcatggaagcgaccatgcgggacttcattttcactttaattttaccgcttttctctcccgtctgaattaatatctcatccacatcgatgatttccattacactcttggttattcatagcagtgacatctttacgtggtgtcgcgggttactcgggtatacacgatgacgcaaattacaatgatattggccagtacaggaaccagtgaaaggaaatagacaatgtgtacggagtatcgagaccaagtctcaaaggaacaacattttgaaacaatttaacccacttcctcggggtcactgagcaaggcatgcaacttgccaccatccatttttgccagagcctggtacggtccatcctctacgacagctccctggtcaagaacaacgacatggttcgcgatctcgatcatttccttcgagtgcgtgataatgataacagtaagcccttgacgcacggccactaactgctgcactgtttgccggacgatctctgcacccgctggatccaagctggacgtggcttcatcgagaatcaagatttgaggttgacgcaagagagcccgtgcaatgaccacacgctgtttctgaccacccgaaaggccaaccccgccatctccgatcacagtattatatccacgaggcagagaggagatgaaatcatcaattcctgctccttcagcggcagctcggacactatgagatgaggctagaggtgagtgctgatctagcccgtaactgatattttcatgaatagtgccggggaaaatggttggttgttgcgatacgatggagatctgtgagcggagagtagggacatgcagccgaaggatgtccgcgccgccgagtgtcactgtaggctgtcccatttcggaggccggagcttcgtagagcgataatagcagcgacgcgattgtggattttcccgatccggatcgtcctacgagcgctgtgcatgagttgcgtgggatggtaatcgagacattctttaacaccgatgtgtttggccgagagggataacggaaattcaggttggtgagcttgattggggtgagctctgaaacaatcaaactaccgaggtgctcgtgggatccatcttgtgagagtttcgcaaggcgaatgagctgtgtcgctacctcacgggatgtgttgatttggggaactatcaaggcgtgagttgagtgcttcgaagtgtttcggggcctacttactccatgagagaatctgagcagcgtatccaatgctgaaaagtagcatcgagaataccatcatcacatcgttcacactgaactctcgggatgctgcgagaaccgctccataatagaatatcaaagctattcaagagagttagaacaatggcaaacaataaataatcagcgagcttacctgtagaaaaaatgactgttgattccaccataccgaaaagcatgcctgtatagatagcacgtttcagccccagcaacaagcaccgtgcggtcgcatgagcttgtttgcgatggaagtgaccttctaaggtcaatgtcctcacggtacggatctctgaaaaggtctccgtaaagacatcggcggcgatactgttcgcgtcattgcatcgtctttcccatagcccatttgttccctcgaagcctcgagtgatgatataaatgacaggtccacaggaaagagcaacaagtgtcaacttccagcaaacaatcaagctccagataactgccatggcggtgattgctgctgcaacgatcacaaaaccggcaaatcggccaagcaggtttcgcatgtcttcgccattttgatcgagggacgatgtgagtctgagagatccgttaccatctttctcaaaccaggcgcgtggttgatcgagaatgcgttcaaaggcatttttcctaaatgaatccatccaagcctcgccgcaaagttctaggaagtaatgcatgaaaaaggacgcaaggccatcgccgaaagacactcctaagacagcaagcgaccatgtcatggttaggtgttcgctgttatttccagcatagaaggttccaaacagctgcgacaggcaatatgagaacaacggagttgcgcttgcgtgggccagtgctgcggcgaatcctaggaagaggatgattcgctgtctgatcgtcaaggtcgaaggaatggtgcccataattcgagagagcggagtcattcgttctttcagtatcttctgctcttttgacttcttgcggcggccatgagatctccggctgcgcttcgcctctgatggatttttcgcggtgtattcattgagccatggagacttcaggctctgatcatcaatgtgaaccatttcgacttcttccgtgggaatttgaatggctatttctttcgagtcccattggggatcaggtccttccgtcgtgaaagaaagacgttggctccaatcttgcaagagcgatccggggaactgttcgttcctgactacatattcctccttcctccttgaggttaagtccagtgagcctgagcgaaaggtcgggggtatgtggccttgaacccaggatgtcctagctcgatgatgtccgagaaacgctgttggaggtctgaatgtatccaagctttccgacgatgagctctcccatggtaagtccatatcatccagagctctttcattcttggtttcaagatggccgtcgactttcgtatggaagtacttctcactctccggactgacctcgacagcgtatctgtaaccggatttcacaatcgaaccctgttcgagaatgtacaggaaatcttgttccataatttgtgacatctcgtgagtgatgatgatggttgtctttcctttccgccactcacggattgccttcattattgcgactcggttggcatgatcgagagcgctggtgggctcgtccaggatcagaattggggtgtcgcgtaatttcgctctggcaattgcaactcgctgtctttggccaccgctcaaaaagcttccaccggggccaacgcatgtgttgattcccttggggagaccattgattgtgctctcaagcatggccaactcaatgggatctttgacatcttgcttagtgacgctttcatgatcctggcgaccgaaggcgatgttcgtgagcacagactcattgaagagaacgcttttttgctctaaaagagtgatattgttgcgaatccagttgatgtcgagtctttggattggattgcggtcaatcaagatttcacccgaggttggcaagtagaaccgcatcagcagttggctgagggtgcttttaccagagccgcttttccctataacaaacgtcgtttctccagcggggaagaaaaagcttgacggtttgagaacgcattgatcgggttgactaggatatgaaaatgataccttcatgaatgttcgttagtgtccatttaaaacccagagaagagttcatactcacgtttttcacctcaatatcaccttcacagtgttccggataccgagttccctttacctcgctgacaatcttgtcttctctccggctctgtattatcgatctcaaggcgacaccagcgacccttcccttttccatcacgatcatctgtggcaacacctgctcgatggattgagctgcggtcagacaggcccagaaagttctgagaacttctccggatgtgagtttcccggcgcgtgcaagggaactgccataccaaaatccctgaacaaacatcccaaacatcatccatcggatgatagcaatttgcagagaattcagccgagcctgtcgaaggtaatgtgtggcagaactctcaatgcgctcagcaaaattccgatgctcgaacgcctgcccattaaggcatttgactgtatcgatattggtgatagcgttgttagcaaccttggaagcctccgtaagctcagcctgctgtgccgtaatgctgaacttcattttggaagacagatatacaataattgccgagaatatgggaatgcccgcaagagttaccagagagaggctccatgatgtgtagaagcccagccccagtgaagccagcgaacggcatgagtattgcaggacaagtccgagtggctgcgatgtcgccatctgcatttcatggatgtgtctaaaattaatattagatataatattttcaacgagtattgtcgcaaactcacgcttgaatccccgataacaaagccccggagccctcacttttggcctcaaaccactcaacgtcgcgctttagcaactcttgaaatacttggctgcgaacaatggaggcctgcatttccccgaatgcaacgaacagggcatagtatgcaccgttcaagaaccaaccagctatccccagcgcaatcattccaaagcaatttgtgatcactttgccatggagctcttcagcatcagtctgaccggctccgaaagatgtgaacgagtcaaacacattgccaaggaaaattgcaagtcctggcgtaacacaactggcaaccacggcgaagatagatccggatatcagagtcggcaggtgtcttcgagtcgtgaatccgaacagtgatttccagcccggattgcgctcggggatattttctttgttagtgtcgttatgatctgaagtcttgcgttcgggcaacattttggcgacaggctcgaacggcacgttgaaggcctagtatgacttgtggagatagtccttgtcgcgctgtagtggcatagcagtgaggtaagatggaagaggatacagatcgacatgaaatggccatgatgggctatttgagtgtgaacccagatacataatccaagagaaagaacaatacttagaaattcccaaatgcggcaatattgaggaggggtgcagaacaaagacacccatgctctggcattgttacgaggcacctgagatgaatgtaccattcatcgacttcaaccttgagacagcaatcatacattgccttcacggttggtagcaaatctctaacagtcaaggaaacatagggctagataacttactcaatgtttgatgcacgatgaccactatcacccgcaatgattgctctatttcgaatcagatagtggctcagaagatagacagaggaccaatggaaatgtcaatttatttagggtatatttcggaccaaatgttgaaagactgtcgaagtcctagcggacatccaatttacatttgagtcgcgattaatggtccgatgctaaatcagaaccacatatttatgggtatgaccacgcttctatcgtaacaatattaacctcaagacatgatactgcaagatcatgtaatcagcattacaagtctcgaggccattcatcatctgcgccacaaggaaacaggcaaaggccgtcggccagatcagcccggacggatgaggaactgtcctcgatttgtaggacagcagcaatgagacacgatttgtaatcaggagctagccttctgggccttctcgtaaacccaatcgttcaggccggcgcggtttctagaagactccatcagtttctatgcatgattcactaagctccaatcagcacttaccgagcgatttcgatagcgtagaactgcatgcgcacaccgaaaatggtggtattttggtcgtactcgacatccgcacgggtacggatcatggtgccaaagttgtagtcctcgatctggtcccacttcatcatccaggtgcgccacttctccttgccctctttgctcttcatctcgtcttcgacaagagttgcggcgggatcaaaatcgggaaatgcctctttgaatgagtcgtaaatatcatcatcctgcttggtcaagtgaagcgtcgagcccttgaccttctccagaatagaccagtatgtcatgagatgttcaaccgctgtaatgtgaaagaatattaatattataacttttaaaaaagctgtgagtgagatgtaaatcaatgcgtggctgacctttgacggcgaactgcttctccatctgttgcgattgtcagcgatcaagattcatcggtctttagtatggacgtggggtcgtacatcctccaaattctccgcctcctcggggtcgaatggtttcgccatagtggtagttgtaatagtaatgctttgagatacaaagaaagtagtaaaggcagtgatatgagaaatggaaaggaagtcaagttggagtgttcggtgccccgcgcatagttttttgacgggcggagagcagcctccgcctacacccatggcctgatcgttgacgtcattccgcccgcagcccacgggtataaacgtcatgttcggctcaattaggtatacctagtataacttgctgttgcatgatgttaggggttttacatgtaaaacttcgccgttctttgtgcattcgaattctgcaagaagcatagaactttcctatgtataaccaaggagaaggacaagtttaaccccacatagaccctgaattaacgccagcatcgctacagagttactatagggtatagtcatagaatgtgcatgcagtgaatcacagctcaaaagcattgcttccaaatgagtcttcaaaaggtaatgctcagtcactatcagcatcatccggtagttcttcgaatcttccctcgtggagagcctgagtcaccgggttctcgacattaaggagaccatttgctttggccctgcgataaataattgttagcaatggctctagatagctcgtttacgatgcacctacctctcaaacaacacaaagagtctctccgcctcgcgctccttctcctccatggtcataggtggaccggtgtcctgtcgctcagcggcccaccgttgtccagtgattggattgcgtgcggtttcagggtcctctgtagctgaatatgcctcgcgtgcactttgtggcatctcaatgccgcgcgctgccaggaacccagcagcgaagccgtagccaatattcttggtgagtttctcggaatccttatctgatagaacaaacatcagttccgaaattgtaactttcagattggtaaagtggcctgtcgagagtttcagcagtctcgaagaaagtgtttcagactgcccaattggcaagcttcggtcagtgtcctcgggcagaagaagcgactgcatatgcttgcggggttcattgggtgccacttcgtggatagcgatgagtgaatatagcaaggggactgcgttttcctctagctccttcgggctatatatggatgtggcctgatccaagatgctgatcagcttgtccatgttgcagttgttgtcaaatgccgggaaaagggggctgctctcgaaggctttgcctttcttttcctccaagtcaaggatagacaatgtgttgagcaagccgccaactaaaccatcaaggggttttgctgggatatcaatacgacatataatcttcaaaatatgagggatggaaggggagaactcggcagcaagatccggaaatatcttggagatgttgtaaatcaatttcagagtgtccgttaatgccagttcgtccatttgtgacaatggttttcttcctgacttggggaactgctttgcatgacggctcaattgctatactagtcagtacagcaaatcaactttcgagtctgtcgatccactaacgtagttgatattttcccccaaggcgtgacttttgatcaagtctttaaagtctagtgtggtgttgtaggtcgcgtagaacaatatgcggcttgtaaccatctcgtcttccgagtcttcggtctatcaaacattagtgtcagctttcgtaccaacaatttacctgctgtagccataccttgagcttttctgctagttttccgccgtatcccgtgtcgacaaaagcctggcgcattttggggtccagtaatagcgcatttgcaacacatcgcaatgccgctcggcgtacttcaggagtctccccctcaacgccataccgcaccaatgtattaatgccctgaaaatgatcagaatccattgtaattctcattttcgacgggcaacttcatctgttgtgctcatacattctgtgaatagatcggttctgcgttggtagggttcgtgccatgttgtcggagctgaaggagggtttgaactcggtctagtagtagatggtatcggtattaggcacgtaaaatggctatcgcagcggactgacctgctgttgagaggttgttctcttgtaggtctttctcaagagactgtagaagctgtgtcacttgttgtagcttcgctgtatgtgcaagctcaagtcagtcaatctactggagattagaaagttccgcgacggacctgttccttgcatctgaagggacgacatgttgatcttagctcggactaagtcgagtgttccgagtacaggggtgatgtaggactgatgtcacttccacctatgccttgagctgagatagaatttctggcacagtattagagtaagatttgatcagatcagtagcttgagcaggtagggcacctacatgtaggtatgcacaagagaataaaaagaaaggagagggaggcgcgcgggaaagtcaggcgcgaatcgtcataaattattcggccaccccccctttaagcttcccttaactgtagcaatctatataacaatgtattcctacataattatgagaaatgccctatcttgcaccacttgattccagatattttgtataatgctttttcgaacttttccgaactccgctggttgcctgaagaatgtggcagtaatatattgaagtcagacatttcatgctaaattttgaccgctgaacactgatcgttgttgctgattactacatactcacacactgaaatactctccaatgcctttgaagctatagtcaatcgcatgagagagtccacgtatggatgcctcgtcgcctcaggcggcgacactttacgcgcatcgcggcgcgtcggaacttgaacttagttttctcagcttgatgtggcttcttgattcttcagtctgaaacagatcatggacagggcctgaacagcatcttattcagcaatgatccttgactattggctcttttcccctttcacacttcttgtccgattcaaatcatggtggagatcctccctgctcgtccgcccacacccccaaggacaacttcgcgcattgtgattgaaaacgccgagtcaccaccagccgttcaaacacccaatgagtcaccattttccgcgttagggtcggtgcaggttggtccatccagccgcagttcgaagaaagtgaatttctctccatggcccaagtacatcaaaccaccaacatttgctagtgccatgaaatcggcccccgacttcaagactatccctccgtctccgaactccaagcctacgaagtcgatcttgaaagcaacccagtcgccaattcccgtttggtcacccaacgtcgatacattcaccgccgaatcgcttgccatgctgctcgaatcagtaatccaacagctggctggcgagtcgatgagctcccgactcgacgcctacatgcaattttatggtgcgctacgcacttataacgggcttccagcgggtcagaagattgccgaaaaattgaatctcatcaccgagtttattcagcgagatgtgaatcgggactttgcgaacggctcccttctcgacacaaaccttgccaatcaagctctgaaattgtcaatctcgtttgtttggaatccggagatttcgacccagctttcggaagagttcaaaatctttctggtcgaccattccatcacttgtctccatgaggccaaggccccaaagtccgttttgatacactacatgtccatattgtctaatcagagctttggacccaagattatgaccggtgctcgtgtagcccgccttttgacagtactacaagacataaataagaacatcagtggcaactcaattgtttctcatcgattgaacatttaccagcggctgctgggccaagccaaatccgctttcatctcccaagcaagcctgtggatggaaaacttgatattcgggctgcttcatactttgaaggatactaggtcaaaatcgatttcatttggcttccaggtggcgacagacgccggtccaaatcctatactgtcgaaaaacatccgggatctctttgaccggccattagagcatgaccgaaagcttgtgtccgagattcgtgagcgcatgactcgaatgatggcgacggatagcggtgagcatgttcctcaaatttggagcatcattatccttcttctccggagcaaaagatggaattttgagcaatgggaacattacaaggaatgggttctcgtactccaaaaatgcttcaattgcagcgagccagtgatcaaagcgcaggctatcgttggttggaatcgatttgtctttgctgtcagccccaacgaatcaacgagccgatctctcctaaaaatgctgggcaaaccggtactctctcaattcgaccgtaagaaggccgacaagtcaggagcaccgcccactcaacttgctctgacaagctactacaatctgttatactacacgtttcgcccttcagcttcttatcagcacctggatattatatgggaggaatacgtggccattccgtctgcaggcatcttctcatcagccccggttctcagtgactgtcttgcgcgcatattggcaaacctgctgtggagtacgcaggctaagatatgggtagagaatcgaatcaatgatactaccaaaatggaggcggaggaacttcctgcagccgacagcagatgggtccgatcaagaattacctcgattctaaaggtttttgagcatatatttaaagcctcggtctgggttgatggcgcggttggccaatctcatgtggcattggcctggagtagtctatccagtgctctatcgattgcgtccagcaaagagatcaccccttcgggggaatcaatgcaagctgttgccagcgtttggagtctaatgcaccgcctttggaatgcagggtcgccctcattgaatgccggcaccacggatgagttcttcgaaagattcagattcttgtctacaacaatgattgtttcgattgggggtattccgtttaccgaaaagcttctcttgagaaatgcggatgagactgagagcatttccatacattcacctcctaatacgacccaagaaagtgctattcttcacctccttcgaataatcagcagcactgcggggacaatggtgccaagccaatcttataaactccttgtcttatgtaatattgaagcagcatgcaacgggagattctcccgaggaactcgcctcgaacttctccaacagtgtgcagaattgagcacttcgaaggccagtgctattccacgagcagctcagctttcggaggtggtttggaatgccactgcccaggtggccgcagattctttgcagtcgttccccatggaatccgctcgtgggcgcgacgggtctgtatctcgtgactacgaaaatgtcattaagattctctccctcggactttcgtttccatcggctttcgaagggtggtctcatttacttgaaacctttgttcgcgtggttcgaacagagaaagggaaccaagcggttgccactatgattgtggaacccatggccgagcgcctcatgtatctttgcgctggagatacttacctaccctcgacttcactgcttggtcattccttatctatccctttcatgcaaggaactgggctagggattgatcgcagcggcatccaggcagctggacatgtcatctttcctcataaacttatcgcgtcgactgcgcagacattacatgatgcatatcacaatttcaacgcatcacaatcccacggtcttgccgacttcatcgaggcattgacttctttcctggggatcggtgttccgcagttccaatcacaaattcttcaaaatctccagtcatcccttggtctctggttgaaggacgaatcttacaaaattcacgttgaccacggcgttgacagcagaattctgacagcgtgccgtgcgctatcgtcagctactatcaatattctccaaaaatcagtttcccatgatctagcttctttgaaaatcttcgagccgattatttgcgccggtttggagtcttcgcacatgtcaatagccaagagatatgtcgaactttggggcttgacctttggctcacagtctttagccactccagtcaccattttacaagctgtacaaactgctagctcgaggttgcagaccgcaacattgcctccgcaagacggtgatcaggataccgagatgtcacctccatctccgcaagacaagatgaatcggtcattgcatcagccgtctcaggacactcagctttcgtcccccgtcatacggaccgaagactcctcggtggccatcaagccaactgagcagttccatgaaccccagttaccgagtaaccttcatcagcccacggatgcgcaaattattgatggtgtttcagtgtctcacaagcgcaagagccgtagtgaaatgttttcgatgattgaatccattcaatcttcgtcgcctgctagtacgccgcggaaattgggcttcgatactcctccgcatctgcccaaactacatggagaatcaaagaccgaacttcctctaacgcccactctcgcccctactgagaatgaagaaggattcatcggctcttctcctactcctggaaccagagacccaacgcctgctatgaactccgacgcactcacatcgggccatctacttgcggatttgggtatggaccctccatcttctcctccagatatgcaatctcggagtccaagccctcggaagagtcgctcgaaaagtgcgcggcgaaaggctgcaaaggcaagaaaggctcttgtcggtatctccggcaaacagtcaacggtcaacagcccggctacttcccatcttgcaacggaaaatatagatacacctatggggaatgcctatgactatgataacgaaaacgccgacactgcacctcgagtaaatggaatgactcccagccggcaacttcgatctgcgctaggtaaaaacccggatacagaagaaccttctgcggtgccactagttgattctgataagacacctgtccaacaacctactcgcagaagtaaatcaagctcgggctctaagaaaaaacgaaagcaatctcagtctaagcctgcagatgatcgacctcaggaagccgcagacatgccttctgttatccctccggatggtttcatggactcgagtgaggagacagagacacaagtcgcatcacagcttggacaagacttggaactagcattggatatggaggacagaggtcatctggagcgaacaaaacttccggacgagccatccaggaagaagagaaagcggaatcaaatggaatcatccccaactatgagaactgacaggcgccggtcttcaaggctgtccacagttaaagatgtggtcagtgtcgagctattgcagcctgatgactcacattcgcaccatgtcatttctcagtcggcctctccagctccatcattatcaccaactgcaactcgccgatccacccgcagttcacaacgaaaatatgctgatgacgcttccacggattcagtccctgcaactcagagctccgttgtgcaggaatcaacacaagatgccgagaccccgcggccgtccaaaaggactcgtaaatccattcatcttgaggaccagtctgtgtctagcaccatcggtagcactcctcaaggcgtctctcgagatacccgctcccgcaagacacggcatcagcaggcgtctcaacctcaaccttcaagcattgcatccgaggaaaatggcgatactgaccgcttgccacctgatgtcagcctagaccggatccccgagagccttattacagaagaccaagcgggccagaatacctctcttgtttcgaccgaagaggcaactgccactcaagtctctgaaagggagcaagccattgagtttgcggtaaaactagatcccgaggaggacatcaacatgaatgccgtccagcaatctggtggaacagtcgagcaaactacaagtattgccacaacgggtactcaaacccaagaaacaccccctgaacccaaatccgacatcagcgaacaaggcatcgtccaatccctgaagaacctcttaggtgaaatgaaaatgacgaccttgtcaccgagcgctttccgcgaagtcgatgatctcctcttcaacctccgttgcgaggcacaaaatgcatcaacgcgacacaatacttcagcatagcgaatggcgtttacagcgaaaacctgttggatatgaatttttttacattggaccccgtctcatcattattccccacctgcatcctatatatctttataacttgaagcacatcccatattttattgtttggcacgcttgatcccaaattatttttcttgtacgttaagttttccgcgctccgagctttccaaacattgaacattatgatcttcgggaagaagtacaaggacaggtttctatggatatttagttcactcactcacttccatatatttccctcggccatctgctttcgctaacaatcaaaacactccattcatagatattagccagttggagtctgacccgaaaggttcaggtacagcttacttgaatgtcatggtgacgcataccgccactttcctaaatagtatatcaaaccagtcctgatcaatttggcaaaacaggaatcattcaaagcttccgcaatcatatgtacatactgacttgactatatttgtccaagccatggccaccccaggcactcagtatatgatgcaagcctgcctagcagccgatatgtcaagctcaccacaccccaagccggtggacccttatctcagcgacccggtcagcatgcttccacccggcctaacacccgactcgaacagccgaatcaccttgcgcggtgtgagtggcaaggatgtacttattccctgcctgagtatcggcgcatggtcatggggggataaagcaacctttgattacaacccaacaagagacctaccgcgcatccacgcagcatgggccaagctcaaggctgttgggttgaccttcgtggacacagcacaatcctacggcgacggtgagagcgagcggatctgtggaatattgttccgagacatgcctcgcgactctttcgttgtacagaccaaatggttatcaacaccagatataaccaacacagtcctgcagtctggcgggcccaagtctaagcttaaagattcgctcgtgcgtcttcaactagactatgtcgacatctatctcgtccaagggcctatacatcctagcaagatatccattgtcgctaagggcatggccggctgcgtgaaatccggaatggcgcgcgcggttggagtggctaactatgacacaaatgaaatgatcaagatggctgatgaattggccaagcacgatgtcccactctctgtctgccagtgcgagtactcagtagttcgtcgcttacctgaagtcagtggcttgattcgagaatgcaaaaacgcagtatttgctttcaagggttttcctcgctagccgagggccgtctttctgggaaatattcgaccttcaatgagccgcagcaaaggcggcgttttagcagttatcccatgcgtatgctggaacctactatcaatgttttaaagagtattgctgaagagcggcatgtgtctgttcctgctgtcgcgctaaattattctatcaataagggcgttctcccactggttggtgtgcgcgatgctggtcaagcggagcaggatatgcaggcgcttggatggcggctgacggaagatgagatcaaacagattgaaggagtcagtctacagggtagaaggtcctcctttatgcagcacgggtaggtattgaatatatgacaacattgcaaaaaggacctctgaatttccttggtcttactcttgtcgagggtctcctcccaatggctttcacgatgtctagaccgaagagctttgagctttcagttagaaatagaagagcagagtatgactctaattgcgtccttactaaacccactctacctatagtatatgtcgcaatcagctgccatgcaattgcgcaacttcatgccaagaaccgcgcccttggcaatcgaaggggtttcgactgtttatcagagatttcacctcatttggctgaaccctgcatccgcctatcatgaccatgagatgcctgcatgtcatctcatatgaccaagccaagctggctaatatttgcccgtaatattgatcccaccaacaataccacgacaaggcacaccatcagcgcactgggatgcttccaagactcttggcgtgactgtcccatcgcaccacccacgaatctaaagatctaggctgagaattcctccccaagcctcttggcatgggtccgaggtgacgggtgcagcaggatgagagggttggcaagcccttggcatcagtcggaagccatacgaaagcgtctctgatctgctacggaggtttctggtcgactttgttactttctttatcttctgtctcttgcaaacagcgtggttctcaccacatgaagttttaaagatctcaaccgcctgacaccttcctcgtctaatcggtaccatcatggtactcgcccagtatctgaagaaggtcgtggcctggattgctcctcctccacaaaaatccgaagatggacgtgatcaatggccctctcgggcggctttcctgttggccgccatgggaggctgcgccggtcagggaaatctgctgcgatacccgtcggtagtctacaataactatgggctgcaatggtttatcccctacctattagctgtgttcgccattgccattccggcccttattctcgagattgcgattggacaagcctatcgtggcgggacgatgatcgcgttcaataatatcaaccatcgactgaaaggcgttggcatgggcccgattttggtcagttttgtcgtcgtgcaatactttacggtcaatttggcgtggatcatgaactatttccgcaactccttccggagcccattgccatgggagggcagaatcgaggaattttatatgggcgatgtcgtcgccaatgtcgatccagccgtgggtaatctcactgctggcaatggtgccgttgcccactataccgtgtaccccggcattgccctcatcggtgagacggtcggctggagcgcatttatttggtttctcatatggatctccatcttccgtggagtgggcctgacgggtcgcgtggtctactggacgatgggtctgccgattgtcaccaccattattatcgtcggtcgctcgtgttcactggaaaatgcgggcgagggtatccgactcttatgggcgacatggagaagcgatcaactagcctcgggcactgtctggcaaaccgccgtcggacaggtcttcttttccaccggcattggtttcggctatttcacttcatatgcctcctataattccaaacactccaatgctgtcatggacgcatttctcatctgcggaagtaacatcctattcgaaaactttgctgcctttgccgtgtttggtgtcatcggctacctccgacgttggccacaagatggcgagagattgggtgcattcgttgtcggcttcctgaccctccccgaggctgttcttcacatgcctggtgcgaattggtgggctatccttctattctttaccctggtggttctcggttttagttcggcctttgtgatgctcgacgcggtggccacgttagccgtggattcgggcatgaaaatgtcgcggccaatgattgtgactagtctcacgataatctcattccttatgagtttgccatactgcacccaatttggattctacctgctggatggaatcgaccgatggattaacaatgtggcattgatctttgttgtctggtcggagcttgtcggtgcaaccacggtttatcgctggcacgacgtggtgagccagacagggctgcctgcttttgttgtgtataatttcggatactttggtggccagattgtcggagtcgccgtcgcacacggtatctcgaatccatcagctggtgctggcgccgggtttgggttgtatatcgtctgttcaattctttccgtcctcgtcgccacgaccccggctatcaaagccgccagtttctgggggcggaaccctcttctcgcccgattttggtatctagcattctactcggtatgtccccactgctaacaaatccagcaccaacggaaactaatatttgtagggtaatcaattgagacgcgacctgaacggtgtcgttggcggtaatggaaactggaacattcctcgtttctggcccattctactccggtacgtcagcgcgcctattctggccattgtgttcagcttcgcgtatcctgaattctataccttgcgatacgacccgatgatgatcgccgggtttattttggcgcacttctgtttgctcttaactctgctcggtgtggtatttccgcgatactacgatgtctttatcccaccgcaccggagggccgagggcaccgaaatcatgaccgccaatcagcctaaggaacacgactttgtgccagatgtcggggtgtttgactttgaatccggcatgccagagtcgatttcgggccggaagagttctgataagttagatagtgtacattcgactctgccgaagctataggctgtatatatcttgttcttgtcgttaaggtgaagatgagctggttatgatatgggtttttgctatttcaagtccttctccagcaaataccacgagcctcactagtacctagacggtcattagaaatgttagcctgcttgaaatcaaaaaaactcccaatgtcgaacattaaggtaccggaggccgtcaaaacaaaacaggcggggccgataagatccccaccccccgcgcttccacctgaaacgtcaagacatccaaagcatctctcttctccctttcgacacacactctctactttcgaaaatatggaccgatcaaacaaaccctcagcaattggagtgggagcttcccttccgcagcccaccttgtccatcaaggacaacatcattgaagcttcgctgcccactggtcagtcagtgacggtgcacctgtatggcgctactgtgacctcgtggaagacgggcggccaggagcagctgttcatcagtgagaaggctcatctggatggctccaagcctatccgaggtggcattccgctggtgttcccggtatgtgaacgctacaatttctcgatttgagctacagctaaccgccctgcttattctccaggtcttcggtcccccgccccagaaccacgctacctcatctctaccacaacatggcttcgctcgcaactctaactgggagttcttgggcaaatcctcttcggaagcgcccggaagggatagcgaccaaactgatctcactgtgaagttggatttcggcctgtcgcactcgatgctgaccgatgagttccgcgcggcatggccatatgagttcggtctagtgtacagtgttacactcaccacggactcactagagacggcactgcaggttcgcaacgagggccagcagaactttgagttccaggtgctgatgcacacgtatctgaacattgcggtatgataaatactccaggaccccctcgcccctctcattcccttgctaatggaattttacaaataggatatctccgacatccgtgtcaagggactcgaatccaagacctacatcgataagactctccaagcgacttctcacactgaatcgtcccccgcattggcaatcacccaagaaaccgatcgcatttaccaacaactggatccttccgctccaattgtggttgcatctgcgaaggatgaccaacctttgttctcgatcactcgggaagctttgactgatgttgtggtctggaacccatggattgagaaggccaaaggtatggccgatttcggcccagatgaggcttacaagaacatgatctgtgtggaggctggctcggtgtctggttggcagacacttgaagctggagaggcctgggaaggagggcaaagcattaagtcgcgactgtgaagatgagaggatattttgtctcccactattgatctctatgcatgatagttatgacctgaagacgcctattcccaatttcaaattgaagatccgctaatcgtgcggccatatttgatctctagcctcgccttgcttgactatagacagcacttttatacacaaatcccatccaaatttagttcaagatatagatacacatgctttgacgagattacatgtcatcaacacgcaacaacagtcccaattcgccccattttaattatttcagaatccatttctcgtccatcatggagcatttccatgctcaataccaacaggcgaaacacccacaagatcaataaaagatcggcggccctgcttgccctcttggaaagcagccaaccgctcagcagcctcaaagctatactgagggccattgtattggcgtctaccacggaacacccaccaggaggcagtgagggccatcaagccgacaacgatcacactggtatagttcatattttcaaccgtggccggcaacacgagggggaaacagaagaaaataacagtaaccaaaatatacatcaaagaaacaatgttaaccgccatcccaagtttctgtcccatataaaatggcccggggaccatatttccacgaccagacaaaacatgcggaaagatggccccaaagtaggacagcgagctcagcacaataaacgacgagatcagcgcttggaatgccgtcgtgctgccgatatatatacaccccagacaagtgacgagagcgctcatggcgactgtggcacgcacggggcagttcagtgtcgggtgcacttgggcgaaatagttcgaaaagggtgtcgcgttatcgcgtgcaagactccaccacatccgaccgcctgtcacgaatgtcccgatcagcgttgggaaggttgcgagaaacagtactgcaatcagaccgatggcacctgcgttagaccctgtcgcttgtcggtagatctcggcggttgggaaaaagccaatgttgcttgcaaagacagcgtctagatcttggatagagtaaaagagggcgatcaggtacacaaaggatgtgacgaaggctgtgagcatctgcaacattatgccttgaggaaccttgatctcgggtttggggactaaaacatgttagttggtgatttcctttccttttctcctgagtctgacgtaccctcttctgataaatggctaatgcagtctgggactccaaccgcaaatgcagcattcaacagaccagtcataaaacacaccccgtctgaccagccacccgtgttgttgtggtactcagtccacacttgggtattgctggcatgatctttcggcatcaccgtgagaaccacgatagttgtaacgaggccacacatcgacaagataagggaaaggcggttaatgacaggaatgaaacgatttcccaggcatacaatggcacagcacgcccaattgacaatctggaatacaataaatacttgccaggatttccacttcacattcgggtatttgagcagatacatggccacgccctcattccccaacatggaactcatcgatgatgctgacagcagccacgcgcaagcattcaggtacccagtaaagaaccccgctgtgcggccccgattccggctcaaaactgatgaccagtagtatactccaccggcagagggcatggaggaggcgagttcggccaaggaagctgagatggtcgtgtaaaaaatgctgactagaatcagtccgtatagaacagccattggaccgccattctggagcgcagcgacgattgtaccccctgttgaagcccaagaacttggtcctgttagtctgtcgaggttctatcagtgcaatttccggttctcaagggccttactttgcaatgacaatacccaagctggtcaaactccacatcccaaagttccgcggcagctcttgtttgtgtccaagtgcagattcaagccgtacttcatccattgcggcatggcctttcgggggcttttcagtgtccctagaggattgccatgagaacaccgccattttgtcgtaagtcgtgcgatgttagagcgaatatttaacaaagggattgaggcattgcagcaactaggtcgaggaaagggaaaaaggaggtgcatcaccccacttggtttgacagagcatacagggcgcacaggaacaatcaggtatgtcgcaacaggaaaccaagatgtgacgccaatgccctcatggctgccacatgtattacacgaggtccaagcttcaggcgagtagggttagtctctccgaaggaatgcatgtgttttctttgagaccctatatgaaatatggagctagagacgttattggcaatagtatcactatttttgttggaaaaggacccatactatacgtatctacggagtgcactacccaaatgtattacgatcttgcttttgattggacgagtacgaattgtttctcttgtgacctgcccgaatcggagctgagttgatacatcgcagactaagtaagggggattcgcggcgaatgcggagtttggggcgtcgatccgatgggcttggccacatacaatgtacggactactccgtagcttgaggcgaatttcatccagttggggtaaccctccaatattgtgtttcccaaattttagtaggtctgtcaaatatattctgcattccagcgttcttaggggtttgctgcgcgacattcaattagtctgcgccatgcacaagatcgcgatgtccgtgatagatcgaccacatggcctcgcatgattgatgatttgcattatgtataaatatatgaatacatagttatagagtgcagagctttctatgttgtatagggcttcgctgcttggatgaatagtacaaatcctcgtttcttcttttctaggagaatatatatattttcgactacgtgttgacttaagtcttctctatcggtatcatctgaatctaaaagagcctctaaatgacggaatcatccatttgagtagctcatttatagtgtccttgctaatacaataataaatcattatcccaccaactacggacagcccttttcagtagtttcacgcggatgatcaatactggacatgaccggcttcaacttcatcaacaatatacatactacggtgttgtagcaacgtaacagggctcgctggtagatcttttagcggttatgaatggtcttccggcgcgacctcttcattagcgacagacttcgcttcaatcggtgcttcgtttgccatgctagctagcggacatgaaaacataatgagtcaccaaattaagaagcgctcaattaccaaccgaaggatagaagttaaatagagctatggcattcaaaatcggccacatagtgacgcagtttttaaccgtggccctgaggttgtggacgttcttggccttggttaatgagatggccgtatcggaaaatccctggaaaccgagtaatcaaggacattccggtatagccaatgccataagagctagacatatagttatgtttgaaatatgcaaaatttctcacaccgacacgcttccaatcgaccgaactggactcactccgtacggagtatacttttgcactatgaatcactatttctgtaggatgggaacacagccgttctacggatcatattcaatcccttcctgctctaccagctctggactttcgttcatacggctagatttgccgagtttttcgagcagtagcaaccagtagcgcttgtatttattcgttattctagaacttccccgagtgctggaaaatactaaagataccgcagtccggaatacaaccgtacagagcatggtaagcatattcgtacttagaacaggacagatgtacaattgagcaaaggtgcaagttcccatgcactagttagcggcttttcagcttccaaaaccaaacctgcaaatcttaagatcatgaaaattgatcgggaaatagggttccatagggatgaaatgaaggaggttgaacattcatatcagacatgatcttcggtccacgactggcgtgccatgccagttcttattaaccctttctttagttcgcagatcgcgcaagtctattttatggagaatctttgtgtttaggaactattgaatctcgcttggatcgccatgcagatcagcgttccaaacttcccaataatatcagccgcaccgctcctacgtatccactattgggatatgatctgtcaacaagtttgtttatgtatgctcgaggcatggagatcacaaagctatcagcaacgcgcatagggggaactttacggcttgaaatattgaatggcgaccaaggatatgtcgttacaccaatctcgcttaacgcatcccattagagatattcgcgcacaactgcgtcgttctgcacaacactggacatttacagtgtcacgagctgaaccagcctcttcggtcggtggcaggaaggacccaggacacaaatgaggaatgtgaagcataaatcttcttctcccatatctattccatacttcgtgcctactttgtacattccaaagccgactgtcattggccagattggtgcttggagacaagtaaccccttgcgtttacgccccattcttccttgcttgtcagctagcactgacatctcatgggtcaggacgcatgacgccacagccctcggttggtagctttaattccatcttcgggacctaaggttagccactttcaccgactagatgaaatgatcgctctctcggcacagtagtttgctccgaatacataatttgacaatttacccaggctcccggtaaacaagtgatggcgccaattcaaacttgtcgctgatgcttctcatcagaacgcttcgataaattgccatttctcatatatggtagactcgttctatcgcgtcctgacaacttgagaactggttcagggagaaggtcgctctatccctcaagatgggtaacgagtcgcccactccaaaccagcttttcacagaagccatagtcttctggtctatagggcttgttatttatgtcgggagagtgtaggtttgagacgcaagtccggaattagagcaattgctaactgcagtgaagtgtggctcgcataattgccaatggatcatataaacggttgtttggtaagactgctaatatcggtttgtttcgaattctgctaataagtaactccagtggacgactatgtgatggcagcaacatttgtaagtgttatcatcgccgattatgatggtcacttctttcgacttacccgacggctcctcaaaaggcaatatataccacactgctagtactgattcaaatatcggcccgctacgcaacgaacctcatggaccctaaagactacgacatggtgctagcagacccaaagcaagtcagcgatcggatttatggaagcaagattgtcattgggctggagcaatgcatgttgatctcaacctggggcgtcaagacatgcatgttgatgctctattggcgaatcacgcagaatctgaaatcgaacctctatatcaagatccttgccgtctacgttgccgtcggatttgtcgtcataatggtcacatattatgcagtttactgccggccgttctcacaatactgggccatgccggtggataacatgcagtgtgcgacataccagtactactcgataacccaagccgtcttcaatatttcctctgatgccgtcatgttcgccattccgattcccctccttatcaaagctcaactcaaacggcgcagaaaggtcgtcctcatcggcgtcatgagtctgggcctgttcactatcattgctgccattctaaacaaatatttcaattttgcctctcctctcaccacaacgtaccaaatctggtacatccgtgaatctagcacggcaatatatgtcgctaacctcatgtgctggtggccactcctgcgcaagttgtttggtgtcaaggcattccagtacaacagcaaccgagcccagaaacatgggaagcccgacaaccagaacaatgatagtagcggctcctactccaacaactcacactctcatccttcatccaatttctctcgctcatggaagttaccttttcatcgaggaaataaaaacacaacgcccggcaagtacagcggtgccaagggcccgagtaccgaacccatcaacaggtccaatgccgagtttataaacgatatgcatcgtgtcgaagctgtccccctcgagaactggacgacaaagcatactcgaactgacacctcgataacccaagactcacgcaactcgctcgagaaacaatgtgatgttgaattgtaccagaagcagcatgcacgctcgctttgttaacatcataattttcctgcctgttcgaaattgttgttgattgtttgtacgttttagcgcaaggccttggtaatttatatttgagccgaacaactatttcctgctcatactctctacgaaagtaaaaatacatagaattcaccccggatcgacagctcaaccatggtttgcgctgatctttcagagagaattgggtgaagatgaattaagtgagtttcagtgggccgcgtttatggcctttgtaattgctcaataggatcagtagtctctttattagtctcttcagaagtcttctcggtagtctttcaagagtcttgtgtaggtagactgtagaagaaaggaggagagtactggatttctgtaaaggactatcgttgtaataaagctccgatggtctagtggttacgacgttgctttcccatgctcctaatgagcgatatctggaatcaagcaacagcccgggttcgaatcccggtcggtgcatttattttataaatttttttctaatattcaacccttgctagaacttgagttaggatgaaactttggaagacgagataaaataggattgaatttttgatagaatcatggaaggagggatactgttctaggcggtaggcaccccaaagagaatgtacaacatagtccaatttcttagatcaaaacccggggatggatggacaaaataattatgtcagcgtttatctgaacccggggcttatcggtgacgtcgtgttgtcaacagtgaacagctcaagtcgacatcaactctaactcgcaacgtccgttgaacaaagcaaatatgtctgatcaaattccctccgcaactgctgacccagaaaccgtcgaaactgcccttccttcaaacgccgaagatcgcaaggccgccgccgctctctcctccctcaacacaaatgagatcgcaacggagggtgcctccgccggagctccgcttagcgcaaaccaagaagctctgggaagggccatgagtcggctagaaatagctgctggacagggctcaggcaacaagaagacggctgagggaccgaagactgatggactgaaaaagaagacagttaaggttgctccagctgatgttacactgctagtatgtttaccatgtctatggcctcagtgctcgtctttgtgcagccttattgatgtatctaggctgagcagctcgatctaaataagaccaaagccacggagttgctcaaggctcatgatggggatgccaccgaggcaatgaaggcattcattgccccatctgttcaggcgtgttgattcaaattatttactgcttttgacacaatttaatgggttgagtcggaatgaatcaggtaggaacgaaacttcgtttcaacatatcaagagtcgctctttatgctaggggtctggttgtcacaaaggcatgtagacaatggttatcaacaggttgaagaaaatcactcctcgtcctcctctatctcatctttcttgtgttcgattcccttgccctcgtaaatactccacagcatagcccaaccaagcaaagactcaacagctagtgcccaccagacagctccaatcatgttattctcgaggcccaggcccagcccccaaccacccaggaaaggacccatggtccgacctgcactagcaatactctgtgccactccatggactgtgcctaggatagacggatccgtgacacagttgtttactaggatgatagcagcgggcaggataaatgtccgcgagatgacctgtaagctaatgacaaacgtgaaagagggccaaataatccatggtatgcgtggaagaaccacaaggaagggcatcagcacgtatgcaatgggcgaaaagggaaggaacgttcggaatgatgtcagtgtgcccagctttgtctgtatcatcgggtataggaagatctggagtggcaggccgatgaaaccaatgatagcagtagcaagcccaactcgggatgatggaagacctagtccaccgccgaaatggaaaagaccttgccgggagttctctggggcacggggtgcgggcaaaaatacaaatgtcatagagttgaaggcactggtgtggaaggcgagcaggaagtgagccactaaagtcagcacaatgttgcgtgtccagatctggcagaaccctattttcttatgcggccgtggatgcacgcgagagcgggctgggcttgatggcgtagaccaagcaccgaggctgccgtccgtgtaaacggagtcatcgtcgctggagcgtgtaagaggacgatagtgccggggtcgccgggcccaagctcttgtaagccgcttgcccattttacgaccccagtcttttctataacgtgcaatttcatgggtctggacggtttcattgttagcgactatatcagtacggatagggattgacctcacctcatcgagcccaagaaatactgcgagaaatgacgtgaatatgaagactgcgctcaaaagatttggcaatgcatagggccaatgctgcatccaccagacaccgtctttacctccgatggtagaacccgggccgaaaaattggggaaagctgttgataggatcggccaaagtgcctcccaagattggacctatgattacaccaatgttgaagcacatgggtaggagcaaaaacgcgcgggattgatatctaaacggttagctcaagataggatggcacattgtgtgaacatatcaacttacttcttctcggcgatgatctctgcaatcagcgtccgcatcactcccacattgctgttcaataccccacctagtgtccgaaagaccatggccgtcgcgaaagatcgagagaagccaaagcctatacaagacagacaggtgcccatcaatccgatcaacagcactctcttccgtcccatccattcagcatcggcaagacggccccaccagacagcggtgataaattgcgcagctgtaaagcaaccctggagcatacccgcctgggcggagatcttcgagtctggcaaagatggatcaaatgatttgagctgataaaacagatatgcctgcagagaggtctgcgttaacggctctgacagtcgcgccaaggtcaagattgccaactggccctttttcggtagcgagctccaagtcactggtttctcttcgtcttcctcgaccggcccgagcacgccgtcatgatcattatcttcatcaattgaggaaaatcgccgacgacttgttatcagcggcgcggactccaatctcctcggctgggggtttccgaaaattgcggtgtcatcgctctcaagatcggagtcgctttctgtatccgacaagtctacatgatgaccagtcaagtcgaaaccgtcctgggagacaggatggacatattctgggccctcgtggcggtcttggccatggttctggatttgcggagaagtccccatcaacggagatcccggttcgggaagctgtcacgcgagcgcgcctggggtagataccgatcgggtgtatgacacactgttgtgcagaattctaccttggcactttatctccgtacgtaaagcagtctgtaactcttgtagaaaagaaaagtcggggtgaaaaaggagctatgacacaatttcaccccacatttgcgtggggtcaatgcgatgaagaggttgccgagttaaccgcctggccaacaatggactcgagatatgagaccgtaaatactccgggcatgagtttcttaccgccagtctgtcaattcagattttgcatgtagtattcatagtttgtaacatgaatgagtgaactggggtattgaaccttcaagattggaactagcacgaactagtctagattcctcgagtagacaaattcgagcacgatttcaatcagcctatattcggtctatcacgcagccttgaataccacctattatttttccctaatttaggtagattactggcgggacccgaaccacccagatagtcgttgcgtctttcgtcctcgaccaactgtaaagcatgtaagcgtgacctttgagatggccactgactgatagaagatcaaactactagctgtcgcacctgcttggccgattttgttcgtatatatcagcgctgatggtgtgtctgatcaaggtcgccatagagggactcatggctatagatcgagagattcgcgcatctacctcgcgcaaggctttgatcagaaactccttgaaaacccgggaaacaagaataagaatagtatctatagtggcggggtggatagaagcaagccttgccgagatagaggaagtgagtggtgaattcatacgaaggaaataatacaccccaacttttgctagttagggtcagtagcaaatagacaaatgaaataaacaagggcctttgtgtgctttgatcactttgacttgagatctgattagtcgtggttcagacaatcaagcctttgtcgtgtccccgactttccaagtggctccatgaaaggcattcataacctacattgttaactctcgaaatcttcgatcaagtcggtttcgattgtactttcactccactcaccaccgcgtcgagttatcccctcggtgcagctctcatctaatcgtcaatcggctatggtcgcatccttacttcactgtctctttcgatttgttgtgttatttttagagtatcacttcactaacgactatatagcctagcacaggtctactaacagactttcacgatgtccccaaactcctctttctccggcgtgtccatctgggaacaggcctatcacgacgcatggcgacacttccaagcctccataatggaggtcgttgactggctaagctggcaagatccgtcttccgaagatcgccaaaccacaatcgagaagctaggccgacttccaattgaggtggacaatatccgaagcacgggacaggccatgtttgagcatgtcccaggctgccagacagtgcgaaacgagtctcttacgcacttcgtcgatgaattcatacgggactgtcatgggctccatttcaagctgaatatgctcgtgtggagacttatgaatcgcccgaatagtgacaggacagtttacaatcgtcttctcaggctacttgattacatcgaggatcgggttccagagtgacccatcaattgcggtttgtctgcttgcattactctatatcggtgttgattttgaagattttaacctgaattatcatgaacagtccgcaaagagaaatgccgtacgcttttatgatgttatttggtggacttgttgactggcctggttctatattcccgtggactgtatcactatctgtactgattggatatgctaacagttgagcttataaacagtccgaaaaccgaaaaccaaacaagcgatttaccatacctttttacgagtgaaaattaaaattggataaagacagcgagagacaccggcagtgttttcgattcttttctttttgtaacatatcaagtcagaggtcaatcttcttgttcgcgatagtgccttataataatcgattagcagcatgatcagttggtcagtctatatcatgtagtacttacgtgggctataatttatctacatttaagaagaccattgaaatgacaaaactgcatatgcggcctaatattcttgcttatatataatgaaaaggttattatatacacggattatgcacaagaagtcaaagtttattataaacagccaggcaggcaaatgaataattatgcaatgctctacagggcaagagccagagccaaaacaccagccataccagcaactcccatggcaatgcccccagtaggagcaggggcgccaccagtagactgcgaagaagagggagaagatgatgaagagctggagtcggagctggaggcggagctggggctggagatgatgctggagctcgagtcagagctggagtcagagctggagctcgagatggaggtggagcccgaggcagtggtggaagccgaagtggtcacggcggcattggaggtctggcgggaaggagtggtggagccagtctcgatggcgctgctatcagcagtctcggtctgagtaccggttgccgatgcagttgccgagacaccagcgagctggtcgtcaaagttggaagtggcccaggccttgacgctgctaggcaacgcgttgtaccaagctgggtaggtgccagcggcagcttcactgatgatcacgctgcgggaggcagggtcaatgatttcgtcgtaccatgaggccgggatggctgttgccagaacactcatgattgagctgggcacatccgagatatcgtaggtctcatcgctgtcggcagtctcagtgcctgaggatgtagcagtaggatccgcaggggcggccagggccgtggcggcgaggaaaagagtggtaaggaccttgtactgcattttcaaacgagtgtgggagtataggaacaatatttgttgaatagaagagaaagaaaaaacaagctgacggagggcttaataaatatcttcggagccaggcgaaaccagggccctcatctattagggccgcgctagtactcaactagccaaacctaaccaacgacgctaaccgaaaatggccacaaaaggcttagtcgcgagacttggccaatcacagtgcgcaggggccttgtggtcgcctgattagacccgatttcgacacgagagttgcctgcgttcttcttcgctattcgccaacgattgggctaatttcccatgtccgccagcatttgccctggattgccccttttattgtttccgtggtccgtcttttctgttccaaatttagcttcagggtcggctttcgctaaatctggggtagtgaaatttctatacaaaactctgtcgccccatatggcatatcactatatacataaccaagttcgagaagagcactcatccacttgatcaaagattccgtcaaactcattcaattctaagtaagtacagaacttcttaaataggacgtgacgccttccatacgattgttcatgctaaggttactacttgatagcttgaggaatgaatgtcactagcctgctacacagtgagagttcaatttgaattgtagttggtcaatagcattcccctgtttttgactgaagctgtactgaactccagtagcaacctctatatcgtcacacagaacgatgtgggatagttaaatactatgccttgaatatcaggcattaaggtgagtcatccgagtccgggaataagcgtatcacgtacacaccactgtttagctttcttttgttgctcgtccttgatatattttcgctcatcggtcctttattactatttctaagaagtttccaatactctactgcctattccaactccttacccattgcatttgcttgttactgctggtcaaaccgaagaaatttgacccccccacctttcgggattgccttcaccatggccgaatggagccctagttgtaagagcaaaaatctgtaactctgtttcacatttgatccaatatcactgactatatttagcctggacacaaaagcccatcaagcaagatgtcatctacgaggatgctcaagggttgcaagactcattgcagaaactacagaagcttcctccacttgtgaccacacaagaagtatgtctttccttcagactggatcttagctattatattgacctggtttgaagatcatcaatctcaagaagaacctacgaaatgtcgctttgggcaaagcattcgttctacagggtggtatgtcgcacaagaaaagcatatcccccaaacaagcactaagcattctgtctaggtgactgtgccgagctcttcgactattgcagccaagaaatgatcgaagccaaagtgaagctcttgttgcaaatgagtttggttctcatctggggtatgtcagacccccacaaaaagcaaagaaacatgacaactaatccaccaataggcgccaataagcccgtcatccgtattgcccggattgcaggccagtttgcaaagtatgtttttcattcattaattcatgaccacaaaattaataacaaaactaggccacgctcaagtccaacagaggtcatcaacggagtggaaatgccctctttccgcggcgacaatatcaatggcttcgcagcagaccctgtatcccgccaaccggatccatcgcgtctagtctcagcctacttccactccgcggcgactctgaattatctccgcgcctccctgtcctcaggcctggcagacctgcactccccactagactggggcctgggccatgtaatcacgccctcaatcaaagagcaatacgccaaaaccgtacgcgcagtaaaggatgccctgcgcttcatgcacacggtaggaattgataaagaccgcggcttcgagacagccgacattttcaccagccacgaaggcctctccctagaatacgagcagagtctaacccggctcctccgccacccagcgcgcccaggaagcaccaccacggctcccgaaaccggctattacgcaacatccggccacttcctctggatcggcgaccggacccgccaactcggcggtgcgcatatcgagttcttccgtggtatcgctaaccccgtcggaatcaagatcgggcccagcatggcggcagatgagctggtgcagctgctggatgtcgtgaacccggatcgcgaagtcgggaaggtgactctgatctcgcgatacggcgctgggaaaatcgccactttcctccctggtcatattgccgctgtgcaggcctccggtcatatccctgtctggcagtgtgaccctatgcatggcaatacgcagagcacaccgtctggtgtgaagacccgccacttcacggatatcttgtctgagttgaagcaggcgttggaaatccaccgcgctgcagggtcgttccttggtggtatgcatctagaacttaccggagaggctgttaccgagtgtgtgggtggtgctggtgggctgacggaggatggacttggcgagcggtatacgacattctgtgatccacgcttgaacgagaagcaagctttggagctggctttcttggttgctggattctatcgtgaagagtctgaggagtaatatcatctatttggattgacacgagatatctgaatgttgaagcgggacagcgaaaatatttcgggcattatcatcgagtttctgaatcaaaagtcatgtatgttttgcaagttggcctcttttcggatatgagtaaaaagtctggatgtaaatcatctgggattgaattgatttaactgagattcgaagaaagtagcaacaattgtccttgcacaaaacagtccaacctatccggctcgccgcccatggggcaaaatgcaagaaacgcccaaacaaagagtccccgtatttacagtgactgggtatggatctaataaagcgaataatgtaatgaataaaatcaaggaacgagaggactaccgacggcaggcttgtaaacaaggctcttgcgcctggcagcctctatgcggaagcggcgctgtctcctagattcctcatcttgtccatcatcgagcaaggtactcgcaggcttagcactcgggaatagtcctcgattgctctgctttggcgggcaagattgctggataagcttggagcggttcccaaggaatcctggtgtagcgggcgacatgccaatggcatcaaggttggcaaagttgtatcccggagtagcagggaattggtatttatcagaagaagattgtcgttggggtgtggacggcatctcctgttggtgggtcggaggtgtgatcttgcggaaaccctcaacggcaccgggattgacaccactgcgacgtccgccggcagatggcgcgggagattcagagatgcgcacgagtgttccgttcacattgcttagtgcacgaggctccatactcttgcggcgcttagcgcctccgcgcgggatgatagagctgtcaaccgcgtacggagtttcatcaagccattggttttcccgttcacagctagaaataacaattagaaaagccatgtaaagaaagtgtacaaaagataaacttactcgaggacccagccgactccaacacacttgacaagacccgctgccttcttgactttctcgagagttcgcaggccaccatccttgtatacaacatgcgtgatgccaactctcaagtccttgggctctacaccatcacttggcgagagactggaacgagggttccaagaccaggacttcacacaccgagcacccatttgctgcaaaagttccacaaaaataccagaggcatcctcaccctcggtggtatgaacatccacatgcacgactgctccatgcagagccatctgctcggtgctcatactacgacgtggcttcttggcaggactggcggttgcgacaggattactgagcggagccatcactggtgcttttacactgctgcgtctatttgtgacagaacggcgctttggtgtcggacttctgctcacccgtggaggtttccgagaaggagacagaataggtacactatcgttgagtgccatgaagattggcttgcgaacacgcggagaagaccgagtgggagatgggctcgcgggggacagacctctcttgcggcgcagcttgagaggggatatgtcaccttcagccttcaaaggcacttttgagacagtatgaatggtgcgtaattcgtcgggctggacgtgagccttcattggggttgaaggaagaatcagaggaccacagttctctttgtcatcgagtagatggaagtcttgatcctgatcttgcgggacttgagtgacgcaagtatgctccagttcaatatttcccgagtcaggatcctcgaatatatccgtgcgtgtgcttggagaatctcttatttgatggtcttcataaatggaagatggccgtggagtctgttcataatcggggcttatacaagtagtaccgctttgaggttgagatggtaattcggcaaacaaagagggcgggttttccaaagggctctttgacaaatcaggatacggaacagtaccagaattcgccggagtttccttgttggtgcgatccaaggggcctactaatgaaaagactccacggcgacgcggtcggagtgatctagcttgggaaggcgtattttgttcccagcgaccaaatttttgtgccagtggtgtaaagcctatgctagcctcagcaggggattgatgctgacctgcaacgcttggtgtgttgaagagactgggtgccattaaagcaggactgtcaacctgggtgtttggtttccagctattttcttcatgcaggggcgtgtcaattatgacgttattggcattcttggcatcgagggtggagccatggtcattctctgagttgtctgggcgatttacggacaatggagtagattcgccgaccgcgaaacttggttttgacaaaggagtcgcttgcgtcctttcaagtggggttgtaataccctcaacatggctgctctcatatggtgaggcaggctttgacgatattgtagaaaacgcaggcgcggctaggatagactcagtatcttccacttcgctttcctcgctcgtcacttgttcctcgtcctcgggttggtgagtggcctcttcttgccactcacgctcactctctaagggatgatctaagtcaactgtccgctggacttcatcgccactggtcaaatgcaatggtgattttgagggcgaagcgagttcattcggcccctcttccattagctcttgcatctccgtagttcgcaaaggttctggagtcgattcttggcaccggaatcctgtatcaaaagttcggagttcttcctcctcaatctccttctccaatactgccagctcctcagaataactcgtgtcctccatgactgagtcaacctgatcttcttcgtggtataggtcattctccgcgcggtgggcttcttccatggcgtcaaagcaaattgtgtcaagctcctcgtattcaaattcgctctcgtcagggacatcttcaccctcctctaggtctgaggcttcctggagttgttggtcatggatatcacgcgctgccagttgggcctcttccatggcgtcaaagcagattgtatcggcttcttcgcggtcgaattgggcctggtcttcaggttgttcactagctccgggccctgcgtcttcctgaggctctggatcatagtggtcctcggttggcatgttggcctcttccatggcgtcaaagcaaactgtgtcaagctcctcatattcaaaatcgttctcatcttggagctcttcatcttcttcggaatccgaggcttcctgaacttgttggtcatggatatcatgcgctgccaattgggcctcttccatgtcgtcaaagcagattgtatcggcttcctcgcggtcaaactgagtgtggtcttgaagttgttcgctaacggaacctgaatcttcctgctgattttgatcatagtggtcctcagttggcatattggcctcttctatcgcgtcgaagcaaattgtttcaggctcttcatcctccggctgagccttatcttgaagatattcactttcgtcttcttccagttctgactctccctcggcctccgcctccaccgccgcagggagagggtcggtgtttccatcattggatgagtctggagctacttccgaggcagcaatatctttctggatgggagaaattgatgatccctttccatcagaagatagctcaattccaaagatgtctcgagccacatcttcgaccatttcagtgtccttttcaaaggctgcctcgtctggctggcttgtccgtggcgaggatttgggggtggtgaattgtgggcgttcaaccgtcttaaggggggttccgtcattgtccaccacggatgtatgagtggaaaatatcgagtttttgaatggcgaaggtattctttttgcggggctctgaaacaagggagttcgagcaagggctactggtgtggaagccttgaaagccgattgcgagaaattagcacccaaacccttcttaggtgacatcttcagtggagaaacacgtccgggtgtaaagtcgggtgcggcaattggattcacactgtcccggaagagggaacctccacgattcggggtgtctttcatggagaattggaagggagatgatggcgctggtcgtcttgcggggctagacatgatcatagaatcgctgaaaacaaccgaatttccagatggaagagcgaggtgaccattatctgcgactgcgttctggctgcggttcggtgcaaagttgattttcctgactggggagctaagaccgatgccgtctgatccgtgttttggggttggtagtttcggttcgccattctcgtccatgaagctggacgccttcttgggtgtaaaattgatcctccgtacaggagagctcagtccagtagtctctaaaccacgcttaacaggcgagtgaacaacaagtctgaccaagcccttggtatcgtccttaatggtgttcaattcatcttcttctccgtcggagcttgcataggctgatagagacttggctacctgcttggcctttttgggagataatggttgggccgtatccttcttcgctgcagctggtttccttccgcgagtgccggttgccacaggcttgctaacaggggtggctccaaggccggtcttgccaacgcccgcactcttggtagctacccgtcgacggccgacagcagaaacctcgggcgcagattcctctgcttcggagcccgagacatcctggaatttcactgtcttcttcttggcgggcccacgtagaagatttgagcgtatagttgtcgagttagttgcaatcctaatttggttcgatttcgtctcattcgctgtatcgactgccgcacgtgtccgtctgctcgtggccgtagtttcactggcctgagaggtcttcactattgttcccgctcttggtcgtccccttgttttcggcgctgcctcagccttagtcgtagcagcttcttcgggcaacggattctttctcggtcttcccacacgcttttttggtgcctcggtttctcctatctcatctttgcgggtgttgttctggggttttgactggtcggtgagtgactccgaggaagccttccttcctcgcgcagtcacagttccagtcgcttttggtttggtagctggtcggccaggaggacgtccactaggtcttgcgggtttacttgtgataagccccagctcgtcatcggactcatcatcggtcgggggcgcagcccgtggtgctggaattgctcttcggggagctttcttctttgcatcggcagcagctgtcgatttggttgaagttcgtaccgcccgttttgcaggggatcgtgggattattgcagcgcgcgccatattgatcacgcgttgtcgttggtggtcgcagttagtattggcacgcgacactcatggcgggtttgggcggtcaaatatgatatcggcccgatgtcgcaaggtcgcagattaccgggagttgtcgaattaggtgcatgagaaagcaaggcaaagcaaataacccactgtggaggtggcggctgatcgtgggttgcttgttgtggcgtttcccatagcaacattggcacgtgatatgatctgcaaagaaaacatgcttgtcgacaaggatcttacattttgattcaaggacagattgaattatgaataaaaattatcaaaaagtagcagggtaaaagttgctctgatcatcatctaaaataatcaagaagttcaatccgccataaattgtatgccatcagatatatatttctactagatacctgtataattagtgtagttcagaaaggatctcctactactcctctcaatgtgcgtttattggccttatgctggtctaaagcaccgtgttgcacctgatagcagagctataaccatgtgcaaatgtgtacaagactccattgattaatgatctgaactaggtagggactatcagtaagcccaagttcgaatcaaagagtaaggctaggtttatttgcgaacggagagaagaaataaatgctaaacggaagtgtaaacatgttgattatatgggaatatatgcattgctatcgaattggatccgaagagattcgaagatgtctaggcaaataccaggcagatggaaatgacacgaagaacggctcgatggcacatccaccatgcttggaaaaaagaagtgtgtcaaatggcgaaaatccatgtcgaagctattcgcattcgaaacatgcagtgggaagaagaagaaaaaaaaaaaagttctgttacacaagagtaagcattgccagggcggatacgacaaccgcagacagcatggtaggcaaattcatcgtacccatgctagaagcagttaggtaataagttggatcataattgttcggtgtggtggagttcacagtaccgttccagcagtaccggtcgaaacactggttgcagatatcagggagagtggtacccgtgcgctcgaacgagcggctgaggatagcacagccaacacaagatgtccagtttccgtcgagggtgctgttggccatagtggcaacctcgtagccattgaggatgatattgtcacgctcagtgttgtcggtgcttagttggaaggttgagatgttggactggtaggagtaaggggcattggggatgtacacgacaagaggcgagggtccggtctggttggaactattacagccaaagaaggacgggcgggtgctgaggcccaggttgacgaaggtgttctggtctggaacagcagggaaggcggtgccgttgccgataccgctgctgttcaggctgcgctcgtaggttgcaaccaaggaagtgccgtttggccagtagtagtcagtgtcggctgaagagtcaacggcaaagatgacatcaacatggcgctcgggctggataagaggatgcaaagggacgttctgtccatcttcgccgccatcgacgacatccagaattttttgcgcggcgtacggcgacgagtccgggttgtatttatagaaggggttgggatcgtatgaagcgatatcattttgcgctttgtctaccccgtacaagactgaggtgaaaacgtccttcactaggctggggagcgaagtggtgttgatctggagaaggaactggttaaagagtgtggaggagcttccaatcacaaaaccagcactgtcgaagccacggatgcagctctcgttgctcggaagcgagccaccctcaaacttagagcctaggtactcgaggggaatgaaaccaaagattgtagggtcaaaagtgccaaattcccacgggttgaactcatagacggtcgagttactgccaacgagcagttcaccgggattacggccatccgcaacaacgaacggcatggggtagtctccgtccttgaactcggaggtgtcggcaatggaagaccaggtatagctgagtccaccattgctagcattgaacatttgataggagagtgcgcggcccctgtaaccaatttagcaaatacgcacatgcatcccgataaataggaataacataccagatatcggtgatagaagtatcgaatccagccttcttcttcccctcgacagcctcgcccagttccttgtagtaactggcagaatccaaaagctggataccaccagtatcaggaccttcgaggatcgagtttccaaactgccagatggaaccatcctcgtgcgtctgcagcttgtcgatcgtagtgaagttattgatatagatcgaacccaacaaccagctgcctccactcagaccagcgatataggtagcagactgcagcagaccacctaaatgcccagtagtcgtcgcattggacgtccggctgtcaaaagccttgatcgcaccggcaccgttcatcaacgcacgccaaccgccgcctgaaacagcgatgccgatattaggcagatttgacgagttgctagagtgtttgtcgaggtaggcaccgacatcataatcgccgactttcacatggtcgaagaaatctttcatcgctgacagagacttactgcggcggaccttgagccatgatgtctcattggaggacaagtccgctgcgctgcgaactgtcggtcggctcgccgggcagctgacagacgtcggcacatacccgtcgggcgcattgggaagagctcgttgcacacctgcgaatgtgctatcatcattgaacccgccgggaacagcaattgcacctgcgaggacatggtgattagagtggagaaattatttggtagacgcgtgtacatgtaagtaagccaagaatggcgggaaaaaaaacctgcgaggggcagcacttactggacaagcccagagcaattgagattagagcaaaagtcttcatggcggttagatcacaattgtgatcaactgtaactgcgcaagaatcgtagagaaggatgaattcccatgtactaaggggggatacttatgcagcgagggtgaatacttatgcgccgggcctgccggaagcttagccaagccccccgatgtcccaggcagttcacttggatgtactccatatgttcatagggatcacgaatcatcgctgccgagtggagtagagtgatgtcaaatattccgaaaactccgtctttcttcacagactattgaatataggatgaaaaatcagtttgctttcgaggcgcaggtcagatcacagccgccatagaggtaaggctgcccaaatggcgctgggaaggggctgatgccgagagtgtcatgtgataatatcgatgtggccaagtaggcatctgcatttccgcagctttcattggagtaagtttcatgaatggctctagggctaagaatgcctaaaaatggacgcctctcaaatcactccacagttaaaaaggatctggcggaagtccaaggtggatcaaatcgagaggccgtaattggatcgcgtgtattgccttttaaggactgtaatcggatcgtctctactgcctcataggtacagatccaaggttatatactctaggctgttatggcgtggaactgaggctatggatgtcacgaatcgagatcggcactatttgaaaaggagctcagtttgaccttactaccaaatgacattacagagaagcagtcattagaatgaactcaaatttgaaaaaaagctaactaccagctgaatcgattgagatgtgacagaagcgtcacttcactttggaagttcatcatctcaatcgaaccaggcaaacgcaaagtcagcattcacccacgactagggccaaccccaacatggtctcccgggctctcactagcctgcacatgaccctcgggcaagttgttcaactcgtcctcctctttatccaggccccagaactggacgatgaagacggcgccaccgacaaaggtcaagatggcgaagatgccgtagttccaggccaacaaaggggccctggaaagcggtatcaaagtctcagctatggctgcggagacagcgttagtgaacatattcatagcttggacgagggaacgcatattgcgaggtgccttggagtaggcatactccattgaggtgatgacggcaaagatctccgatacagcaaccaggacgtaggatccagtctgagcccaaacaaggatatgacatgggtggacgctgccatcgtcgttggggcaggtgttagctccgaagccacagggcgaagtcaggtagatgtaggactgaacgatagcagcccatatcatggagagcgacgccaaccagaaaccgagggcaatcttcttaatggccgtgaattgaaggcccattttgcgcaagacggggtaaaggagcttgtcgcagatcgggacgaagataatcagcgccaaggggtcaaggttgttcacaatatcgttcgggacgcctttcacggtcatcgtgctagcctgtgcgttgagattgttcgtcagttggttgtaggctagccagtagaatgggaaatagcaaaaaactgcgcaagctgcaaatccacggtgcacttcatccacccatgcatcgtcaaaggtcatccacctgggtcgggattggggttcgatgttggagggcttcgcggtgtcccagaaagtgccatcgtgtgttcgtttccacatgatgtatggattaaagtgccagcggtcgcgcatacaaaataagattgtcatgatggccttgtaagttaccgagcccgccgggggagactggcgatagcgcttgcgaccccaccacatgatgggtggagtagtcaggaacatgagcgtgggaagcagaaaggccaaccagaagccgatatacttctccgcatagaccatgccgatctgaccgaccagtgcgcctatgttgataagcaggtagaagtagtgatagatacggctctgagtgatagtcgggtcgacgacaacacgctcaccagacttcagtgtacgcaccttgagattgacggcaggtatctgctcgacaaccagagcggatatgttgggcttgaagccaccagtacctaagcccatgattattacacctagaatgaacacagcgaaggaggcatcagtattcataatcaccggtggaatggcagagatcaccaaaatgatgtgacctaaaatggcagccacaatagaccaggagatggtcttgtatcgtccccagtactcgtcggcgatccaggcacccactagaggaaggcagtagcaccagagggtgttgaaggtgttgatagcgttggcagtctcaacacccttacccaaagcaccggagaaatcctgagagctagggccaccagccccggttgcgtggtttgatccgggagggccattcggggcaggaagggggagagcatggttcacgaagttagagtctgtgtttcaatgttagaagagtatatttatagggatgtggctatcttacagagaacatgggttccgtggtaggaaaaacgctcgcacagctcaacaaatgcgatggtgtagacagcccagggaatcggagctgagacgcgacgcaaggcattggggccatgaagttcatctctggttggatcctcgtcacccacgtcaaggttgtacgactcggggatgatactcttatcagcgacctcattgcaaactgggttactttgcagggtggtattggcaggctcaacatcacggataacgagcgagctcgagtcccggcctgtggcctgagctgccatcttggatagaataaagattcgaggctagtgcaaggtatgcaggatgaacaataggagagatgggaggatgtgagtggatgagaggaggaagaaaaaggaggggaatgaaaagagagaagaagtaaacaaagtaaacaggcgaggtgaaattcacgtgttgggactgaagtcgattctctcgcgtaggttacccgtagtaaagccataacttcaacagcagtcatgtcctttcttaccctgccaagacaggacctaggctggggctatacgactcaacatcaagtgaatcaatataccaaagcagcaattgaagactgatagatgtagcatgcatatgccaaactatgtaacctgtgctatgatgttagagttttcgttccttctctatagctatagtgagaaacataacatatatgatatagacgatattacctcgtgaggttacaatggcgcaaacattctattcaacaaaggattcttttgaggtcaaattaaccccgatatagtcacaaagtatcatgatcaagttctttgcaggtagaggagcctgcagatagcaacaggattaataaggtattttatatttcagcaaagaaactacgaagaacagaccttgaatgctaatccaagatgtgccattggcttacgtcacagagtgtcctcatcctcatattctcaggcctgccttgacctacagtgtgtagtcttgtgtagtcttgtgtagtcttgatgcgggttgaatagtataagtctacatattattcatccataaagccatgtcttccgctacccgagtacttggccaagcaagcaatctagtttgagactgcttacctatctgggctgggatgtcatcattagacaaacccaaagcataaacttccagcaacctatccgcattctgccatgcccctagaagactatcccaagtgattgcttgttgtaagtacataataggctaagggtaattaaggtattccaccagtaagccaacacacagtcaagcacccggctcgacgtctgattggacccagttctccgcatcttccccaggttcggtgtcagtcccgaactggttcttggcggctaaaaagaaaagacatcagaatgacgattacgaggccacgtacctatcacgcgataatttgtgtctgcaggttaccagatttagcaaagtcattcttttataacatatgtatccccaacatttgatctcttttagattaacccttaagttcgttgagcagcgttgttgggaggtctggtgatctctggtggtctaggtatgtggtacattccgactggatggctggacgcggttatttgtgggaaagtatcagggttcgagttcttagtggcggtcgtacgtaaatacaaggctacgcatgacagtgaatatatgtcattgcacaaccatgagattcgattattgatctaactcgagtaggtaaagattgacatgcagctaaaccttagaacgaggatgaactgttcaaacaattataactgttattatttgggcgatcgacttgtgtctaaagtcatcataggattcaaatctccaaagcggattaaggctatccaagaaaaggcaatgatcaaagccaaattaccaaaaatgaaagcccatgcgcgctatttccgccaatgacccgaaagaaaaagacgcaggacgccatgcaatgagacaaaaagaaaatagtcacgcgcagtgattgaaaaggcaaaattgaatctcggccataaaatctaccatgcggcgtggccaccatccattcgcaggtcacttccagtcatgaagctgctagcatcgctaatcaagaagacagcggcaccacggtactcttccggtcgggaaagacgggcaagcatgttctccttgggccactggtcgcgacgttcgggaaactcgagaaagagcttctcaaccatggcggtgacaatgtagccaggggagatggtattcacgcggatgttgtaggtgccccattcagaagcgaggttgcgggcgagttggaggacagctgctttgctagcgttatatgcggggcaaataagaccctgtagggagaatatgttagatcatcgaggccagccagaagagcggaacgtgacatgaagcggggaaatgttccatagagagaaagaaaggaggggagtgggaacgtacgcgattggcaatagtgccgctcatagaggcgatcatagcgatactacctccgtttccaaagcgaatcatttgcttagccacagcctgggcggtcatgaacacccccgtgacattgacctcgaacatggtgttgctgtccttggctgagtattcgagcgctggggtctcctgctgaatgcccgctgctgcaatgagaccatccatgcggccctcttcattggcgatggtctcgatgacactgttgagaagttctgtgtcacgcacgtcgatacgacggtagtgcaactcggtgccaagctccattgcgcgctgttggatctgctcaaactcgggggcctggtgattgagtggttgttagtttagtgctgccatagaagcgagggatgtagatacttaccggctcttccagacggtcgagtgcgtataccttcgctccggcctccaggagtgcctctgtctgggtcaatcctagaccacgggcagcacctgagaccaacaccaccttcccagcgagactgaactcgggcattctggacttctggcccagcaggacgggctgggcggtaatgggtgcagtgggaactgtagtggtttcgatggagacagacattgcgatgcgatattaggtgagggtagttggaaagtatattaatgaaggcgtcaaagattattagactgattgtttcgcgtgcagatgaagaataatgaggatgttccagtggacagaatcaactccctttaaatacatatctttttgaccggaaaggccagaaaaaaccggactaaagcgactccaggtgtctcgtgaacagaaagaaactaaaggatatcccaaaaaggaaatccagatttggaccaagggtactgcagagcggattgagtccagacttcctggaatgcaggctaaacggctgtggggaggcatgcacagcctacaaataggattaagacatataataattatctacaacatatggagtacatagtacttggatactgcgtcaattgatgtctcaagcaaataaatttgactctcttgtgttctgcgtcatacttacgttccaattttatcgaggggataactacgtgtaattcaggaatagctcatctcacaggccggaaaaccagtcaccaggcatgctaaaactcacgatagttggtttctcgacgatagtgtggcagttcggaaccttaggccggatttctcgtttaggaaacccgtctggggaacccggggatccccaacgccactctgatcttcgactctcaacattctttttcttgatgtttttgcaaaagaaatcaatccagatgacctcccccttgacagagctacacgtacgtacatcatagacaaattgccgagcctcgagccgggtcttctagaaatcatccactccaagtatgtactatccggagtcaggtggctctttgcagatcgacgagagcccctgccaatcaaattagtacatatggcctgtgatatcggttcctgtccgatcgccccggctccaaggtgacggcccggacgaaaagaaattcattggtcaattcctatattaacgtccaaatatcttttttctaaaatgtagaattcgaaatatcagatctcggatttagactaggatgccttagtcatcagtgaaagtcgatgtccaagtcgaatagctatttccggatttcgaggaagtacagatctacaacaaaattcggactcgaacatcgaaatccgagtccagactttgtgctgctactcagaccatagcttatcttgccataaaccctgcactaatatccattatcaatcagccaaggacagcacacaccttgtgaccatcagaatcttcattcccagctccttactcaatggggagattccgaggtttccactttttcttctgctctcgtgatgtctatataccagctagatttagcctctaccatatcggtgtgcactctgcatacttccaaggttcggccgcgtgtccgattatggcttgtttgtacggatccaggggccgtttgtttgtcggaatctggtctgggtcttcttcccccctgtcgtgcacttcccgggcccgccccgagtggctcggaggtctcgcatcccacatgaagtgtgcgtggggtatgatatgcacgggtcaatgctgtcggtgaaaaagtggttagctgagaagggaaaaatatctcatcagttcggggttcctccgttgccgccggaccctatctttttgtcttgcgcgactttgaataatgagccttgacatggccaaggtattttgtacctacctacttcctatgaacgtagtattataaaatgatctgtgtagcattgtgttgcacttactgcattcctcttttcccctcttcgttcatttttatattcttactctagacggccgtctttcaaaatcggtgtaacaggatttcttacgaaaaagttgctaccgcaggacttgttgagcccagctgatcaggtacatacacatgaaagaatgggatttaggtactgagatgtatggtgcgcagttagattaacaacatttggaccttggaaacacggaatcgagaataaagcttagccttagcattccaggatcaatgaagtcaaataccgccaaggctcctccggacaatgccatgcgaacattgcaaccgagggaaacccagtggatcaagcggggcctgtcgatccgtaggttaagttcaggttaaggataagcatctgcatcccgtgcaagggtagatcgcgatgatcataatcaagtggggaaagcaatttaggacatcagatctagtcgtaccaataaccggtctagtcttatattcccaaggctacagcaccgttccaaggaagctaaaatgaagtcgaatggattggattatacatattaggggaaatacctggtcaatcttaacaaaatgcagatgtcaccccaaaataccgaaggatccctcggtgctatgtgcatttttttgttctctttcggcttccgtacaagtacaacccaggtttgagtaacatcaagggatacaaaagaagatgaaaaacatgaaagtgtaatcccatcctatgcagattcacatgagaagaatgaaataaagggctgtctagccatagtaggagaaatatcttcaagaaaatgagggagctcaagcatacacgcattcatacgtgagaaaacaactccatgtgaacgccggttccaagacaaatatgggagatatcatgagatgcaaaagggacgcagaaccagaagaaaaagggaagaaatgcaatgcgaatggaccataacaatcaacaaaatccggttgatttttgctttttgatttgcttttggtgttttcgcggagctaggcttcacggtaaccccaaatacgtttttgttcactcacccaccacttgccaacctgctcagcatcattgagccaatcagcggactcttggccaaacttaggcttaacctctttgatgagggccgcgagagtccacgccttggaggggtggttttcaccggggtcttcgctgaggtgagtgaatgtgtactcgaagccatccttcaagggcaggattagacggtagggaacgtcggctgccatgatggacagcatagagccaccagcgttgatcaggcccatgttccaaacggagcgcttgggtgggctctctgggtgggagcgggcttcgacctgggtgtctactcgctcgtgctctgggtgctcatgtggtggaggatggtgatggtcacggcggttgggtggttcctccatggaagagaggaaaggacggatgagggactggccttgatactctgggaggagggcagaggcgatgccggagtcgcgctcgtctagggaattagactggacgagaagatccaggatggtagggacaatggaaagggcggttacgttggcagtgatgtccactcgaggcatgtgcgggtggtggaaaaccaagggtacgcggaagttgctaatgtggccattctcatacgtgccggtcatgtccttattatcttcgccgaaggcttggccatggtctccgacgacgacgactaaagtctcgttggcaatgccagtctggtcaagcatagtcattatatcgccgagccataagtcgacgaaccgggcggaattcaggtagttgttcatcaggtcatggttgatgcttccctggtcgctcatgtatggttctttctcgaagtcgtctggcgtactccaggggtggtgggttgtgctggtgacatgtgaaaggaacatgcgggtcttgttgtttgcggcctcctcgaagaggtctaacacgtagggtcggagctcagtctccgcaaatccgaagtagttaatctcttcgccctgagctttgtgtttcgagtgaggggaaagcagattgctcttaacgaccttgtgcttgaagcccatgttgttgttcaggatgtcctgacggtcatagtcatcggtgattgactgcatgaatacagacttccaagggtttttgagagccgcggatttggtttcagaagaagagttttgcaagcgcttctcgggttgcgacttgccctggttgaacagatcgaaaatctgtggcaagcatggctgataaatttcgagcagagactcctctagaaggtccactggcaaagggttcacaccacaatggcttcccaaaacactcttgaaggtcaaggagctacccgtcacggcgccacgcacattaagtccacccataccttcttgtggcggggtcttccatggagaatggctcatgtcgaccttgtttcccttgctatcggttgcgtactcgccagtcaactgttgagcgaccaaggtcatgttgactagacgatcgattgcctcgttgactttctgcttcttatgagacgcaagaagaccatcgaacaagggtgtgccctgttgtgtggggaaaagttccttgcggccactttcgagcgttaacagcactatatggttgacctcaactgagtgctctttgaaggccttctgcagcggctcataaatttcaccgcccagatttgtgaccatcagcgggtcagtcttggggtcgtagaatgcactctcatcaccggtgcaaacaaaagaataatgattgtccttcactgcacgctcgctcgggctaagatcccagcggctgaatccttggggtgggttctcggggagccatggggctcgtgaccattgttccacaaaggtcgagtccggttggaactgaggacgagagaccccattatcagccgtgagagggaatggcatggcaggctcgcgacatccctccaccgttgccgtcttcttctggaaagcatcgagcagtgtcaggggcagagctccggatagatggtcatacggtatagcgggccgagttagttccaagaaaataagcgatacacagattgcgactgcgggaataatgcgacggaatgaccggaggtctatcgaggtcatgcaggatttgctaggggcggaaatcaatgtataacgcgctttgaatcctcgtatggacaggtctcggattgcctgcaagccaagaccggtgatgttgtacaaatgcgaatgaagcaaccacgcaatgagtccgaggacggtggccgcagcggatacagtcgagataccgctgaggagaattttcatggccgccggatcgctcaggaagctaccaccagctgcccaggcgacctcggcaccggtctgcataaagaatccgaactggatggaggaagcaccccatgtgatcaagctattattcgtgttagcttgtattgcgcaaattcccccctgtcctccatttcggtattcggtattcggggtaaacatacgatagtgcccctcccaacccagtcgagagccattgccatcgaccatctggcgcatggaagcgtaacaagacccgcacgaatataataacaaacacatctggtagaatgagtgtgggcgaatagaggacgaagtagaggaacggtaaggagcgaatatgtagcgcaatatgtaaagccttggaggcgagaccgctcacaacgagtgtggagaaaaggaagggcgacaacggtggtaagagggcgaagatggacatgttggaatcatttcatttgtacagtggaatcgcgcagttggcaacgtagggggagaagaagagtcgaagaatgtcgaaacggcaaacgagagactaggcagcaagaaagagagaacagaggagtggtcccgggaggaaagggaagggaaagggtccaagggttattcttagatatcacgaaataacagaataaggccaattaggcgatgggaaattgtgcacgcgactagactaagcggctccaaatttactccaaatgcttggtttcgcttctttttatttttattctgtgtttttttttcattacgtcgccgaaaccactcttcccatccggtcaacctctcatattgtccctaagttgcccaagtggagaccggagaggctgtacagattattatgtcccagtctgtccaagtttatgcagccactaggtggaccctgcatcgcactattcctaaatgattcgctttcgtgagaccgaaaataaatgatacagtacagtacagtaagataccaatttcatcgaaccatggaccaccacagcccgaggtcatgccaatcttggcaggttccaaggttcggacgttacttcccaaggttctgcgaaaagggggaacattcaaggctgtctgcctgggcacttgtgcataaaatccggggaaaaactcaagatttgcgccgatttccggtttccccccacctactgtatgtacattgcccccttttagattattattattaatgatcatcccgtgtctctgagattcaattgtggatagtccgcggatagaacaatcgaactttgtctcggaatacatctaccctgtacattgatgtgtatttatatgtacggagatgtgcacgtatttggccatgatccaggggtatggtcggagactgtgcacggacctttgtctaaatatgcttggcggtcggccttacagcggacgacctgtatatttaatatgacgactcggatattgatcttgacatgtgtgatcttctcattcggcttgctgaagccaagtacaacatacatactccatacatcgtattaactctagtgtcgacacctggtcccacgatcttacaaagtaaatataacgcaaagccagtaagacctggtggagtactccgtagagacatttaaaagctaaatgtgaaacatatttacctactgtacagaaccaaaaccgtgctagtctacaaagtacatactcttgaaagctgagatttgaactgaacacatttccgtggttttatatcatttatgcatatttctcattcttcatgatcatcacgtgcaacggcaaccacagtacataatatcttcctaagtcaattacaccactttctgctgatccttcatggcagcacgctccctaacacaatcagcaatacccctcccaacgtccgaccccaactcttcaaacccttgcacaaccccctcccgatccccttcgcccatctcctgactcatcttaaacttcccctgcaatcgctcaacacgaatctcaatgccaagaatattcttcttcaaaagctccacataattaaccggcgcatcggatacattccatgcgctcttcttatcacccccagtataccccataatgccctcttcagactgccgcgacaggtcctgaatctgtttttgcaaaaacgcacccgtttcttctgccttggaattgcagtacacactaatcttgccatacgcctgcacggcggagtagttccacgtcgggacgaccttgccagagactggcttggttgctgtgtagaacttgggcgtcacgtagtggtggtgggggccgttgaataggatcagcacctcatccgtgagctcgaatttgttattccctgctgcgttttgctcagcgagggcttccatcaaggcttttgcttgtgggttctgtttggccatgtggccgcgcaggatgccggtcggggctgtgtcatcgccctcggtcgagggaggtacatcgaggacgaaggggacatggcttgattggatgaatgagtagatcggggatttgatggccgttgttatgatgccgagtgggttatcacggatgaattgctggaggacggcgagttgtccctcggcgtggacggcgcgaagatacattgtagctatgacttggagaggactgagagggaagtgtattcaatcgatttgaagtaagtataaaagagaaaggaacactcgtataagtatgagggggtttatcactatctatcatagcatagggcgcgatttagatcgcatcccactcaatctagggctgtcatcttgtctctctgttgtatgattggtagtcggcgccgaattatcgacccgaggtccacttttctatgataaagctacaactttaaggttctagttagttagttttctgtgttttgtcagcttggtgactcggggttgtcgaaaactggagaccaactgctcgtcatagtaacaaagtgtcaagatcggtagtgccaagagctctatctagagccaaagccaccccgcattctgggcctgagagctgcgtattctcacgattttatacagccgtcctgcgatatgtcagccagtttgaacttgtccgagcttgttagtatgcaccgcctggtggcggacgctggctggaagtcacattcttttaaaatatccccgatgtatcattgcgaagattcgcgcggtttcgattggcaacagcggctgatggccaactctattccccaaacggactaacagcagtgcctgagataccttccccgagggatcaccttcccgtcgaagttgaagagcctcacaccttaagaatgctgacctggccaatggtaaaaggttacggcctgaccttaccgtaccttggacctgtggtcaagttcgaatttcaatcaatggctaccctggcattccattcttcgcttaaactggcgtccaatgtagcggtttcggcagctgattgatttgaagtcaattataatcgtgctcaaacactctgaggatcatcctgacaatcgtggaaaccccctttctcattaatcctgagggttcatcaaccatttttaaattatcgagctttgcgtcttttgagccgaaaactgaaacccctagagaagattttcataacgggtttaactaaagaatttgatattatcatgagtagggatgagtgatatacagagtatgcaggaagaatgacgccaacaaatgatcccaatgcaccaaagacaccgatcgatattttggagccaaaatcgctaaaacaaagagctcgcctgggtaggggacaaatatcatgtgatacgcgagacaaccccatccttccctaaccgatccaagacccccttcttcaacccgaggaaccgttcaatatctccacggcgcttaccctgcttatcccgcatcgtcaacacctgttggatagtcacggcatccaggaacgatctccccggatgacccgcatgaccgaagtgctcagcttctttatccgcggcctctgtgaggcgttgtcgagcagtgacgaccagtagtgccgggttagaagcttgtgggaagacagtttgcattgagcctcgattgaaagtgcttgagtttgagtatgtaggtgatggatcgacggggcctattgaccggagggaggcggcgaaatgggggtctcggccgtccatgtcgatggctaaatggtcgttagtttgtttccttgctggtcttgcattcacatgtagaagacttgaataaatcgctggcgagtgtacgtaccatcagacttcacgtcggatgctttctcctttgagtggtattttgggccctgggaggaaggtgcaggtgtttgaggaggcgagggaccagcgttgggtttgggcgcggaagtaggcgtaggtgcagacgctgctttggtttcttttggagctttgcgcggtcctcttggcgggggagccggctgcttggggtattggcgccgtgaggctgcgccagccgctgatttggcgggctttgaagcagcagaacccattgagaatgatgggctgtggatcgaaaatgttggtgtaaggcgttgcagctttttgcggagctttgagtggaggttcccgatgtcgccttggcattacggcctggacttcgggtcggtattttgccagcagaacagtcaagcaagacttctcacaaacccgagtatgtaagtcatacaagttggtatttaggaacatgtcaagcagaactaaagacggtagacattctcaaggatattgaacaagctcctgttgagatcaatggcctgatctctgaggcaggattgcataactatataactataccgtcctaggcaggcggtaaagaaagcggtctatctgtcctgacttgtgacgtcaaaaatacagttaacaaacagcttccttgggagtatgagatatgtatctagcgagatcgcctaggtagagcaacacatactcgtccgatatgtctagaaatgccaaaccaaatgttgaagggcgttggcgggcagcacatgttagcgcagctacttatctggagagtccaacccaacccgtattacagacaattgggagatgatcacatttgaagatcggcgagactttcgtgaaattccagtggaagccctgttatgtgttttgcgaaaacatactaggtatcactgcagctaggatacaataccaccggaacctaggaccacacggcagtttggcagcaccgtgagaggacaaacaggaccacggtagataaattcatgtatgttccggaaatctaccggagaccagcaaggcgccggccctgcacttcacctagcgcgcggctgccactaacaaatgcgatcacaccaacaacagccatcgcgggaaggaccttgaacaagttccacgaggtatagtagaggaagaagatcccctcaaatgagatcaatgatccgaggaagacggcatgcgagagaggggcagacttgaatgcggagggtaggtggttgacgttggcgccgaggaagagccactagagacaatctataagcaacggtcttggcgcagaaatgagatggacttaccaagccagcaagagcggggaaagcagcgccgaccatggcgacaaatgccaaggttatgacaattggcgggctagacgcagagtccttgaagatatggtggatctcgggcttcttgccatatcgctcggtttcaacggtcggcacggcctctccggggttacgatcgatcgacaacttgaacacagagctgtcgtaggcatcggagcttccaaacccgccaatgacaacatgcgcatcaactgggccggacagagagaggaattgaattggcaggtctttctgggtctggagggcatgtgttagctgcgccgcggaaagtcttttggggattgcataccaattcgactcttgacttgccattatccttgatgttgaaagggtatgagatatccaatccagtctgagcatctttgagcaaaaggaaagcctggtctgctcgctttggagagctgtcttcctgggctgtcaaggtgacgcgtaaggtatcggcaccgagaagggagacgggcttggagagcggcttggatgcagtaagtctagtttgaacacattgattagtttcatgtaccctctacttgagtcagaatacatacttttccttaaaacctccattgacaccagcaccttttgattgaacggccacggtggcatcagtaaagccccaagctgcggcggcagcgccaggtagtgcagctgcagccaataggcaaaatgggacggtggcctgccacagatgcattgtgaaagaaataacagaaaattaaacagaaactaacagaaaacagctgtagagagctcggggagatggtggaggatagaggagttgcagaataaggcggacaagtgaagccgataagcgccgatcaaccatagccctaatttcttttctgtcgacctcagcatcttccatcactttatttcgccttatctcgcacaaatacaattccaacgtccgcctagtccttacaagcttgtttatgaacaccctagaaaacaactgcggatggtggtacctctgatttcgtgagttctgcgcctatatgtcgggccctaattcccaacttctccctttccgtgcactgcggtcttctgacgtcgaccctgcccttcacctgatgacccccctataatgttatccacgccctagttgcctggtattggaggtatgggctaggcttccacttatactgttcattcactctatttactgcccgttctattcgcatggatagattatactgacaaattgcgggccatttagctttaattcacgatgcctccaaagaagggccagcgtaagtcaatgcctgcgcgcatcaataaggcgcctacattgtcaccttcccggcgctctccccgcgtacctcgcccgtcaaaaagtacaaatgagagcatacaacccgccaaaacgttgaacacatccgccagtcccaaagacagttctagcaacattcttttctacactccgaattcacctgttacaaattcaagttcacgtggaacgagtcccgaaacaccatcctcgcgtcggcgggcgttccagtctcgtccgtcacggctctcaactgtttatactccagccctagaagccccggccaccagctcaagtagtcgacggacaagaagaacagctgcacttgaaacaccccagaaagaagtatcagatattgactttccagagagtaatggtagcgccagctggacatttgaccagtacatgggcagctttgaatccgaaggaacagccgatggtccctccagccctaccagtgcctccgacatgcagaactcatcccgggttcgcaagcccaccatcagggctattgaatcttttgaatcaactaagaagaagcctcgccgcaagaacatgacagtgtccgccccgaccgtcgaaactcctgcccctgcggctaccaaggttgcaaaggttgcgaagaacaatgtttcgaagcagccaatgagaagaacaagaaggtcaaagagaatgaccaacttgaacatgcgaaaaaatgctgtcttgatcggtttcgatgttaacgtgaaggcggctggccagagactatatgacttgactattcagtccttcagccctgactttactccccctttgaatatccctgtattcttggagcaacagcgaagtgaatatttccgtcgccaagatgaagaaaaatatggcgtcgacatgcccgccaaagccacgccgagtgatgtcgatgtcgatgtagatatgatcgaccaagacctcccagcgcctgtgatcgcttcttcttctcccaccccacccaatccccccactcctcctactcctcccactcctcccaccgcagtcatcgacggctcaagcatcctgagctacaagaagcagtctgacaccaaggtcggtagcgatggctggattcaaactggctacgttaattccagtggtgaagaggttgctttgctccccgaaaattgccatccatattacccgtcccatacttacggctacgagggtctcccttttccaccagtgcgcgccagaaccagccagcaggccgatgccgatgccactcacagcttcgcaccgctcctaggagaccgtaacctcccatctgatgcggtggccccattcgtcactgaaaatgtggaggaggaaaaggctagggctctggctcgggcccctgtgccaacccttgcgactaagaagcctcgtacccgaaagcgccgtcaaaccgcggccgccgatgagcctgccgcagcggttcctgctgctactacccccgagaccggcgcacgcaagtcacagcggcgccgccgccagaccgctcctgcccccactctcctgtctcccacctcttcccttaacactgcgaccgaggtccagtcttcgggcccggctgccgccgtcgcccccgctgccattgaaggcgataaacctaaggtgcagcggctccgattgactttgaagccggcgcccaagactgaggcctctggggttcgagcatctgcttccaagaaaggccccgtcacgcagtccctttcctcccccgtcctctcgcattcgcgtgcgccgtcctccgcaccgaccaacaagcgccgccgccgccggggcatgtgaggccccggtgagggcaaaatgatgaggcattctgcccggctgatgtcgggcgatgattatcactcttcgttttcttgttttttcactttcgacctttttgtatgattgattaccagcgggcgttttcaagcatgtatgattagcatcgcggggcataccatggagttaatggtgaattatgagattttttagttgtctttgtccttgccattagtattgcttcatttcgtactctttttgccctcgtggtcctcgtaaaaggtagaatctgacatgtcacacgggtcgactttctgcttacttttgccttacatctgatttactttgtgcgttcattcgcacacaaggcaggagatgtcacctaggcacctccctcatctcttctttcgcttttctcgctctctagttacctccaactttcatcgatcgaccccgggatatggtaaggatgactcattacaccacaccttagttatccaaaacgtacttagactatatagtttcggatgccagaaatgtcgtcgataccatttcgaaaagctcatgttgaccactatgtccgatgactcagattcagactccgccgacatcgagtgcttccgggcactacccgatgacacatgaagccatcgggtcagaggccaacgctatccggaggatcagaaaagagcaggagattcccttcagggtgatcaaatatctgcgtttcacaaatgccccaccagctattgcggaagagttttctttgagctctactcgacacatgttcaatcacgatactcgatctatgattataaaacaaacgaggaacggatcgagtaccctccgaactccactccaaacacacggcgagtgtagacgctttacgtcgacatgtctcgctgcaacagtacgcggatatgacatcagccatggcagaaggctttgatcagagggcgcaaaaccgacatccattgctgcctccgccgctaaatcaccctactacaggaccccatcttgactggagcctatgagaccgcttcacgcggcctgctttttgaagtacaaaatgtggtacgcgatatgagcctagcgcagtcgatccatccggtagggtccaaacgcgtccgatgtgtgtcttcttcaaagcaggccgacgagtggtgggtccttacgcaacctgttccaggtcgcaatgcaaaatggccgaccgttggggtcgaagttggagtctctgagacatatcgaaagttgaaggcagatgcagaatggtgatggtggcttacaaactcgaagggcgatgtgaagcttgtaattatcgtatctatcaatcgacagaaacccaagatcaagaagtcatcgcgttattctcttaggactttcagaataggctttagtctgaattaacatgtagtttataataatcggtggttgaagtacagtcaacttcgtcttccttgtagacaagcagtaagttaaagtaatgcctcaggcgcgaacacctccccgaaattccctcacagaattcacatcctccaatacaccaagcaaaccacgtaagcacgtcccagcaatttctcctatgatcagattcgtctaacaaaagccaagaataatgtcatccctcaaagaccagcaaagataccgatccatggatcccaaaacccggcctccacgtccaattcaacaacccgctgcttcgcggctccctaagggggtggatgatatccggaagacaaaggagtacaagactgctgcacggaggtaagtgccatcatcttctgtcttcgactctgcttccgtgtttttgtttgcttggttggcaaatgatacatggcgacaatgagaaatctaatcgcctttctagatggacaacgactattgtcggactaccaattgtaatatatacatcatggattctttatgagcgacgtgagttctttgatacccagtaaaccttaacattctttttgattgtatatacactaacttatttcctttagtctatcttggcaagagtcctaagagtcgtgaagatcagaaacagaaggattaatcttctttttgttttaaattcttctgggagcaggaattctgtacgattcaaactagaatggcatttgagaggctttacaactgtacataagaagccctaaaacaatctgtcttctctcgtctctatctaaagcagtctcttaagggggaaacaaatccggtttaatgcattcattgtaaaatccaacgcccggagtctcaaaatatatccatggctatggataggcgagaacaacctacccagccgaaataacataaacagaagaaaggtacaacatccaaatgcataattcccaactttggaaattttgccctaaatcctccccacattgccagcctgctggggtgaaaagcaagaagaagagaagtatatataatccaaataaggtatctggaagagatggaagagatcatctaagaaacgaagtaacagaaggataaggtgggggaaagagatcgtatagatgtcacagccctgagctctaggaaccatcaactggcaacgccttggaaaggaatctgttgatcccccgagccagccgacggcggcatagatatcgagttaccgctagcgctggcgggcttcgaagtacgctcacgcatgcgacggccctccatgagaccacgcaagccgcgcttctggaggccgataacactgcttagatcaccggtccagagctcacgttgggggcggcgcagctcggcgtctgcgtcactgtggtgacgagtagagcgggactgcgaccggctttcatcgccactaacccattcggagtcggactggctgaaactagcgctagacgcggatgtcgccgtgcttggattgctaatagaatcctcgcggtcgcggcgggatctgcgttggcgcgaatgcagggagacactggtgtcaatgcggagagatggaatacctcgagcaaagctgctgagagcgcctatgctgctcgctactgatgcggaggcaccgccatgctctgtgtcggacgagcctgatgtgagtgcaccgtgttgggagttgctgtgttcgcccaatgttggcgcagtgccgttgtggccggtgtaggctccatttagagcctcgagtgtacctcctggtccaccattgaatccagtaccccgaccaccgccggcggccatggcagctgcgttgaatacagccgcggcgttgcgcccatcaagaatctgatggagtctttcgacggtggcctctaagagtccgtcaatttggtacggacgggcaagctgtagaagcgagcagagaatttgtggtgtgcaaagcgaggtgcctacggctgggagagctgaggtgtagaggtattgaaccagaacttgaagagtcaaaatggtatgggggagatacagcacacgcggtcgggaggtcggggcgaggctgtgagcagatggaacttcaaggttctcaagtaaagacttcgaaggtatagactgattgacaagagttgttgcatcggagcctatcgaaggggtgatggtgatgctcgagttgcggctcgggtgtgtcagggacggacgaagagatgcgatgtctgcaatacctccgtccgacgattcgcgaagaagttggataaagtacggaccccagcgcctagtcaatatgcgagagttgacggagatacattctccccctatagcctgcaattccatgtcggccatctctggcaaagattgcgcgagcttgcctagctcatcggatgccgcagacaatggccgcccacccgatgtcaactgcactagcttcttttgcaaggatgccggaacagaagaggagctgtaagacttatatcccgaggttggagaagtgcggcaagcattgttgtagaggccaaacgcctctagttcgaccagacagacgtgcgagaagttgattcgtcggtggttgtaatcatcgacaaggcttcgcttccggtgtccaagaatcacaaaggaattacggcgaggccaaagcactccccgattccaactaccctgcccaaacaccgatcctccagcatcaatacgaccccaagtcaatgtcttcaggtcgagagcccacagcgcatattcttgcttcgatgaagtcaggtatgttccactgacaacgaagtggccgttgataataccaccgtttgggaaacgcagtcccggcggggacgcttggctctgcatcggtcgttcgacaaggcgtccgtccggcaggcgcacctgtaactccagcttgacatcaaggaaattgtagttggagtatatcagcatagggcaacctggagattcagtgtcatcctgaatcggctcgtgttgatctcggtctggagctgaggatccaatttcggacacattcattcccactagtggagctacgacactgcgataagcgccgcagctccttcccaaggggctagtgttggtccacttgagactgcgtaggttgaaaacactgatttgttcgatgtagtgattggaactgtcctgtcctccgaccaccaccatctctgcacccccaaagccgtcaatatccacaccaagtgtaccttgatgagaggaggattcggggttattgtgaatggcggatagaggtgcactggcagatgtgaagcaagcgctcgatggcagtatcgtggcacagtgtgcgtagcgcccctgaggagattcatgggcagcaacacgagtccatgcccgcgttggtacatcaaagatgtgaatatctgacataaccacgacttccgattgtgactgcgattgcgattccgccgggttctcagggtcttttggcgtaggcgcaggtgacatgcctccataacaaaccaacttgttgtcccccaaagcacacacactgtggaagtatcgcggcggtggaacatctccagcgggctcaactttcgtccaatgtcgtcgaatcaagtccaactcataaaggttggaggtgagttggggacggctgcgtgagaggatccggcctccgaagacgtatagcttatcccccagtatggtcgtagtggcaccgacgagcggacggggttccttgccggtcgttcgccgcacgttgcacaccagaccagagaggttgataggaccagaagaaggatgctggttcagggacggagaggcccccggcgcagaatcctctcgtcctgtatcccccatgtaccccaaactcgactgacttcgcgacatcatggtgggcgggtttcctgtccgcttttcaacggagacaatcgtgtgggtagccgttgaccccctgtttcagttctcccaatatcgctcgcatgcgatgaggcgtttttctctcgaatgcgtctttctgggacaatgttcccggcgctgattgtaggtgtggtacggctcgaaatggtcgttgtggggagtcgaaaaagggggtggttccccgcgacgccgcaactttggctccaggctggcttcagaacgaggaaattgatgaataaaaactaggcagacagactaacgccgatcgtatcttagatgagcgcacagtcctggccgaagtgtcagccgtcgaggttggagatcggcacaaaaaatgtttaccgcttttgtgtctccccataactacccataactatagcaatccccccaaggaatgctcttaattcatgcatttactagggaataaatattttgtctgaatgaattttaattactttatgctttgtgatactttcccataggtccctttcgacaccgtttatcatgatcttgataccttttatcctcctgactccgggcatacgaagagagaacagaggtgaaggggaacaagaggtgacgaacttgcgaattcagacttgaacaccaaaaaggaagctgcacctgctcggaggaaaaggctggacgaagaagatgtactaactactactacattcacgccatgttgtgtaaaagcgctgatgtgcgcctctttgtatattggctttgtccttccaagtttaccctctcccctttctcataagtctatccattgccctcgcaattcaaccagatttgatggaatattgagaaacagttgagtactagttatagtgggttatagtgctccgaggcactcagaaacatcaatatcaacaataaagcccgatggaagtaaacctctggcgaacatgaggaatcgagggacgaatctattctcgcccaaggcttcgggcctcgaattgatttgatcgatctagaagacatagatgaaaacacagatgaagacttgggtgatgcttgtcaggtcatccgacactattccaggtatgatgatatcaaccagtttgtttcgaactgggcggcaggtggcttgataaacgttaatatctgtgattgaggaatgacaaggatgatcatatttatagcaaccactaagaaatgtccctggagaatatcgaaactataaaccaggcattgcatgctgttcaagcctgtgaactcttcacccagtcacttcattcgctccttgtcttactctgtgactgctagtggaaagtccatgtactctacggagtaccaaatatcacatgcccagccttaaataccatttacatattcaattaagcgagcatatgtcgttgtttgtctcatttgtgaatagtggcataaaccgaccgccctcaggatacctataagaaggtggccctgcccccagaacttcttcttcttttctttcttcttcagctctctttgcctctggcttagatcaagtgtnnnnnnnnnnnnnnnnnnnnnnnnnnnnnnnnnnnnnnnnnnnnnnnnnnnnnnnnnnnnnnnnnnnnnnnnnnnnnnnnnnnnnnnnnnnnnnnnnnnnnnnnnnnnnnnnnnnnnnnnnnnnnnnnnnnnnnnnnnnnnnnnnnnnnnnnnnnnnnnnnnnnnnnnnnnncatgattattctaatatttggacttcgcgacttggtctctgtgcttgcgcatgcctcgttgcactgtgtcattgggcttacactacccccgatcgacgcgaactccttttcatcaactgttcggcttgtccgggcgcttggagaagatgggatgtttagaatttacaacaacaatcattgttattgtagtggggatgacaccttctaccttctcttctagtagtcatcccatcgtgtgctcctctctagcaccctactactcccagagccgactttgctctcaccctgcttcgcaggcaggactgccggtacacctgccgcctcccttgcagggcccctcttcaatatctaataatccgttggatgcgactgaatctcaattaatttgatccaattaagcctttgacttacaaattgcttcaagcaaatatttacaaaatgcccaaacgtgtcactgagcactgccatatactacgctccatgatatagtactatccaaagaagtgaaagatagatctaggactactaggatagacagtctggaaatattgcaatacattgaaagagaaactatctgagaacctacgacttaaaaatctgagggcagggaaatgccacgtaatctctcagcaaattcttacaaaagcgcataattcaaaaggacggcgtaagtaggtttcattaatattgggaaactatgtcccaagatgaacccgcctcatatttctagcatcatatcataagacttcgtttactccttgagagtagtgaagcgaaggtaactataaggtattagtatcctcttttcggactgggagttggacaaggaaactcacggcttcacttcacggatctcgccgaacttcttcttggcatcctcggtgctaactgtaggtggcacaataacgtcatcgccagcctttgatcgagttagtaagatacttcgcaatagttccaggacctgggggacggggatcataccagccagttgatcggggtggtgacacctctcttatcagcggtctggagagagtcgacaacccggagaacctctgctgtgttacggccagtggaggcggggtaggccatgatcaggcggatcttcttggcggggtcgatgatgaacacggagcggatggtgaaggcaattcccttgctgtcgacgttggtcaagtcctgctcgtcaatcatctggtagaggaaggcgattttgcggtcggcatcggcgatgatagggaatttgagttgagtcgaggcgacttcgttgatgtccttgatccactcctcgtgggaatcaagcgcgttggcactctagagacagctgcgttagctaatgcttaagggttgtcaaccttggagcctcaccaatccaatcaacttgacaccacgctgggtgaactcgggctcgagcttggagaaggcgccgagctcagtggtgcagctattgattgtcagtacatgcttcacagaggtcaagagggctgggaactactgacactggtgtgaaatccgcagggtgagagaagagaatagtccacttgtcaccaatgaactcgtggaagtcgatctcgccctgggtggtgagagccttgaagttgggggcagtagagcccagacggaggctaacagacgatcagtattgtatgcatcttgaatatagaggtaggagcttacataggagcttcagccattgtgaatagatagatcggtcaaattgagttgtagatgaaagggagagaggaaagtaagatcgagttggcgagatacgaggttaataacatcccctccgggtttcccatagatacatggattgaccccaccttaacctcatctggctggttcctgtcccaccgcggcttcgttctggatggcgtgatcattgttccgcccggcagaacggccatgattggcgcatgcacggcagcacacagcgtgggctgtttagcgtgcgtgatgcaatatcaactgtggatgagcatttcgggttccttgggtttctttttacccctcaaccttacctaaccttatgttagaactacattacctacaatatacatacaacacactacatgcacggagtagctctactttgcaggtagggggcctgccaatatatcactactaccacgttattgtcttgctataccctttccttctagccattggcgcctaaatggaaaatggcaattttgactttcctataatcatcctatgggtggctcttattaggtacatatctacattggccattgtcataaccagagaagctcgatatagctgaacctgccagttttctggctgcgttgtaaccaactcgatcttatttcaagcaatcaaggaataggaatgaatcaatatgtgcaggctacctagcatggaacaattcctatctaatgtttctacatgaaaaacaacaaccttggaagtctgtactattgattgtgtaggccctaaactacattttaggaaccttgatagctagttatgtaccctctttcaagcttattcggccgacatgattttggtcaggaccaatagaaacccgaagtgatggcgcaatatcacctttacatgatgaatggtaccctgtcatcgaaaactcactatgaagtaaaatataccttgtacgtcaggacaagggaggcctaacacatgcaaatctgtatatcttctccacgccgattttaatccgacattctagacaattctgattcaataagtatttgacccacatacatatgtagtggggctaatcgaggcacatattataacatacatcatctgaaaatacgttcgtcttttgctgcctccaagtctaatattaccttcacactataacatcaccttgaagctatgatacagtacatttttccaaagtttgttttcattagaaaagagttggcttaaggtggcggaccaaacaatatatgtattcagctagtacgatcatctatatgaatagacttatagtgagcttaatggacactacatatatacaggttgaatctacacaataaatcttgatatctttatccacttctgtctcagtatgatcttagatgtttgattgacggcataaaataaatatagatttaaacttccggttgccattagagatactttcagagaggataagtattcggcgcgagttgcttactctagagtaggtagaatatatatcttcttcaaagcatttggaatagttctcaatatcaacatgtactgaccaaatctaaagtacactagtaatgcctcaaatgtcgatcagtcgcggtaactagcaattgaagggattctgagataatagtgatcgatgccttgataaccatcgaggttgtttacaaggagagctgtgtacttctaacggtttgtagtgccgatcatgatcgacccatcacgtgcgaccccagacccacatccgcgtcaagctcagtgccaaacattccaggaagctcctgcttaaactggatttgatagctttttcaacagttcgcgggatccttaccccattgattgtacagttctatttagttatactgcatttattgcacttactacgcttcctgcgtatattcgctgccttgcactgtcacttaatcagtgcaaaacaatcgaacagtcatgccacccaaacgcaagtctgaacgcgccgtgagcgcaaatgagtctgtttcaacgccttccaaacggcttcgaaataatgtagatgcaactccaacttctgcagctccagcttctgcagaatcggcttcggtggtaagcacattatgcaggggctgatcgtcgcgtcccatggcttctccactccaacggttgacatagcgctgacatgtgtggaataggttgatgttacaccccagactggagaaaagagaggccgtgggcgtccacgtaaaaatcccgagagctcggctcccaagcctatttctgatgcccctaaacgtggccgtggtcgtccacggaagattgtttctgagccagaacctgaggctgtagccccaacgggccccaagagaggccgtgggcgtccccgcaaggactcaggtatatatatacgatatgtggtgggtgatatatgctgacctgggactgtgttatcaggcgatgcgacacccatcacaccgaagatcaagaagaaggatggtcgtggaagaccccgcaagaaccctgtgccaaatgaagaagccgaaatcaccgagtctaaggtcgcgcctgcggccaatgtcattcctgaaactggccgctctttctggctgatgaaggccgagcctgaatctcgcctagaaaagggcaaggacgtgaagttttctattgatgacctggctgctgcagaagcacccgagccttgggatggtacgtcgaacctgtctcgaattctgcatccaggcgatcgctaacagttgaacaggtgtgcgcaaccatgttggtaggttttcctgtctaaagtcacggtagctttgaccacaagaatgatactcacagtcgaatagccaaaagtctcatgcgcaatatgaagaagggagactttgccttcttctaccactcgaactgcaaagtccctggagttgtgggagtgatggagattgtccaggagtattccactgatggtttgttgccctcgaaattacactgcttgatcatattgctgatcaacaacccatgacagagtccgctttcgatcccaagcacccatactacgacccgaagtccaagcgagaagacccaaagtgggtcgtcgtccacgttgaatatcgccgcaaacttgggaagcaagtcaccctccaggatctgaagtctcatggccagaccggaatgccgctcgagaatcttcaaatgattaagcaatcccggcttagtgtgtcttctgtgactccagcacaatggaaatacatactggagctggcaggcgaggaaccacaagaggagttcatcaggaaggagtgaaggaggaataggcatgagaaagcaagccgctacatgcaagcgatgcacagagagttttatctcgtataactctcccaagtattttctatcgacggcgttgtcggttgaacatgggttatctgcacaagcgaattgaagcgtattttatttgactcgatgtgtcctttataaatatgtgcaagggatagactcaccggaggagtccgcttctcttggatctattcgcaacagcagcaaggtcattgccatacaggctgatcgcattgctttgcagcttgaccattccccgatggccgacatcccagcagcccgatttggcacttgcgggatggtgtcatatcgctcttgtcactgatcgccctcacacatgtgtgccccaaattatccagtcgtccggaacaagctgggtcagaattgtctcaaacctttggaaacacccgtcggaccctggttaatgcatgcgtggtgacggatctagaaggcggtatcgggtatgtctataaaagtcaatattttccgccaccatatccgcactcagtcgatcaatatccttggcatccggcgcccagttcggagtcatggaacacggcctgagcatcccggagctatgacgctatgtatgtgcaggtctgcagctgtggggtactttaaacgttcgtgacaaaagaatagattggacctcccgaggtcgggctagtcatactttgtaagcagaaggggttggcccggggtctcatgaagaaacgaggggaatactcgccgaatgcgggctgccagccaatcagagagcgagattattgcaaatctaacaaaccaacggaggacggagactcggaagagtaagtctatccgggtggagcgtctttatcggcttatcaggcggggagctcttcgggcgacttggaactttttagccctaggggggtttcccctcctctattaaccccctctctccctctctccctctctcccctccatgtcccgtattcacctacgctttttgtacaaaggtccatcaactcttacttccttcatcgccccgcgtcgctcattccacagctcccccttcgtcatgtctgaactctcagtgtaccttactgccccaaatgggcgcaagtacaatcagcccatcggtctcttcatcaacaatgagtttgtggcttccaagtctggcgagaagcttgcttctgtgaacccttcgtatgtacccctctgaagtgtgttgtgtaactttgagtactgaccagatctccagcgatgaatctgagatcacgtcagtgtatgctggcggtgaggaggatgttgatatcgccgtccaggccgctcgcaaggccctcaaggacccctcctggaagctactgcccgccactgagcgtggtgtcttgatttccaggttggcggacttgattgagcagcacaaggagactctggccaccatcgagacttgggataatggtgagtaaagtgagcgattgactatcaagataagaactgacatctattataggcaagccgtatcaggtctctttgaatgacgatatcggtgaggtcaccaacactctccgctattatgctggctgggccgacaaggtgtatggtcagaccattggtactaccccggccaaattcgcctacaccctccgccagcctattggcgttattggccagatcatcccttggaactaccccctagcgatggcagcatggaagttgggccccgcgcttgcgtgcggtaacactatcgttctcaagcccgccgagcaaaccccgctcagcattttgtacttggccagtcttatcaaggaggcaggtttcccccccggtgttattaacgttgtcaacggccatggtcgtgttgctggtggtgcgttggtcacccaccccggtgttgataaggtcgccttcactggttccaccatcaccggccgtgagatcatgaagatggccgcaggcaccctgaagaacgttacccttgagactggcggcaagtcgccactggtcgtctttgaggatgcggacctcgagcaggccgccaagtgggcacacactggtatcatgtacaaccagggtcaggtctgcactgcgacatcgcgaatccttgtgcacggatctgtatacaacaaattcgttgagcttttcaagcacaccgtccacaccaccagcaaggtcggcgaccccttccacgatgacaccttccagggccctcagatcaccaaggcccagtatgaccgggtccttgaatacatcgaggccggcaaggctgagggtgccacgctcgcttccggcggtgtggcgcacaagaacgtcggtgatggacgtggtttcttcgtcgagcctactatcttcaccaacgtcactgactcgatgcgcatctcccgcgaggaggtgttcggtcccttcgttactatcgctagcttcaccacggaggaagaggccgtcagccgtgctaacgacaccacatacggcctcggcgccgcagtctttactcgggacattgagcgcgcccaccgtgttgccgccgatatcgaggctggtatggtctggatcaacagcagcaacgacagtgatttccgcgtgccgttcggtggtgtcaagcagagtggtatcggtcgcgagctcggcgaggctggcttggacgcgtactcgcagatcaaggccgtgcatgtgaacatgggcaccaagttgtaagctgtttatatcaatgaggaatggatctcttccattgcacataagttgatttgtcataagttgatctgtatataatgaccgaaccttttgttctcatccctgcaaaacgcaaacactgtatatctatttgatcttgttcctatgtagccccacagatctcgacgggccaacgtcaatctcatgtatcgcctccacttctcgcttttgctcagatacccgcaaaaaggggaaaaaggaaaaaaagcaagatcgaactactgagtgcacagcccaggtaaagttacttctcgtcatgcagatcaggccctgcaccgtgcagtgacatgacggcaagtggttgtcccgtgcgcaatcaggagaaaaaggaaggggaaacctcaactctcacaggctctatgtatgtccatcaccttcgcgttagacaactggacttgcacaattgatgcccaacttcttccgcccgtagctgcgatgatgcaagccttatctgcatgcaagccttacctggaccatatggggcatggtgcatttgaggattgtactgagccgttgaagctgattggtcgaacgatgcttactttgtataggttcacctcggttattgaccccgtactagtaactagcgaactaactagttaactataccatctctccctcgatctgattatcagttcatattgaaaaaggtggatccaacacaacccaattcccacctctccatctatccctgcatgacccatcacgccctaaaatcaaggtgatacaagccggctgcaggcacattctcgcagacatgcatggcacggatggaaattgcaaggcgggaatgtttttttttttttttgcaacgcggtatttgggcgcaaatctcgagtcaggcaggaaaagggccagattactcttcgaactctgggattggtagtcaagagtaagtgcaggttccaggtccaggtcttagcgcccaccagcacacacatgcatgaatctcttgcatctgcatgcagagtcggtcatgtgaaaagccacctggcgccggtctggaaggtgatctgacggtactttttgacgggtacttgctatcatgattgagttctcgagccccgaactctatgtatggcttggcggctagctgcacgaattgatgcagaagagaaagtttacgcatagtatccgtagttcatgggtatttcagagttcagagctctggtgtgatgattcgcattgcagacacgggattcctgcaggagattcaatagcgcgtgggattggagagtttgggattcaattcaattgccgaacggacttggatccctgcagctgtcctacaagttcgctcgaaaggaaaaagaaaagcaggatagcatcttccagatccaagaggcacggagtacggtgtaccagtgacaacatgtagtaaaagtgggatagtaagccctcgtgggggtggcttggcatatcccacttctcatcctccatctccttgataatattccctcttcgatatatctctgtgaacagtataatcgtaagtacggtgacaacctagattccactcgaatcacgcttgcacacgaataacccgtttaatgagcctgacatctctcagttcccaaatagcggtgtccactccatcaccgatcggcatgtctgaaattcagaggtggacggtcaacgaagtcagtattccatgcggttcgccatttgattcgctctttttgattatttcttttttctcgctctcctctggttctcgtgtcggtcagacgtgacgattatcctcccgagcgtatcacagaacaggaaaaaagaaaaaagaaaaagaaatctacgccaatcacagacaactaactcgactagccgtatctcgacatcccaggaacgctgctcgaagggccctttcacgatgtggccaaaaacgagttccggtttgtggatatctgggatcacaaactatatcgcctcgatctgacaaagggccctgactccttgacggccattgatactgacgccgctgttgggtgggttcccaaccgttctggaaatcaactaaaaattcacttttgctgacggggaaaaccacgtgggacttttagcgtcaccgccaatattgccaactcatccaatcagctgattgtgggagccaaacatggattcgcccggctggaccagactaccgggaacctctcctatatccacggtattcgtgaactttggggcgaagatgaggggaaagcagagaggtaagggtttgaaaaagaaaaaaaagaaaagaatccacagctacatcgaagaacgtcgactaacattaaccccaattgttacaaaatataggatgcgtttcaatgatggtgccgtggacagccacggccggttctgggccggggccatgaacgacccaaagatcaagaagccggaagcagaaggggtcctattcagactggatccagatcagagtgtgcaccacatgctggcaccggtgacgatccccaacgggatcgggtggaatctagccgacgacgtgatgtacctgacggattcaccgacaggcaagatctttgcctttgactttgacgcttccaccggcgcgatcagcaaccgccgagtgcacttcgatatcggcaatgcgctagagccggatggctttgccattgatgtcgagggctgcatctggagcgctgtctacggcggcggaaaggtcctgcgaatttccccggccggaaaggttatcggtcagatcgatctgccgacgcgcaacgtgacctgtccagcctttgtcggcacagagctgtttatcactactgccaaggatgatcgtgatgatgaccggctgccgcagtcggttaggtacggcggccgggttttcagggttgatgtcggggtccgcggcgtgcctaagaatgagtttcggttccaggactagggtgtatcgtgtgcatcagacatccttggatacgtagctgcatagtacatggtactccgtacttcgtacatacatagcacatacatactgccgggatggtacatgcttagttcgatttggtatattcttattctactccatacctcggcatccaatgcgacgtgtatccgtgcaacgtagagcagaaggatcaattgcgcatcactagtactttgcacgtccccaaaaaattagatccaaaaggcggtattggtagctaacccaaagaaaaaaaaaaaaacacagacgacaattcttatgcagcgtgaagctgggtggatcgaggatcagcaaacgggcgagcacgtcggtccgcgctgtcattgtccggaaacctgggtctgggtagtcttccactgcaggccacgcaagggacacaaacccaggtttatagatcgaatcggcgttcgcatttccatctcacatcctgtcgaccatatactccatacgtacatgcaattgttaatataggacttggccttgattcccctggtttccgttcggtttcgaactcggctagatttcggtcgaggctaggtagcgcgtgggcaccagcactgccacctcttttttttttctctggcggggcccgccctgcagggcggaggcacgaagtgataggtggtgtatcgcaatgtgctgtgctttttttccgctgttttcggactatgtgggtgggttgatccgaagggggaacatctaccgtacctgtcagcgggagatatgccaatctagatccgacaaagctattcttctgctttttcagggaaaatgcggttgcagcggacacgagataatcggagatccgtgcggtgaggccgaagcagatcataaaaaggggggacagcgttatccacttccgaagtgcagagtcaacacctgaatttcggaaaagaaaaaggaaaagaaaaagaaaaagaatcgggttctcgatgaatccagtctaatggattccggatctttttaacttctccggctctgcacaattcaaatagttcgatgtcacgcatcccgaaggcatgtcggggataaccagactcaatggtctggggacggcggtttgagattgtcagccacaagttgacagagagcacagccctactccatacggagtaaggagcagaacgaagagaaacgtggaattcgcttccaaattctctggggaacatctaagccctgttcgatccaaccagtcagaaccactggatctatcagaccgcaattgtctgtcgaatatgcatgattcgcccgaaaaaaagaaaagaaagaaaaagcaaaggaacaatagcggggactctgctgcagcaaaagactgacagctcctctaaccctgtcggaagcgacctcggcacttggacattgccaacacatcgaaagaaaatatatcatacgttgtccgtacagctttacccacttgtaggagtcggaagatggaaccccatattggaatgcgtggagatcatggcgtcttctcggacaatgcttcaatatctcggcaagatcaagccaaaacgcaagtgccaagaagaggcgcttcagctgtggcagcgccagctcgcctatctcataaaatcatgaaagcaatttattttccattcgaagaatccactttggtgcagtgcgtccagactacggagtacgaagtcgacactaaagcgatctccactgcttatttgagggtcgccacgcggagtctttatcccgtgacctcggacaagctcgacagcctccgggaatagagctatccacacgggtttctcatgcagctcatgcggctagtggaatcctggccggatccctttccgcttggtccgatcgtggagcgtcaaatcggttgtgatagagaagaggtgtgtcccctggttgctgtttacctttctgtttatttactttcgggttccaaattacatcatttttcagcggactatcaatgtcacaccaaggggtgaaacgaagtgggttttaagttgtctcgtctggtgtctgttctctgcgttaccctgttccatgacgtcaagtagataccaagttatagattgtacaaaccttgacctcgaaacttcaaaggcacggaactctgccagataccaacggtcaacggcaacggccctttaaccgggacacggggaggatttggtgatgcacaacatgcatgtattataaactttgcgagaacatcctttcttcctttctgcctgtgtactttttttatatcccaccctttctatctagattaatagtatctcgggaatttagtctctccaagcaccaaactctcggaaattgacaggacggcttactaggcttaccaggcaactattggggattgcctgactaactatacccgagtgggtatagatcggacaggtggaaaatggagtagttcggcgtttctcttttacttatattgccatgcgtcatccgttgactcccagagaagagaaaaggaaccttctaggtcccccatacattgccatccatggatactatcctccactaacgcccttctacccgtggacgcttcaaacctaccacacttgactccctgaaaatcccaaaggaattaatgaataaatcgaaagaggcaaaaaccaaaattaaaaaaaacaaataaaaaaaaaaggtctccacctgtccctgtccatgtccatggtgacggcgcacacttgcagctcccgatgattcgtgctgtgcatgacgatcgctttccccgggtgcttaggtcctttcctagatgtgactaggggaggatgactctatagctggatccggtaatggcctataatagggggtgatatcggtcactctgacagattgacagattggacgtattctatatctacttcaatattgattttgatttgatttgttttgattttcctttctttttctattttagcatggcaattattattaaaaaccaaaaccaaaaataaaaaggcccaaaaacaaaaataacaaaaataataaaataagcccaatactccgggggttggaggtctccataggagatgcccaactatccgccagactgggtcggacaagagacaactaagttgtcttggagccatccagaccaggtgatggatcattctctcaccgctgcgaattccaacggttgttcttaagcttgccccattttccaatttcctcactttccctgactttgtcgcttttgtcactttgcctagcttttattaagggcctcggatcttttccccatctttctagcttccttagcttccttgtattgattatctctcctcgatcctcaattgagtgaatcgagtctcttgttctatatatccctctcactgtcttcatcgtggcggccttaggaatcagtgtgttgactgcaccgtattcgggctcacattccctcaacctgtcactctattcagatcgatatccatcgccgtcaccctccctctctcatactcctcgagaacccagcgacgaggagagaggggggttccggtcatgccctaactcccgccccgtcgtgggagatttgctttctatgtcgcaggattctcgacgtgctggttcattgtccagagatgtgacgcaaactgatgaccgtggaagtgacaatgatcgtaccttcaaccgcaatcctacccgccggccacctcaacgacctcggccccagtcatggcatccatacggacccgtggagccaccactggaatccatgtcgtcccgacccattggcgttcatgccatcttgaatcatccacaagcaacaactgacctggccggccgtgagccactgagcctaccgggtccatcatcctcacctcgtccccaagggacctcgcccataatccgttcaggatatgcattgacgtcgcagccgctatctccttactcacggcctctgatgaatccagcatcgccttcggcgcggtttgtcggcgggggcggcagggcttctggtcagtctagtgtcgcccagtcaccactacttcctcatgaacctttgatgggcccacgcctacccgtcactagttcgcctttgcccatggagacgggcctacgctcaatagcacctctcactagcactcagcctccctcgctgcattctaccagtatgcattccaggcgaattagtgccggcccggggcctctcagcaacctgaaatcccaagaaacgagtcctatcacgtctcattcaactttcaatcactttggccatgcatccccagcagtgaccagtgtctccctcgcacaaagcaccgcatcatatcctactgcgcctcaatatatgacattggaccctgtggttcgaaccgtctccgcaacaaaaggccccagacgccaacctgagcaacaccccacccgagccggaacaccacaggatagttcccttccactgggcatgataccatgcgtactagacatgcgatccggctcctccagccaagccgaaaagcgcaaagctaacagcgacgcatcacgacggttccgcaatcgcaagcgcaacgaaatgcaactggagcagcggctcaccgcacagcaggacgagatccagcgcaatatagaaaccgtccgtcgccagagcgaagagatccgcttcctcgtccagcaacgagaccactaccgctccgaacgagacttctaccgcgaccaactcggccgcacaatgtctctgagcgccttaccccccaggccctcctctccacgctccgcccaaccaaccctcctccctgcatcagaaccgggcaccacgacatcgtggtcgggcgtcgatgctgcccgatccgcttcaggcacacagccgacttccaatccgccccagggaaggatgctcgaatcagttcagtctcaacctacttggcctgcaagtcctccctattcttcaacccccattgcatccgccggacgggcggttgctggcccgcattcccggtcgccgtcgctatctgggggccaactgcctccgctgcagggatcgtggtcacgtccttgatttgagtttgccggctgccgaatcaagcgacaattattatttctttcattcttgtcttttttccccttttccttacactcttaatcatcctctctcttgtgtatgccactgctaccaggagagacaaacaagcggtcactggcatggccgctcgcaggtggtctacactcctttagtgaggtggtctactcaaaagtgcctcttcctttaggctgggtgtgtataactatctgcatttcttcctgtcctcatcaaaagactcgtctggttctgcaaaagtgcaatttatacttctctgtattcgctgtcattatattaccctgtcttacttcctcatcctgtccctctgctttgattattctcgctctctctttgtgtatggattgcacagcggtgatacctccatcggcgatgtattaaatcatcatttttgattgaagttggaagatatttgaaaactggaaagcccaatatgacagtttttaccacttaattgttgaaatccgacctaaacctcgtaataccaccatctgaggactcaatcgccgaagctgtctagacgtatctaggaaacgcttggatcgaggtcttaaaaagcttagcttgccatgtaactttgagacatacaatactaggaagtgattggtctatgggtaacacaggctaaggtagcacaaggtggttcatacgacatcataaacacatttagaatctatcaggcaggccgtagataatatatacaggtgctactctagttctaaatatctctatggtcttgatctagttatgaaattattcatgattaataataatggagtacaacttagtaattatctgattggtccgtgaagttccggtggaagcccttcttccaccggaagttcctccactcaccgaaatctccaagcagttaagattccagacgacactcagcacagccaattatcgccaagaaaacttctcggatcctcgaaatgcggggccccgagtttccccacggatgacgggtctttctcgtattcctctcatattaaggcaatcctcacagtaactacaacatacaaagtcgggctaagaagaaaacaacatcatcataagagtggattgcagtccaaactccagtgcgaaaccgttcacgtgttgtcgcagtcgagttcttttaacactgtccccaatcaaggtaaatttttccgagttccgagagaggagctactctagaggttccctagcgctaatccctttagcagcaaacggaggaagcgaccggggtccgttccgatggatctgccatcctctcttactcttctggaggccttctccaatgccgaggatgtagaccggttgaacgggagccaggttgatctaggtaggaacacttccgtcaagcatatccccaatccccgcatcgtcgctgacgtctctagatgccttcggacagttcatcgcatcggggaggaagccgatatctcaaccacatatgaccttgacgaaccacgtgccccagacatatcccttagacagttatcttacgacgatcaatgagctgctctcgccgccgaccccggatctgattctaggggagtacaatcagccctttgaactgcagcgaaccttcgaaactcggcttccgaatctctctgaagaaagtaaaagttatctacacttgaaaggagctctcaggatagttcccgtcgacctccggaatgagttgctgggggcttatatcaaatatgtccatcctctcctgcctgtcattgatctgcaatggtttttatcaagtgtcatggtcgaggatgaatcccgatttccgagcccgcttcttcatcaagctgtcatgttggctggcagtgcatttattgagcaggaagctgccgtcaaagccgggttctcgtcacggaaagcactgcgaaggacattattcgggcgagccaaggtgagattgagaaagacagaatccatgacaagtcaggactaatctcgactctatcatcagcttctttatgaattcgagaccgaaccagacgcatacacccagatccaagcattattgcttatgatgcagtggcatggaagtggagttggccacaaaatcccaacatactggtttgatctcgcgtattccacagcagagcgcgtcggtctccttgggagtctagaaacaggtagtttttctcacaagcacagactatggtggtgtctctatgtgcgcgaccgcattctctccctcggtttccgtcgaccactacgaatcccaaacagcgatgtcacaatgtccctactggaatctacgagatactattcctccgagccctaccacgacctcgtcctagttatgctgggagaagcagccgccatgctcaactgggaaaaccaagagcggatgatgcttctattcatccaggagattaagcttgctcattgcgtgggcgtcattatcaatcttctgtatcaagatgcttggtcgccgtcgccgtcgggggactataaatacgccatggtacccaagtcgaatgtgccacaggctgctataactgaatgcgaacagcttctgaagacctggattgaggaccttcctgccccggcccattatttctccccgtcacttctgcacggttgccataccgagtctccggagattgtcctcctcgttcaccaagcgttcctctatctcctccatctcactacaatgtcagtactctaccaagatgcgtcgagccgaggagatggtcttcagacgacccttatatcggaaatgagaggcctgacttcgcaagtcaacgagattctcaatgagctacatgactgcaggatacttcattttctccctggaagcactattactatactgattattattctggaggcaagccttcctgacctgaaggtttcggatgatattgtgaggatgcaggccatgtcgaacttgtatgcctgcgaggaagcggctgggtatttactacaaacatatcctgcggctgagattgttctgtcacgggcgcagaatgctcgtgggcatctcttgggtttgaccgcaacttgattgcggagcgaagcgaagcaattacacgatttaaaaagcatttagtcattttagcgtacacagaatgaaaccaaccaagatactattatttccagggcgcgatatccgtacctcctgtctgagatttcagtaccgccccttcctaattaggtgcaaccaagaatactgccatatattctgcctaattcttgtctacatggtgaaagaacatgcattattcctatatgattcaaccccctgatgataaagcagttgatgaagcagttgtacctataggatacgatatgacaggagtgacctacttctattaggagtttacatacaaattgtaggtacctgctgtcttactacttttaacacaagagcggtgtaaagtcagaaggcggtgtacatgatctatacccaattaggaaggtacgcctaaattctcaggcagggggtacgaatgttagttatccaaaggggggtatcccgaaattgcggggaccccggttgtgaccccggtgacacccgttttgaattggctaaagcaccatctcgctatattcatggagcaaaagactagtgtggtgccaaagccaccccgtacatcgcgagaatgtgatagatgtctcagccagaaactcaaggtagatcccttcataacactcctggtttgaaactatggttctgacagtgttcgcatagtgtgacggcgcacatccatgtgtgctttgcactcgcgccggggataaatgcgagacatcccagcgcagagtgagacggacccgcggacaaaatccaaggggcagacgtcgacatatgaattctggagtacacagagcaatcgcaccagcgccacccaaagattctaactcgatccatggtgctggagtagctgaaatagcttctgccccagagagctcaacctcctgtccggaacgcctttcgaaagagctgcctccaggtgctaatgcctcctatccggaacgctctccggaagagctgcagtctggtgctaatggtttcgcgattgacttcgccagacaagtctttaacgaggaagaggctggccggactctgaccggtgcatcgatccctatccctgatgatacggaagctcctacgttggacaactcattatggcatcatccgacagaggtagagcttcccccggaggccgtgatattagccttggttgacgtctatttcgaccgtatgcaatggtttatcttgctgcttcacgagccctcgttccggcagactgcacgcaggataacttcccagactgtttggagacgccaagatctcagtactaccatgcttgtcctggcagtggctatgattgggctgcattcggtcttaccagatgatagatggcctgggcacgaattgttgcgagaatactccgttgatggggagaagttgatgcactatttgaacaatgagatacaacggaatctacttgatatctcaatcgattgtcgaatcgaagctgtccaggtttgcctcctggtttcctcctattatatttaccatagatcgccgagtcttgcttggactgtctctggtatgggtgtgaggtctgccaatgcccttcatctttatacaaaatcagtccaatatgaaagtccagttgtggatgaaattcgctctcgttgttggaatcatgctatttccagcgacacgtttgcgtctgtcgtctatgggcgaccttgctctatcgacactgagcttgtcgctttgcattcgcctagagaaatggacgacctagccattgatccacttctgctggaaaacgaatggatatttggcgatgggatgccaaaaacgacagctggatttttcgctatgaaatatgagatctacaacatcattcgagacatactttcacggtttcgtcgtcttcaattgagaaaagagacaatagaagaggaccttctggcaattgtggaagctgcacaagactcagaggaacaattagtttcctggcggaaaagggttcctcggctattcgatttcgagttttggagctgtgacaatcgcttagagcagttccaacggcaaatcgaaatgttaccgcaacgcactaaatatcaagcagaaacaatcatcttacaggcggcaatactccaactaacatacgatggagctctgatacaagcccatcgacctttacttgagcagaaaatcactagttcttgctcgcgcttggtggtagacgcaatccacgagtcgttccgggtggccactgcagctgcgctacgaatatctcacattccggtcctccgtttcaagcatcatttcgccgaatccttcgcctccctacagcaatttactgcaggagtgatcctttgcatcctgccaacctgtcaaccttttacttcagctgcacacgaggccaaggctggaatcatacgtattatccatgctagctcagctttcgggccccgcaatcgcattgccaagcagaccgtacagcttctgacagagttgctgaaagtaactgtcgatcgagagatgtccagcgccttgagacgcggggtggaaacaattattcccaggcgtatatctgagaggggttccattctgaatgcgcagccgcgtatagaccatacaaggagtgattcactatcctcgcgagatacctccctcgatcagtcttcaacgtcaacaagtcacgcactgccccaggcaatacacgaccatagtagggtgaacgaccgaatagcccaagcacccgtcaaaccgcctgaatacccgtctgccaatatcttcgaacaacttgacgatacattcgctgcctttggtgagcgtgagtggagccgaggtgcgatcagtgagcatggcttctaactaacgcgttaataggcatgttcaacttgatatctgatgatcaaagtagtgcttggaattggggccgtacggtcccataacagaggatcaaaattgtataaacaggcggagttgatataacagctggtctacagaattgacggttgtgagggctagcagggctaggatgggcctgagcaagtggtttaaaagggccatgaatagagggagaaggatgtgaaaacaagccaggagaaaaggctttcttggtccatattgtttgttttggctttggaggattagagagacttggctgttacaatactgaggaagtacggtccttggaattggggagaataacgaatggttgctatagatatcttgaaggggagttttatgctaaatacagtctctagaagctcttttatcgccaaatcaaagagaagctacactatcaaatagtctgaggagcgctaagcacatggcgtgatagtctgtttggtaactataactgtccaatgtcactgaagaaatagaactgaattttatacatccctcttttctcctagacgtaagttgaagtaaagtggcagggtgcatacttacactacgaagagagcccaaaatggttgtattaaacatcatgtagtgtaacaaatgtatttcaaacttaccttctataactaatcttggaactatatactttttctttgttgtgacgttgcttgtcttctacatatcacatcttttaagtgcagtcggttttccacattaggctgtttgctatatgtgtggtactataagacgaggccactcctattgctcaggcaatgtttgccagacctctctttgcccctattctacctgattccgtgtctccataaaattaccttagaaacttcttggcaatgagagatctacaaatctaccatgtctatcggtcagactacctcctttctaggcagactgttctagatacttacgagtctatgcgagtgaaactcaacctatgcttaggatccacttgtggacaagtagactacaaagaggaagaaacataagggcatgaacttcacattacgcaaccatagctgagaaagatgcgagaaaaaatagcacacaagaaaaacatggtatgagatacggaaactcagccggaagacaaaatccagaaaacccatatcaagatatcaataaactaagcctcatgagaataacaaaatgctatttcaacgcttgtagtagaaagaaagaaaatgccatcggcacgcaattccattctaggaatgcgcttagagggcgaaagcagcgatgacaccggccatgacggcaccgaagctgatggcgttgcggccagcgctgttgaagacgggggtggccgaaggagaagcggtggggacagcgctggtggtgagacggatggaggtcaagggggtgctggtggggggcttgacgggagaaacaccagtgggggtgaccttgggggcgggggtagtggcgaaagtagtagcaacagtggtggcggcggtggtggcagcggcagtagtctcagtctcggggcagatagtggtggtgatctcggtgctctcgataacggtggacgcagcaaccggggtggaggcggaagcggtggtctcagtggtggagctagcgacggcgctggagctggagacaacagcggcggagataccgaactgggtggagtactggtactggccggtaccctcaacaacgagaagcagaccgtagtgggtgacgtcggcctccaagtcagcgctaggagtccagctgaactcgccgctgttggggatggactcggcaagagtctcgagggggaggacgttggtggagggaccgcgcagaagaatgagggagatagggccaacagtggtgggagtccacttgatggtgtaggccttgccctcgggcacgatctcattcagaccagggtaggtgatggcattgccgctgggctgctggttgtaatcaggagcagtgtaggcagcagccagagccacgaaggcagagaaagcggtggcgatagtgaaacgcatgatgtagtgtcgagattgacaaagagtgactggggtgagggtaaaagaatgactatcgttgaagaacgaaaaaaatgattgtgagtggaatggagagaagaggaagaaagaaagcgagaaggaggggagatgaactactttgtacatttctagtttggaggtgcatgcaaaagtggggccgacattaaaagcccccaaaaccaaaagatcgcgcagaccaaccatatcgcatctcatttcggctacattttactttgtgtggctggacttgtattgtaaatacctatcacactgacgctataccgtcatcctgttgtatcatctgcggtctcgtgcccaattatgcagcatcttgtcctcgtggggcatgcgggccggctgtggctcagatgttattagaacaattatgtataatatcatgctgtacgtgacgggtcaagtaccatcagaaccaggtaccgtttctaattggtgggtcccccggaagttaattttatccctaataacggccgacccttaatgtagagaatgttccggtagggaagattaaaaataccactagactgggtctaaggaagaagtattaaaaagcattggaaagtattcacaagcatccacaagtattaatgaaataggaatgagggcatatgagacaaagacagggtaaggggagtctctgttgacatatttgtttacctttttaaggcttacaaggttccaaggttctgccaataccaacccgtggaacccttggcgaccaaaaccttcgaagatgacccgacgataacccacggtagccatagcccttccgaacatcttatatatatgtagctattgtagacatgtttgtactataagcaatcaaatgcatatacttctcaaattgcaaggcatttatgatcctcatttccaccgtgtttaggaaaagaggaatcgctaaatcttcggagattgcaagcttacgagattgcgccctcaagcctgggcccaatgacaggcgtcgtacgggtattgtaccatacagccgcacagggcgctgtgccttgcaggtaccatgtgtcctttctacgggggaaacaagatttcaaactgaacctgcagggtaagattctgatattcactgatgttcactgatattcacgattatcacgtcaatcgcaacataactccacaccgataggcccgtgccatatcaaaaactacatacaatcgccgatcacaccagttcattattagggttgtgatgtctatgggaaggatcaacttgatattcaggggtcgaagttgaccagcttgtatagagtgatacatagtatcctatgttgtttacatattgtaatccttcatttcctactaagacatgtaagaatgaaaaatcaaaatacgaataaagaatggatttgtctcacctggcaattcgcggtgatttgctacgttcctgtgcctgaatttagggtgggacttgtgccaagcatcttcgccgcaactatcgaggtttgaatgtttcttaaccgggtctcaggctggaatcccaccacattaggtctattcataggctcagcccttcgcttaatacgagacgggaatttttagctttcgtctgagggggaaatgtgaatcacatgacgttcagcctcatggcaaaagtgggagccaaaaataaaaaacgaagagaaaaaaaaaaccaaaataccaaaacatctcatagactagtcatatactacttcgtatgctgcacgcccgatgcaacatgaatcacacatcgagccattcaaccccgggtacccggaccccttctgtacaactagcacctcgaggcgacgtgaagtgcttgtcattggctgcattgacaaggttcggatccaagccaactaaaccccaacttggctccaaacaagccccgaccaagccctgtcagaacaatcagggaaaccttcgcccgtggcggcccaatctcaccggggaccaagcggacctaaaatggggccgaatcgaacaggtctgctatgcacctatgagtctacctctactcttcccaagtgacagtcttagtctggaggaattcgtcgaatccagcaattcctccgaagcgaccaaagccgctgctcttccatcctccgtggggaaggacagcctcgtcgtggacagtcatagaattgatatgaacggctctaaaaaaaagacccaaagttagcctcaattcaatctccacccggggatgtgatctgtattcggaactcaaaaacccacccagagtcaatttgcttagccacccgtaatccgcggaacaggttgttggtgtacagagccgcagtcagaccgtattcggtgtcattggccagtgcaatcgcttcgtcctcggtgtccaccaccatgaacgacacggtcggaccgaacgactcggtcgcgtacaagtccatctccttggtgacgccgtcgacgacgatcggccgcatacctgcgttggtggattcgcttgtattaaggtcgccatacagcagcttagctccctgagacacggcgtccgccacaagcttcttgttcttggcgacggccgcggcgttgaccagaactagcgcgggcgcgtccttgccgaacaacttttcagtcgtctcagtaagtttctgtcggaacgcatctgcgatcgagcgctgcacgacaatccgctcggtcgccatgcagacctgaccgccctgtgtattgtgtcagtgtgatatcattgtctcgaatgaacattacgtacgtgcatgaaggatccaatggcacagttcatggcagccctatccaagttcgcatcgtccaaaacaatcgcggacgccttaccgccgagctcgagaagcacaggcttaatgtgtttgcccgcgagagaagcgataatcgagccgactcctgtgctaccggtgaagttcaccttgcgcacagcctggtgggcgatgagcgcgttggtgacggccggggcgtcggagggctggtgaaagatgacattcaggcatccggcgggaagaccggcctggcggaagatgtcgcccagaacccagaaacacttgggtgagagctccgagcccttgagaacgacggtgtttccagccgcaagagggagtgcaatggcgcgcatacccaggatgtaaggaccattcctacatcaattaagttgagttggggccagctgataaagcgcagtataccagagatcggaagcttaccatggcgcaattgacagaatcactccgtacggctccttgtatacgatgactcccatgtccttcccggcgacattcggtacgataccctcgatcgtggatatccggcccgcgaaatccttgatgaagttcaaacccatattgaaagtgatctctatgaaaggccggccggcaccggtctcctcgcgctggtactggatcagttcctctttgcgtgagaccatgatgtcagcggctttcaacaggatgtcgcggcgctcggctggcttggtctttctccacgagagaaaggcggcttgggcactgtcgactgcgcggttggcattgtcgaccgacacgccgtagcaatagccactcagctcgccggtagccggggcatgaacctcgaatttgatatcggtctcaatggactcattattgatgataagcggggtcaccgccttattagattgcgccattgtacgttgaggagttgaagaaggatattacgaaggataatagggggggatatctctttaatacagaaagggagtgtcttttcgaatagaggggctgagctgactttccagcagctctgatcttaaccaaatagagtggcgggggttggtggggacacgaaggaggtaagactctgataggtcacggtttcattgaacgtagatcgattatgtcggtctgggctcacagtcagcagtaagcttattcaacggtttaagaagttatctccggtgatgtcaaccccaaagcctataataacatgccgatctcggagttaccggggggggggggaagaaaagatgacaaagcagagatgcagtgagatggagatgagatgaacgacatgacatggctttttgaattattcagcgtctatgatcaaaaggtatatccaaaaacacattcttcccgagtccagccctatcaccatgatcccatatccccatgcgcctgaaagatgcgaattgtgacctgcacaaataatacaagccgtgccctcaattggcccaaatcttcgtctcggtcgaattgctgcccttggccatctctgcgaagggacacgccgatcccttcggcgcagtggacgcgctttgtatggacggcgccacactgtgtatggaaggcgccacaccatctatagagggcgctataccgctagaaatactggaccggtcatcctcggtcgagctaccggagctgctgccgagaatgcgcttttcgccgagatatccctcctgatcctcggtatagttgaacatggacatctcgtcggcgaactcttcaccgtcgctagagtgataccgggcgaagagatcgttctggatccagaggatcttgttgacggcgcgcacgagcgcgatcttgcgtcgcagcgacaggtgtgggtgggacagcatggcttcgatccagatatcttggatgtagcccaggcatacgccgaggtgaatgtactcgatgttgagaggtgttctgcgtacttgtccgctgtgcatcatgctgtgttacacatcaggttagcgttgcacgataatctcaccccggggacggggatctgggaacggatagggctgaacttacccaactttgttcaagtaccgccagaattccattgttgtcgggtcctggcatagacgcgtcaggtaccagcgcaggaacagcttgcggcgctggattttcggtgtgtcttcctggaggtagccctcctcgggttcggtctcgtcgactgttgtccgtgtgtggaaggcgcgggatgtgatgtcatattggagaatctttttatataccaggttgacgactgccgggatcaattgtttgatgtatttgttgccagagagcagtgcttcgatatcacctgaagggaatgacgttagtggctgactcaagggtggtccatggtaaaagcttactagagttgaagtcgaggaagctatggaggtacttgattcgctcttccaagcttgtatagagcagtttccggtcgacatgcattggcgcaccagccgatcctgatcctgatctgaaatccatggcttctgacactttattatgttgcgaacagctggggtcttccttgtcggggtggggaaaacggttggaaaggtagatcgagagtatgaaggagaagataaaactggagcacctcgtggcaagctggcggatcgagtatttataccatcgatgcgcgatctccgttcaagattactccgttcaccgttctcctatattggatgcaacacgattaaattgaaagccactaaactataaaacacatcctgttgggctccgctccaaggaatcctggaaggggacgatccatgactcttacccagaaaagcgacattacccgatctcaggcgagctttttccctaaaaacttcgattgaagacccaagtaaagtgctgatcgaatcagaccatagggcgagatgacttagtgactctctaaagtggagtaatcatctatttgtaggaatgtgtgggctgattcctgcaatctccgaactagacgaaaaagcgaaaaaagcgaaaaagcgaaaaaagcaaaactgcacagccaagaacggcaagatccatgggtgccgtgctatcagactcggcaacctgaaacaagcgactaggaatgtcgagaatactgtaggctcaactctaaccagccggtgaggaagctgtcagatgctagtataccagatggcgtttttagcatgccggggatataaaacactaaagtcacccatgttcaactgtcgcgaaccattgcccgtgcaaagcgaattaatgcgattaaatggatgaatcggcatttgaatctgactcttgttcactggctccggaactccgctacgggctaaacggtttctcttaggacccgtgatgaagtgggttccgttcgggtccgacggggttgcggacctggtgatgctattcgtgttgtctcagactgttgggtacatataaatacgtggtagacatgcatcgatcgtccgttgattgccttggaaatcgagcgttgcatcaactgcagtccccagattgtaactatcacaatacaattggctcggcacttcacagcgccccttaataagtgtaagctgtatgctagttagagattgccgaaccagtggatgtgtgggcccgaaggattgcgacctcaacgagtacaaagtacagactgtaataggggggaatcgggactaacaaagcaatagcgtcgaaaaaaaaaatcaggaaacgcctgcatgtcaaccgacgtggaccctctacccgtaatgaaatctactttgtacacgcgaactcgcgtcgtgtgatgacatggcctgatgggattctccgtagatcgggaaaggatagatcggatgtggatatggcatgatcaatagtccggagtgaaatctcttcgaactgagcacattagggcgaaaatttttcacggcccaaaattgaggcccttgccctgcgagcttggattcttttaattctccgaatagatcacacggagaaaggctgtccttgttttctcgatccggatgtttcgaaaaacagccgcggtagacgatcgcttttgccgacttggttccccagttaggtctagaacaggactggttctcgaatggccccctggaaccgtttagtttaacggctttattccatgggtgtgggatttctggggaaatgtgacagcgacagcggcccaggggttgtcgaaaataaccggccagtcacaatattcctaatgaaaattgtgaaaattgtgaaacgggggcgtcaaagaaagtgctgatcgcggctcgtccacgggcatttgcaataacacgggggattccatttcgagacaatgagcccataaaagattatatacaagactccatcctccggagagtcatcgcttccagataacctcgggtggcgtcttctgcccactaattgccggtcgtcgtggcccgtgcagccgcggcatcatacagagccttgatatccgcctgccactgcttcacctggactctggccacgcgacggtcataggtaagcagcccgttgacctcgccctcgacatcggtcgtctgggtccagacccccccactgcatgcgtacaggcggatctgatcctcgagctcggtcaggagaaggtggctacggtaattccatgccgcaatggtggtgtcaatctcgtacgtctggtcaattgtatcgatggccgcttggttgttccacagatgctccatggatacattactcccgatgccgccgaattcgccctggaatccaatccgggtgggatcgtaggggctcgagggtgtggaataaaagggggtgccacattgtggatttgcgtaatggtgattgtcctacgagatgttagtgagccacgtggctggagcctgggccacaggggcacatacactaaagtctccagcgccgtggtcgtcccagcccgtcgtcgagtccacaagccgagtggggtccagctgtctaacccgctcggtcagctcaaactcggggtagtattctgtgatctggccccaggcttcgttgtagatgacctagatagtggttaacgtctggtctttcggtttcacatcatgacttacccaagttacaatactagggaagctcttcaattggtcaaccaacaggtccaactggcgagtgaactcaacctgctgcttctcgtccggtaggatagtaactgagtttccatttgcgtccctcttggactgcgacgggcgcagggaaggcatgtcctggattacaagcagaccgagctcgtcgcaggcttgatagaacagatcggtctcgactttgatctacattccacggtgtgagcgcgagaaaccatgtgatatgcaacgcggcgacactcacatgcttgcgcaccatgttgaatcccaacttcttcaacatttccaaatcgtacaccatcgcctctttgctggggggcgtgtataaaccgtcgggccaatagccttggtccagagtaccgaacatgaaaatgaattctccattgagcaggggtcgctcaattccgtcaaccgtacccctggagactgtacggaatcctatatagctctccactagatcttcgccaagtttgacagtcacattgtacaggtttggggagtccggagaccagagtttgggcgaagatacgatgaattggaatggctcgttagtggggcctttgtgggttgcaacagtcttgccatcttgatggacagtgacttcggcctgggcggatttctccttagcagagctgtgtacagtgatatttactacacggtcagaatcaagcagcatttccacaaactcagagacttaccttgaccatccatgtttgcgtcaagatcgagttgggtgatgtgattggatggggcagcctccagccaaacagtttgccatatcccactgcacggggtataaaagatgtgactaggtctcagggtctgctttccaatggggatcacatagtccccatcgtcggtaggatcatgtacgaaaacaagtctgtattcaaagtcagatgtgcagactgtttaggaccctgagatactcacagctcattctgctgatcaaacttcaggtactttgtcacgtctaccgcgaagcggaagtatccgccacggtggaagcctgccttttcaccattgacaaagacagtggcttcgtagtctacggctccaaaattgagcagtacctgttcacccttccaagaaggagatacctcgaaggatgtcgaaaaccaagagtacaaagcccaatcgctttgaatgcctgcgaatttatcaattctcgatgctaacgcagtaagcaggagaggacctaccggacaatccactctcaagacacgatggaatcaaaacatcctgcgcaagtacctgcccaaaagggggctgctgaacagcatcgagaccttcggcattttggtacttccacaccccgttgagattcttccattcagaacgctgcagtaacggtcgcggatattcgggccatgggttcgttccgactttgtcggtccatggcgttgtcaagggaggctccttaagagagtaacccgcactgcgcgccttgttttcctggtgctcggtactagggagagctagaccagttgccactagacacgacaagagaaaactctgagccaaatgcatgttgactggagaaactcagatcttggcagtatacacacacagtgacagttccaaaggtcttcggaagatatcacattttgggcatgatctggacttaaatacatcggaccctgcttacgcgggactagcagactcatggcacggtgagtccctgcatacaacatggccacttggcagagatgcacccacaagggccaaccctgcaggaagtacacaggatgcccggaaactcagattcactgaggaccggaagtatgtcggccgctggctgttgtccgaacacagggagcatcacccaccgcttggcgttactaacagcgcaggagccaaggacagcagccaagagccgacggtcgatgcgcgaatagtaattaaactacccatcacaaggaatgagctggatcttgcctgctatgggcacgctgggttctcgagataggtggaaattgccgacgtgcaataataactgtctctcggcagttccaggagcgacaaataacagcaggaagaggtattccgtattccacggagcatttcgcgccagtaaaaacacgagtcacgcgacagaactttcggtctgagccgactgctctgcccaatactgcgagaatattaacgccgatcgcaacacacgggcgacagccgatctggctttaccccagacatgcatttcccgtgcaaggaaagtaatattgcttgctgtctcatctgttagcggagatatgcagcgcatctgcatatccaagtcaaatctaagaatgaagtcatgtttacatcgaatgatttgatcttgcattgctagttcagcaaggatcatgtttcctggccaatcccttgcgtccggattgcatggcacaccacgtccccaccctgagcgggatatatatttgacacaatggtctggccataatctgatctcgatatacttaccattcactcgctcctcacaatgaactagcattgccctaccccgcagactccgatgacgtggtagcttgaggttgtatcagctttcaatttaagaatccgaatggccgccctgtccctcagagtcaggcttggcgcgacgatcctctcttccctattggcgggttgttttgtccgttgctgtccgcttaagcccaagacgttggctagtttttggcttcgttcttccccacgttctacgagcggggcttatggtgagttgagtcgatgttccaatcatatattccgaacttggatgatgggaatcgtggtgtgatagaaaaatacataaccagcttttaagcaaatgaatactttgtccttgattttggagggttcttatctctaaccgatctatgtatgacctttcctgactggctaagaaattcacttctaacggctgacgctagcaagaaaacctcatcgtaggctagtgtcggttatgccagccttaattcggaatacgtacatgtggcagattacttgcatattgtatattgtactagaaagtaacgtaacgtcggcagtggatttcttttgcaaaaaagaaaatgatagatggcagtgttgctgtgcaacgggctcggttacagccggcaatattgtacagacggacaatccgattgcgaaagatggttagaaaagcccaaaatcccaaaaatcccaatgtgaactaatgtattgcggtagataggacatactactgtgtagtacgagggcttctagggaccatcacgacaaccggcctaatcgggttaccgcttagggctagttttttctgccggttgggctattctgccaaagttagccgattacatattcaccgcattaaaactaattattttggagtaggataaaaataatctggtcacgtgatatatacacacacgaggttatgatttacttgcttcgcttcgctccgcaatcatactatactccgaagtatgaaataatttgagtcaagggaattcttgctggtactagatgctcacatccctagcctgaattttcagtacggccttcctaatttggtaatccctatcggcacagtcctaatttggtcgagaaccgggtacctgcctggacacttggttctgcctaccgctctcttaccgcttccaaacttgtacacggcgaagtatggcagaaatatggcagaattcttagttgtacccgatcaggaaggcggtattggaatttcaggccgagcatccggtacgggcaacaattcccttcatttaaattgcttcagattcatagaccaggtggtccctaaatagcttcatctcttcgggcattatcaggcattaatattactcctactgatgataaactttggcacctaatcgtgtcgaaaacacataccgtgtgttggcgcctggcaagttggttaggcggtatttttttttctcctaattttctgcccggcaaaaaacccattgtcgtgatggtcccaaaaagtcctcgtaactgtggttgatttgcgctttgaggctggcgaaatggttaaactatagctgccgactgaagaagaatttacctcgtgccaagcttctcatcgtggctataaataaacttggtgggcatttccatgcctggacctaataacacgtaatatttgataacattcaaaagcaataatatgatatgaagatatttattctgcgttcctttcagcgtgttgtatcatatgtgtggtgtaacgggacatggtgagacaaagccaagatccgttaggaattgtagatgcttgacctgtgatcatatgcatctggcccattgagtagaagatagtcgagatatcgtgtaccaaagagccagaagataacggcgcagatcccaaagtatctagctaagggatttgcctgtatctaggagtttgcgagtggcgagcggcatttggtaagtactatctagtccaatcacattaggagttctccgaaatcccagggaacactcagaatcgaacgatacaatccccatcttctcgtcagcatagtgaccgctcatctccatcgggattgaattgatatcgggatttgggtggaacaatccgggaacgctttgtatgaccccgggattagggcagatcaccgaagttctacaatgatcaggtccacttatctatcatggcgtgatctgtatcaaatttagccctaacagaccccgggcttatcatatgtaggtatgtattggctttaatgcggattatcgaacttccgggattatcttctctcgtgacactgcattgaagcaaaccccgtgttgacttcccgagttgcactttactgccaaacatggcgacgattatagaattactccccgagtccgagagcttccgaatctcatgatgttactcctcttgtacttcggggtttggggatgtagactatcatttcaagccaacgtatgaggccgctggaagtgttataaattgaggatctccccaggcttaagataaggatttccattctacacaacagtcttcaaagcaaacactcgtcaaagtacaacaagcatctcaacatggttaccgttctcaagaagtacaaggccgcagcagtcaatgctgagcctggctggttcgaccttcaggaatccgtccgccggacaatccactggatcgatgaagcaggaaaggctggctgcaagctgattgctttccccgagctgtgttagtatcacagtcccaagtaccggatgcaatgtactgacaagatgaatagggattcccggttacccctactgggcttggaaggtgacctaccaggagagcctgcccttgctgaagaagtaccgcgagaacagtctcgcctccaactcggaggagatgcgccgcatccgcgaggccgccaaggccaacaagatttgggtgtctcttggatactcggagctcgatctcgccagcttgtacacgactcaggtcatgatcagcccagctggagatgtcatcaaccaccgtcgcaagatcagggccacccacgtcgagcgccttgttttcggagacggcactggcgacactaccgagtcggtgatggacaccgagctcggccgcattggacacctgaactgctgggagaacatgaaccccttcctcaaggcgtacgctgcctcgctcggtgagcaggtgcacatcgctgcttggcctctgtaccccggaaaggagaccctcaagtaccctgacccttacaccaacattgccgaagcaaacgcagatgtatatttcccccttctttatttttgcaacgacttgatctgattactgacaagactgctcagcttgttacccctgcttacgcagccgagaccggtacattcactcttgccccgtggcagacaattaccgccgagggaatcaaggtcaacacacctcctggaaaagagcttgaggaccccgagatctacaacggaaatggccgtatcttcggtcccgatggacagaacctcgttccccaccccgccaaagacttccaaggacttcttttcgttgacgtaagtggagaatatttttgttctatcagaacgtcaaactaattgatcaaacagattgacctcgacgagatccatctgagcaaggctttggccgatttcggcggccactacatgcgcccggacttgatccgtcttcttgtcgacaccaaccgcaaggacttggtcgtgcgcgaggacaaagccaatggtggtgtcatttacacccggactattgaccgcgtcggactttctcttcctttggattcgtcggctcctgagcctgagaccgagaactgagtctcaattcgagagtatgtagatctatttgccggactctagcagatatgtgtattgtatgacagaagacagaaataccaacttattcactcttttaccttttatccatagtttgagtgtaacttccttttgctctgtcacctaaaagaggttgagccgaactgcagtgacttggttcagacctcgagggcccagacccgtgaaacgcgtggacattccgttctctcaacattcttcacattctcatgcattttttcttatacctcaaggtaacaaattcagagtccaagacctccaaggtcaagttgcaaccatgtgcagaccaatactctacccgatttgtcgacgggccggcgagcagacaatggcccggagagtgtaacaatggaattgtctggggtacaatgtctcagatataatggagttgtcgccggaaacagaagtaccgaggacgacagtcgaccattttgacttgactataccgaccactccacattcccagcgtatttcatagtgtaatgggttttgaataattctaagatttctttggaggactttagagtgaacaaaaaccttaccacagcgatgtgcgcacttagtcccaaaaatacccttatcacccttatgaaacagcattcgatctgcagaacccaagaatgattaagttcactcttacactaacactacgtagagtaaataattttaagctcaagctcgacgtctagaagctgtcaagcaatgacattccgtaaaagttgtcggagctgccacgtgtcgatcatcacggaatgtgagattttgctgcaagcagaatttaattcttttaatagttgaacatgtaggctattatgtgtgtctatattagaagtatcaatgagaataaaagtggaagtcgcaagggaagcctggttttctaatttgatatagggcaatgaagtatagcttccccggatactattttgggtcgcagttgccaataaaacacatagtgacgaggtgacgaggtgacagacattttcacagcctttatccccacattatccaactatcattgttaccctcgtcaagagaacaagccctttgtctctgttttcggacactccaccttcctcttgattcagacctcgaagaatagtctatacaggtacgttacttttacttcaatctccatcattccccgtggggacttccgttctcgcccagtaacctttgtttccctgcatccggctacatcaagtcacttataactgctgttctccagccattcatctcaaatatattcattcctgaatcttcattcttcattcctcattcctcattactcaacaccagcctcctgacttcttaccaagttagggttatcagcatgccatccatgtccaagttctcccaggcatccgtgctcggactgtctttattggtagccttggctcaggctacgccaacagtgtgagtggtatctctctatcagagctaaagatctacaatactaaccgacattggtgtatagtagcctaaaattcaactaccgtggtgacaaggtccggggtgtcaacctcggtggctggctggtaacagagccctggatcactccatctctttttgacgcagctggtgatgctgctgtcgatgagtggtctctttgtgagactttgggtgcgaacgaatgtcgctctgttctgaccaagcactggagcactttcattaccgccgacgacttgaaccaaatcgccagtgcaggaatgaaccacgtcagaatccccgtgggatactgggccctgaagcgcttggatggtgatcattatgtcgatggtcagctagagtatctggaccaggccatcggctgggctcgcgccgccggtctcaaagtcattcttgacttgcatggaggtacgtgtcaggacctatatattacatagcaaccactgaccaacaatacagcccctggctctcaaaatggctttgacaacagtggaaagcgcggttctattcaatggcaacagggtaacactgttgacgataccaaagatgccttggaggctctcgccaaacgctacgaaggcgatggagacgtcgtgactgcgatcgaggctttgaacgagcctagcatcccaggtggagtgagccaagatggtctgagacagtactactacgattcatggggccttgtccgaaaggcaagccaggacaccacaattgtcctgcatgatggtttcgtgcccactgaatcatggaacggcttcatgagcgagtctaccggtgtctggtatgtgatgatggacacccaccactacgaagtgtttgacagcggtcttctcgccatggatacccaaacacacgttagcaacgtctgcagctttgccaaagaccatgttgtgacctctgataagtgggctgttgttggtgagtggaccggtgccatgaccgactgtgccaaatacctgaacggaaagggtgtcggtgcccgctacgatggtaccttctccggtagtcagtatatcggcagctgtgagggcaagtctactggatccgtggatgctctgtccgaggatgaccgaagcaacattcgtcgcttcatcgaaggtcaacttgatgcttacgagaagggtactggctggctctactggacctggaagaccgaaggtgctcccgagtgggacatgcaagcgcaaatcgctggcggtgtcttccccaaccctgttactagccgtgaattccccggccagtgctgagcgctagctggtatgtgccttgattctcctcctgtttttccaatgtcgcatggagcatgctactgattttgccgtgtttttgttttcttttgtccaacttttgtccagacctgattcgtattcttttaattgtctgctgggcttgcgtataagcgagttgattcctcgcggttttatggtgtgcttaatttttaaggctcgctggttaggttgtgaaactgataattcaacggataatcgtctactctcttaaggccttcttgctggaggatagccatcttccctactagtatttagtaaactcccaacctaggaaggtacacgtggagactaccggggcaaccttgactaactttatctcaaaatgacctcgataagtaccttacatggtacctcccctttcctggagaaggctgtgttttagtaggccttctttttccttctttttcttttttgggatctcttgcctagcgagaaataaaatgaatcacaacaattccaaggttcatttctcattcgcaatgtataagaattaaggtctcatgaaagatctatttttagcaagtacaataagctccgaaaggatatctgatggattgggatatgtggctgggattctgggaatgctaaaaatggaataggtggacctggtggtcatgcaaacataacaatatgagggtgtaaaaagcatatacaatgaaacggaggcaatgcaaagtcccaatgatatcaaaatgagcaaggggtcttcttcctacctcagagcagtccaagtgctccaaacgccgcaacaacgtcagtgtcaacgttgactagccattcgtcttggaaccgctgcgccccaccacagccagcaataacctcttgcagacgatggcgcacaaagtcccgaatcatgaagcggtggattgcatccccggactgccagtcacggcgacgaatgatctcaggcgattcgacctcttgtgtggtttctggcatcgccgttgcagacccggctggtgcattccagcataccaagtaatcggcatttgggtcggtacttccgtctgctaactcggtaataagatctgtccatacacttagatatgattgcaggaaagagaggatgtaggcagggggtggcgggggtaaagacgggtcgagtggcgctccttgtagggccaagagttgggtgagggcaagtacgtgaagtttcttttggttgatactgccaatgttatcgtagtgcaaaaaccattcggtcatgatccaggtcagagattgttcttcggatgagttggtcgcggcggcgaccgatgaggctagaatggtagggctggccagcgcaaggcgcgctagcacagagtagtaatcactctcgacgacaccgaccacaggtgaggattttctatttgggccagacgtctgactcgcttcgtgggcagagtaaaggccttctagcagggaggcaaggaatgagctctccagaagggattgggaaatgacacggtaggttgcttcgctaccgccgtcgacagtctcagcgccgcgaagcaataaatcaacaaggcgaggtatcacaccgagacgttgcttggttgtggatttgagtagtgattcaaggatcaccaggagttggaagcggaaacggtcactgaggatctcctgtggcgcgaggaacacataagattcaaggatatgaatggcctgcggagtgctatcggttgctgcttcgagaatggggaacaaagacggaaggagtgatatgatctccggcgaggcaggagatggcgtagcctgaattatggcatgccagagatccagtgcttcatctagaaggtaaacaatagtttccttgaatgattaggttaagctgggtagcatgattcacacgggacttaccgagccaggttctactgagctttggatcagtggaagaatgagagagtgatatctcacagactcctgtcctagcgattggatcaaagatgacagcaaagtcaagatagcttgtttcatcaaatgttcatcaccggagctttcccacaatggtgggagtaaagagatgattcgatcggagaagggagtgatctaatattgtgagttgcacagtcgccaacgaaaatgaggcaacaacttacatgatcttccatcttgaccaccaccatacggaccgtctccaaaagccccatcttagtatccgaggattcgacttcttgaacgagagacatgagactctccaagatggtaggcgcaaacgacataaatgcttcgggtgaaaactcatatgagtcaagtacactccggagttgtcgaccggcagtaatgcggacgaccaggtcgttcaaaggatcatgcttgccgagcaaatgctggaagatctggtaaattgcgttcatgttcaggtcgcctgccttaaccgggacccattggccgagaacgagcgcgattcttctcctcagaagcttgtactctggttcctgagactggacctcaacaaccatggtatgctccaagaatgcgttgaagtccaggtgatgttcgagactggccgcagccaagccgacggcagaatacagcgagtctttcaacagcacattgtggttatcggtgcctggagtataagtgttagagccacgcacacttaatacagctcatcaataacttactcgcgaaagtatagaatacggtcaacagacgtggaatcagtaaatccttgaagtgaatcacaagatcaaggaaaagtttttccgaacatgaacggattgagaactcccaagcgtcggcgttctcttcctctcgcttctcccagtcctccggttcttcttcccactcttggaaatcgatcttgcggaacctgaagaactgagtgactagtagctccatgacattgatcacaaattcttcggtgaagagttgcgttttgacgagttgaacagattgttttcgctcctccttgtcttccggtgtctggtatttgaacgtattcgcagggttgaatgccatttttgcgcatgcacggatcaagagcaaagcccggaggccggtcttctcgggtaaagatttcccttcattttcacccccagcaccaaggctgtcatacttctcgccgagtttgacgactaatgaccaatacgacttgacaagcgagatactatctggcagcaacgcgaaagatgcggggtgtgtctttgccatttcaacatgcaatttcgacatctgcagcaaatgtttctcgatagcgcgatggattggctcgggtagattggtagacccatccacaagagaatggaatttactaaagtgcgaatgggtgagctcccagaagccctgtacttcttggctgcgactcgggtgttcaaagccagcaatgatcaggcgtcttaagaccttgagagataccaaactcaattcgagcgtctccagcaactccccttcgctggcaccaccttggtctagtatcgtcccccattggttgactttatcaacatagatgccccccagtaactggaatatctcaggcgatacagactgaagattgtgtcgcgttcgttgaattcgtgccgtagataattccttgattatttgtagcaacatgaggagagttcggggaagttggagcgggtttgctccaggttcgacggatgatcggagcgaggaaataatgaacagaatggcatcgggcctggttggaattaggatgagcaaacatacagctgcatattggcttaccagtcatgaggaaactcaaagcgcatgattttggcaatcatcagcgagttatgaagagctagtagcggtgcgggctcaacgattcctgcctcaagagcccggctcttaatgcgttccttttcttccggtttaattgcactttcataaatgttagcacgacctcatcttggcgatattcccataacatacttcggtgctgtcttccgccagtatttgtcaatgccgttcttcagttggatgatggcgaggtagcgaatttcatttggtagggagtagtcaagaaaggcattctatatattatcaaaggtgttattgagtgaagcagcaacaaacaagactgtcgactaatacctgtagaaaagagtagtacatgccctgtttctcccagtattggagctgctcggtacccgtctgaacttgctgctgagacgagcttgccgcatgtactagcgcattgagcacattttggggggtgagtgggttggtctcaccctgtacttcgacggcgaaggccatggcgaataacggtgctgatcgcgtgaaagaagacttgtaaagcctaaaggcagttatactgaggcatgcaccaaatcagaggttcattgaggtaccctgaaccactggacgttcatgaaaatgaactctgcgagagttccgaatatgtcaattgatcaacggactgacatgtctcttcggagctccagcgtaaactccccgcctccgggaaatccatattccggtcccgctgaaccctagggctggaccctagcgtttgtcccgattcagaactcctgctagggctcccgaccgtttcccttcggtggagactatgaggtgtagcctcaaaccagtttggtcggattatcaagctaccggcaacttccaagattgttctcgagtaaaaatctctgattcaccactgttcctggattcttcccctcgtgacatacctatgatgtagcatgatgcaactacaattcctaacctgaagtgaagtagtcatgatgtggatgatctagagtgatatatatataaagcgcaattcagttcaatgttcatctcactatctaccaaattatctacacatacatcaccacatacaaaacctgaaaacatcatgcctaccaccgaagaattgaagcatgtatctctcaacgccgagaaggaccttaattcataccaggccaagcagggcagcggcaagaagagtgactcaagtatgtgaagaaattggtcttagtcggtctcatttatctaataacaattcaagctgccgagtcaggtgttgacgagatggtcgagcggcgattcccccagcccacgagtgtgaagtacggccctggctcagctgcctctggtagcgaccaccgtgtgattcccgaggatgagggcggcgttcgtgatgaccgcaacaggtaagccatacacccaccgcttctctatgcgctatgaatcgttctcattgttaacataacgttctttccagactcgctaaggctggtcagttcgagggccctggcggcccggaagacaaggtctaggtcaagaaccgtcgctgaattgcccagtaaaaatgcataatacaaatgatacctgatgacctgtactataatgaaatcctttcattcatttgatgtgttcaagccccgacttatacccgaccaggttaggcctagtaatgaacctcaccaatgttaccttcccggcagggacaatggataccaatatcgacatcgccagccccgctttgcgattttgttgagatttgtagaatcgtagagaatgttcattccgatcattttctggcccctttcaaacccaagtgctggcttcacttgtgccacccgaccactcaggtgagaaactgtaggcagtcccaaggtatatcctaagcacggagtaatatccatagatatcagtagccctatatccatagtccacggtgtgtacacaactccgaaggttcatgtgggtttcctctcccacgtgctcacctgttcttttgatcacgggaccgagcacgcccctaggccaagcccagtgatttgcctgggcaccactcactaaccatccaaatctgcttatctcaagaaccctgggaaatgcaccacatgggcacgctagcgccctatagttccccacctcgcttggatctgtctcactaacggaaattacgagaaatcagcagaagtagattacattcatggatacttgctgtctacgctatgtgccaaagtgcatacatgtatgcccagctacatttatgtacagttaatagactacccgtgggctcttcaaccacctaaagctgctatcaggggagaagcacggaaagaccccggaactccgggggcccgttgccatggaatagctaagttagctaagcattcgccttggcccctcttgactcgagccctcgaacttctgagcttttcggccaatcagagggctccctttctccatgtgcctgcatcatacaacgtctactctacccagacctcatctcaacatcaggtacggctcacaaagtacctctgtgagacttgaaagaaagctgaaaggcacacacaaccacgtgtacctgttcggtataccttccttcaaagtttatctccgacgtagatgcacgtgtatcggccctgaccccgtggaccttccatacatattctggcatttctaacattcttgacgatcttttcttctttcttctctaccatcctcattctcctcggtccgcctcggtctcatctcatcagctacatcaatcttattgattttctgcgagatctatcaaaatgaaggctgtcatcgcggttttgctgggagtggctactctgacagttgctcagacagctactacctctgagcctgctctcgccgacattcaggctgccgaaaccaccaagccggaggttaccgtctccgatgtcaagggcctggcttttgatcgtttctatcaagtctggctggagaacattgtacgcgacaatgatcaattcctggagtctcaaagacaccatggctaacagcttgataggactattccgatgccgcctcagatgccaacatgcagtggctcgcttctgagggtattctcttgtatgtttccaatgttttgagccatgagtgagatgacccattctaatattttttaggaccaacttctatgctgtcacccatccctccgagcccaactactgcgctgccgctggtggtgacacgtttggaatggacaatgacgacttcaatcagattcctgccaacgtttctaccattgctgatctgcttgacaccaagagcatctcgtgggctgaataccaggagcacattccctatgctggtttccagggctacaactattccaaccaggaaacttacagcaatgactacgttcggaagcacaacccgctggtgctttacgactctgttgtgaccaacaacactcgtgcacgtgctatcaagagctttgacgactttgaaaatgatctcagtgacaagaagcttcctcagtgggccttcatcactcctaacatgaccaacgatgcccatgacaccaacatcactttcgctgccaagtgggagcgttcttgggtgagcaaactgctcactgacgagtatttcatgaacaacaccctcctcctcctgaccttcgatgaggacaagacctacaccaacgacaaccgtatcttcagcattcttgttggtggcgccattcctcaagagctcaagggtaccacggacaataccttctacacccactattcgagcattgccagtgtctccgccaactggggtcttccttctctgggtcgttgggattgcggtgccaacatcttcgagattgtcaccaacaagaccggttacgtcaactacgaggtcgacaagacttatctcacccttaaccagacctaccctggtcctatgtcaattggggacgacaccattggcaacacctccacctacactcccgtgtggcccattcccatcactgacagcaatgagaagtgttctgctggtcacggtatcctggatgccgtcaagcaaacctacggaaaactgaactcgacatacgacaccaagccgttcccctgggaagccaagactcactacaacgacaaggtcacattccagcggtcaaacgagaccacgaacgcgaccgccacgactaactcgacagcggcgagccctacccacactggcgctggatttgctgccacggctcctatctctactgtcatgctcggagccatgctggccatcgctgccttttccctctgattgagctgttccttatccattcttactagttgaccgggtgtgggtgtgggtctatgacccttgatcatctggtcccgattgactgggagggaatgttttctccaaatctaggagacgtaaaacacaatcagctatctccatctggaggctaatatcttaagctttagttatgaatccaaattcgttattatgatatttatgtcccattaaagactactagaaggaccataactcccactgcctagagactggcccctttatgtagctgatcgccttttcctgactatctaggtgtcggataccgttaaacactggatcttcttggtggagctaggtactttgcatgatcgtattgtactcaattttctatagccccgaaatgggatatccattctcaaccatgccttcggttcaaccagctatctttcacagacgtgctgtcttgatcaagatactcttagtctcaagaaaactgtcaagactatacagaagcccctcccggccactcccacttattttgaacccaccaaatgcagtatccttggcatttgtcgggcttgtgcaattaaccccaacaatacccgcatccagagccttcgccaaccgaacggcacgatcaagatctttagtaaagacagcagcgtgcaggccaaactccgaattattcgccttctcaatcgcaaacatggcaagtgggaagttccacgggataataagtgctaccacgccatatggctgcttgacggtcaggtttaggtagtccggggtgttgaggctggctgtcccctgcgcggtccaaccgccaccagcgaagtatgcaaatagctcggctgctagactggcgtcaaagaactgagagatcagtcggccagtggagagcgtttcgagcttcgccagctcgtcgtttgactccaagatgagctgagatagtttgcgcaagtatgcgccgcgcttgtcggtgcccaagtctcgccaggcggggaaagccgcattggcagcattaacggcgtcctctacatcttggatgtcggcttcttggactttggtaacagagtcggtgttagcagtatgttggcttttgcggagaaggggacacaccttgcgcaacaacctccttggttatggatataccacttcgaatgttttgccactagacgattttcgaaactagaaggttagtatgaagaagcatcattgtatatgaatagcagcctgcatagttacctcgccgttgatgaacagccgagtctcgatagattcgttcatcgtagatgccatagtggacagtgtgacagatttgacaataagtgaatcaagcataatcacgcatttagtcaggaaactaattcaacattgggcgatggttctgatttatatgcatgccagggagtccatcacctgcgccgacttcaagctttcaattggggctttcatttgaaacccaatcattagtcctcagtcccaaagccaaggacacctccgacattagttgtcatggatttcattgggcaatgtggttgaaatcgtacaaagtcatgtacaaatgacttgcatggatcaattgaaatggattatgttgactgctcagataccggtgtaacaatattagctgggcagtgaagtatcaagttatatgagcaactaaccgacctcggaccacttgagtccatgataagctcttgtcatggatgccttgatgagattcagtgactgggcagggtatctccgaggaccttctgagcccaccacaaagcttttcaatataacgttgtacctcggcagttacacgttagaatcatgcttgtatcactcagaatgtatacacttcttcactactcacaattggcaaaacagcattggaaatgcaaaagtcacgtggtatacctcggctcttccgtctggggaaccgagcgcggtcgatgagctacgccgggacccatttccccgtgctctcacgaatccccaaccagctccctcctatcatccacaaacacgtcatgatttcgcgatgagttcaacaaacttcgccgctgcacaagaacgagttcttcaacgtcgtcgccagcgtgaggcggaagcgcgcgtccgctatgcagcacagcagcgggcctctccgatcagcccggccaccgtccagcgtctgccatatccattgaatcgattacccggttcggggtggcggatatggaattccatcaagggccgggaaggcacgcgccccgcatttcgagtgggccaggtggacgctgaattgttggatgaggagttgcttgggctgctgaagggccaggtcggggatgctctcaaatacttcggggtatgtctgaatgaggctctggggtgttgtgagaaaaagtagctgacaccgacaatagcctcaaatgcgcgaagattggtcacatgagattctgttcgcgttacgggccatgctctttaaactatcaatatgggatcataacgcatcgtatggtgcggcactacaaggcctcaaatacaccgatagtcgaagcaaaggacccgttttctcttctccgacaaaatggcagaagggtatttatggcttattgacggttggagggcgatatgcttgggacaagtgggagagctggttggtcggacaagaaggtggctatgacgaggttagtgccgacacattgctctctattggcaatgctttactaacagatactacaaagccatcaccggacatccgaatgctgtcgcgactaacagacatgatctcgacatcgcactcgattgctgccttcgtctctttcctggtattcctagtgaatggccgataccgtaccttggtcgatcgcatccttcgaatccgccttactccaccgtctgcgcaggctagccgggaagtatcctttgagtatttaaaccgtcaactagtttggcatgcttttaccgaattccttcttttcctccttcctcttgttggaattggccgctggcggcgatggatatcccgggtctggaaaaagatggtcaattctgtccggtcaagcggcgatgacgacgagacccccgaaaaacaaggagagctggccttcctcccagagcgaacctgtgctatctgctactacgatcagaaccccaccacaacgaccgaaagcgataccatagccgcctctgcgtcagggggtattgtaggatcggcgcaaactgatatcacaaacccatatgagaccgtcccttgcggctgtatctattgtttcgtctgtattgtgcagaaactggaagcggaagaaggccagggatggtcttgcctccggtgtggtgaaattgtcaagaagtgccaaccttggaatggcgatgtgctagaagaggcacggtcgcagcctggaactgggaagattgttggctttgccattgacggtgaactgaatggcgagacccgtgggacagatcttcatcaagggggctcatcaaataagtctagcccattgcaagagatcagtgccgatgaagccctgcagcattcagagcaatggtccaccattgagaaagagacagaagatgatggcagaagaggtacgaacgaggatgagggcccaaaccctgctgcgatgtgacagtactcttaaggcacacgcctcacaccccgggtgctcttgggggtatgtaatggccttctcttctccgacttgtttataaatatacaattacctgggtagtcgcagcgcatatgcccttataaaatttaacgatacccatactcgaagaccgaagtttcctttcacataatcatacaagggattcatttaacaaatagcggagaatttcaatacggcacagcttcacaacttctggcattcccctttaaggaatcatccagctagagacagcagtatagaacccaatgccagctccaatgagtggaaacacagctctgatcaaattcaactgcgaccaatgctgcagaagttcaaccacctcgccatcctccctagcccgcttcgccttctcttgtggactaactaccatgccctcggtaccctcagcgtcagccgcatcatcgcgctttgcatgagccttcagcttggtatttgtctttctcataactgtaagagtaaaaggcgtaatgctcatcgtaaacccgatagcaagcatatagcacgtggaccagctggacccaaagatatccggcgcaggggtagcggagtcccgcaatgcccagagcgcatacaggtttgcaagtgaagataccgcggatataccggggaaaatcttgcttccacgagtatatatatcgagccactggtgtgtcaaatggccgggcgaggttcctggggtatcatggaatggcagggtcgcgctgggtgggcgacgggctggaattatgagattggggatgcttattatggataatgaagcaatgccgccttgtacactatgagtgtctggtcatctgttgcgtaggcagtgctacttacctgctcccactgcagagccaagcgtccctattgcctgggcaattctcacgtcggtggccattatacggctaatgttgtgctcaggaagtattgcaataagagagttcggtcaaaggagcagaatgctgcttttatgctgatagcatatgtatgacgtctacgaagggggaagtgacatgcctgattctcatggtatacctcaattaggcctcccttctatattatcttcaaccgcctttactattgacgctagatcatgaacagagagaatagatatctagtattgggtgaagatagaacatggggttagcttcattttgcctgcctatctaaatcagacatctaccctgaaaatcaggcatccaacttttggcccttcgcgttggtgccatggatgatgtggcgagttgcgacgatccctccattgtaaataaactagatatttcaacctgaaccattgatatacaaactcataatgccatatgtatacaacctcattagatccggagactaggcccaactccgatctgctcataaatcggccgcatctgactggacaacgaacgtggggtcctgggtgtcggacatcggtgcgaaaatcgagctcccgaggttgtctgggctataattctggtcaattgcatctccaatctctttctggtttcgttatcatatagctatcatatatcatcatggatccctcaaagtcaaccgtgcctagcactctcagtgaggctaaatacatcaactttccttctttgcccacagatgcgaagcatccggatggctcccccgcactcaatcgttactcccacactattaccaaaggccatgatttccccggcgcacgggtaggttggctataagaacactgcaggatctattactgaccgctataggctatgctctatgccgccggtgtcccagataaagaagcgatggcgaagagcccacatgtcggtatcgcctcagtatggtgggaaggaaacccatgcaacatgcatttgatggatttggccaagaccgtcaagaagtcagttctggaacaaggaatgcttgggtggcagtacaacacgattggtgtttcggatgcaattaccatgggcagtgaaggttggtttgatcctcaactctcatctctagcaaacgagatagctaacaccccgctaggaatgagattctctcttcagactcgagaaatcattgccgatagtgttgagactgtaacctgtgcccaatatcacgatgcctgcattgctatcccgggctgcgacaagaacatgcccggtgtcgtaatgggtatggcgcgccataaccggccctcaattatgatctacggtggaactattggaatcggctattctgagcacctgcggaaacccatcaatgtctcaacgtgcttcgaggctgctggtgcctacgcctatggtaccctgcgccaacccgacgatggtggtgaccaaaccaagtctcaggatgagatcatggatgacttagaacggcatgcttgccctggcgctggcgcctgcggtggtatgttcacggccaacactatggccactgctattgagtcaatgggtctgtcattacccggctcatcgtccacgcctgctgaatcgccatccaagatgcgcgagtgtgttcgtgccgcggatgctatcaaggtttgcttggagaagaatattcgaccacgggacctactaaccaagcggtcctttgaaaatgctctcgtaatgactatggcgctgggcggcagcactaacggtgttcttcacttcctggccatggctcggacagctggtgttaacttgaccctggatgacatccagcgggtcagcaacaagatcccctttattgccaacctctcacccagtggaaagtattatatggccgacttgtatgagatcggaggtgtcccatctgtccagaagctgttgatcgcggccggtctacttgatggagatatccccacagtgacgggcaagacgttggccgagaacgttgcctcattcccttctctgaccgagggccaggatctgattcgcccattggacaacccaatcaaggcgagcggtcacctgcagatcttacgtggtaaccttgcaccaggcggtgccgtcgccaagattaccggcaaggaagggctccggttcgttggcaaagcccgtgttttcgataaggagcaccggctcaacgacgccctgaatgagggccgcatcccgcgcggtgaaaaccttgtcttaatcgtgcgttatgagggccccaagggtgggcccggaatgccggaacaattgaaggccagtgccgcgctgatgggagcaaagttgaccaacgtggcgcttattactgacggccggtattcgggtgccagccacggtttcattgtcggccacattgtgcccgaagccgccgttgggggcccaattgcactcatccgcgatggagatgtcgtcaccatcgacgctgagaccaactcgctttcaatggatgtctcggatgaggagcttcaggagagacggcgtcagtggacccctccttcaccgcaaatcactcgcggtgtgttggccaagtatgcacgattggtcagtgatgcatcacagggagccatgacggatctgttctaatgaatcattatgatatgtcacctgagtgtaaatatagcatatttctaggctgttgaaatgatgttatgatctacgtgttctagaaaatttagaaaagggataaacacgacatgatcttcgtggcccgcttgaaattggccagtggtatgtaagaagccacgcatgctggctcgggaggtactataaaatggagtccaacacggagtagggagtagttaccaacatcttgggaaccaaagtgtacataatacattgtagggggcaatacgagagagcaagtggttatacatagaaaaagaagactaaattatactaagatctaacactaatgtacaaatcatctcgaatgttcaatttttcaaaaggtacttcttctcccatagtaattgccataatcaagcaagttccttccaaaacttgtggctgcaatacacaggttggaggggccaatggatgacgatgactcacccccacgccgctcctcccgaggctgtgagtggctgaagctgaaccctccgtgcattttcttatcctcgcaactcatttcaacgttgtcgacctagctatcctcattggtctctagcctacttgctctatatccaaagagcatcaggagcgccatcgcgtggttcttggcgagatcactatcggggggctctgaaagcgcccagcacgcccctccggtacttaatcatgggatccgacgctatctccgccctatatgactcgttaacgtctcaatctgaacctcgaagtgtcgcgactgttctgcgattctttcactcagtgcgcgctaccgcccaaaacgcttcattcgcctctatcgccaactatttccgcggcctctaccgcaatgaaaatgtgaattggggtcgggttgtgttcttgactacctgtgtgatcgctatgactggatgtgggttgttgtcgctggtgagacgcaagcggtcggggaagaaaagctctcgtgcgcaacgtcccgccgctcgcaagacgtcgaccaaatcctcgaagactctgagctcctcggaggaggaggattatgaagatgaagactacgacagtaatgcatcgctgcgacatggaaccaaccccaactataagacggaagattggtcgtctgacagtcagcagcaaagctctgatggtaggtgaatagctcatcttcaccgggggccttcattaacacttgcgcagcctacgaaacggacccgggcattctcaggaaattcaccacatataactcctacactacctcattcgccacttatcccgccattcgcaccttttacagcccgcatccacacctagctcgactcccgaccaaaccgactcctgttccactgatcgtggttgttcatgggctaggcgggtccctcgcacaattccaccacctcctaaccagtctgtctaatgttgcttcatgctttggtattgatttacccgggtgtggattgtccaagtttgcgcctacggattgggatgcatacaccgtggaggctctggctgaactgttagctgaagccattgatcagcacagggaccgtgcgtctggccaggaagtcattctagtgggacacagtcttgggtgttccttgtcagccctcttggcttcatcaacgtcgcccattggcgcaaaagtgaaagagcgtatcattgcccttgttgctatgtgccctcgagccgagcctccatctgcggaagacactgccaaatttcgccgactactttatgttcctggtccaattttcgatctttggcgccgctgggacagacgtggaggcgaacaaagtgcaagtgttatgcggatggtcggcatcgctgccgacgcggaaacacgaaatctccaggtgcgcttcaacaagcaaagtcggacgcctgtttggcgacgcatggcgtggggtacacttcccacctacgataatggtggccacccgattggcgggctccctggtcaacaggtctgggcggggattcgcatgccagttctattggtcgcgggagagacggatgctgtgaccaaaccggtggaggtgcagaagcttttgaaattctttggcgatgcttcagcccatattgcaattgacactagcgatagcagcatcatcccagacgcttcgcgagtccacgaccagatgtcacctccagtcggcgatctcgtcagtgggaaggcgtttggtgtgcaggtctccgaaaagcatttggacggtgcccagcggaagcgagtggtcaaatcagcgattttgccggcgcccgcatctcacgcactgctctacgaccgggcgacctatcgcactcttgcaggaattatccaggatttcctctcgtcaaatgtcgacaagcgtctcggtctgggctggcaattgcaacacatgaacacctctggaaagtgggatgtcaagaacctcgccaaatggaagaaggttgtcccagtctcggaacgaatcgccaacacatttgtcgcgctcaagatgttgcgcgaggttgacgaggaacacaatcctgtgactttcgcggcaaagtatcatggtcgcatacacgctgtcatagacatcagtcatgaaagtccagtctataacccagccgaactggaggcgggtgggattcgctattacaagcacccgactatatccaagattcctccgactccagacgagacgcgtgactttattgctctggtcaataacattgaaaaggatattgatgcgaagatggagcagcgtacggaggaagagaaggctctgccacgcccagtggtcggagttcactgccactatggctataaccgtacggggttcatgatcgcctgctatctgatcgagcatcttggttttggtgtacaagatgccattgacgagttcaaccggtgccgaccccctggtatccgacatggtcattttattgacactctatttgtgagatattgcgttggactgaagagagcgcccacgctgtaattgggaatgattcaggcattgaactgagacgaatactatggatcaaggcaacaggaatggttgttggaagttacgaataatgacaactgcgatgaaatagatttttagttggtgtataattagaacatgagaaattgagctcttcaaataatctttcatcacgaattgtatgtgtcttgtagttatgttgtatgtcatgtgaataattaatgtccggaaaatcaggcacgaaggtgtctgatttagagcccgatccgtcaggcacaaattgggctacatcacatgacccagcttagggtacggctaacccaaaatggacaagcgaacggcacacagacccaacccgcccagagttgtgtgtgtcttgaaattttgagcgactcttcgacttcgaccctgcccacctcgacgcccaacgcctctctctctctaatccctacccttcgacccctcgacaagtcgccaaaatgggtggtgttaccgttcgcgatgtggacgtaagtgtcctgctcgatttttaggtcaccagctctggtttgcatgatgtggacggttcgtttctggatgcacggatatcacaacatcggtcgggttatatcgccaggatggaaatagttcgggttgcgcacgcaataggcatatggtttcattgcttatagggaatatgtcgaaaattgagggatgtgcatgcatgttatgagcggcgaatatttgatagatccgtctatctgtcggtattcctcagggatacttgacacaacgactgcttactagcgaaaagctccccacgacgaatgatgaaatgcttccagaaacgaatccgacgcatctgcaaatccacagaacttgaccgatccacgcatatcttgagccacaactaacataacttttctcctccacacaggcgcagaagttcatctctgcctactctgctttcctgaagcgtcagggaaagctccccatccccggatgggttgacactgtcaagacctctgcttccaacgagctccctccccaggatgctgactggtacgactgcaccaaatatcaagccaacaaaattcgaacaaacaattgacattcttgctttcttaaaggttctacatccgcgctgccgcctgtgcccgtcacgtctacatgcgcaagaccgtcggtgtcggccgtcttcgcaaggcccacggttccaccaagaaccgtggctcccgccccgcccaccacgtcgatgcctccggctccgtcgaccgcaaggccctccaggctcttgagaagatcggtgtcctcgagatcgatgaggacaaaggtggccgccgcatcacccagagtggccagcgtgatttggaccgtatcgccaagaccaccgtcgatgaggaggaggagtcggatgaggaataaacgtatcgcaacgatgggcttttaatagttcggggataagtcgtttgtttttgtggttttgtcttcgctacggcggcaagatattggaaatgacggcacaaaaataaaaattcggagcttgcggtcccgtgcgcgactttacgtttgtttcttttttcttgttccactccatatttttttttctgacgaccagacggggctactagcggagagagatatgggcggtgcagagtgcatgaggatgaggcatcatatccggagacttgaacgagagaagagagcggacgagacgttctacacaatccttcccctctctctcttgttgagaggaggggatcttttttccccgacatgttttatgatctccctctcctctttgaccccgatcaaccctacggcgtctttgtcccttttttctctcgtggtctcctggaaataaagagcatgtctaaacactttaaaactgttccgtcctctctctctgttgtagatgtagatgtagacgtcttgtatcatttagccagcagatcttcagcattccatatctatggatcggttctcaaaagcccaatttatatccaaccattgctattggttttatgcaactctcgttcttacatatgtacaagacaagtcttaagttagctcgcattccaatctacttcatttctttcccgactgtgccgcggtatcctgaagacaatcaatcagcaccacatacaccaccttacagctagcacaaggatgtactcaccaaataaacctgataaaactgcatcttgatatcttcatcccccttctggggcgcgaacacaacccgtccagcccaaggcacataaacctcattatcagggttagccttgagtctatagttcacgccaccatacaacatgagctcattgtcaccaccgaagtagatctgcgtcggcgtgtgtcggcgtgaagcaacgtgtgtccaaagaccgtggcggagggtgagaattgctacaggattggtcttgttagccgggatacaacattgggcagatgtatattttgcatcgaagtggaaaccgggatcagaagctgtatagcttccccgatgttgagggcggggattggataacaccataccgcttgcacccttggcctccttgggtcccatgatgagtgtcgcatcttcggtgaagctctggacatatttctcgtgcagggactcggtgtcgctagtgcggtagaagtcttccatgaatgcgacgaacgcggcgccgcggggtggtgcccgggcagtgtcgtaggcgatttggtaagacattatggatttgtcagttagggagaaatatttgcaagttgagaagaataatgagagatcccgcagaatatgtctattctatcatgaggggaaagtatcggaagggacgcatcctgtggcaagtaagcttggtggggaagatgatgatattatgaaccccttgttgggggtgctaactagctaactatgactaagctgtgacaatatgccgggtctcaaaaaatctcggcctccggctgagaaaaaaaggaaatttcaataaaaaataagaataaaaaatgataagaaaacgaaaaacgccgtcagttgtcgcaggcccggggcggagtatagatgtccgagggcgtgaattcacgcccggggtcgtacggtggcccctcggtggccacttcgagaggagcttcgcagtggttgccacgttctttatcgcctagtagtaacgggctctctagttgggcttggttgttaggagcagcgctttattaaagttggcaggggcggtggaacaggttttcccagcgtctgatggctcggcgctgaatatccgggaaactgctgagcgtgttcgagattgtcataagggtgccagcggcaacggcttcggtcttctcggtcagagcggcctcttggagttacagctggcgatatctagccatgtgttcgcgtaacctttttaaatcctcgatctctggctgtacccggtccatatgctccattatgcctttatagggaaggatgaaatcgcggaggatcttttcctcggtatcagctcggcacagttggctttgcacggctggcaattggctctgaggttcaggaatgtccggtgaagagaacggagcggaagagctgacgctgatcgcgtcgccaggttggtcctgcgtggtgggctggcattcttgctgagtaccgtgactagaccaagttggacgatttgtattctggtatgagcgttgaactgggtccatgatcttcatctttttcaggtccattcgggagaaagtaaaagacagcacttcagccgagcatgaaggagaccacgtggagaattcccagaaaaaaccataggagggtcttagtccttgtaggagcatagcgacgtggtggtgattgtctgagccgatgtccagcatctttgagttcgtttcagctttccagagcgtggtatactgaccgtggtggttatgcaattggcgtaccacagaacgggggtacggaaattcggcttgttcttcagcgtggcgggcttggaataccgctgctgggtcagtaactgcatcctctgcgaaaggataacctaggacgataggtccgattgtgaaaaccgggttttcgattttaagctttgaatctgccttcgggaccatcaggtagccgtattttgcggctgcacgaaggccaacgaacgcatagtaacgtttccagattggcgcgcatgggagaccatggaagtcgattcgtgggccggggtcctgtggtatcctgctagcacgtggttcaccgttggcgtcccagacggcacggaactcggcgcgcttcttctgagacagttccttcatcgctgcgtaaacaagctcgtcgcttagcagaacgttgcggtcgtcaggtagcaccagccttccttttgggtcgcgctcgtatctcacgtataagggcaaccgagcgatgtcttgtggagatagtctactgcctgtgataactgggacccagtcactggtccagattggcctatccagttccagttcagtgcgagcggcatcacgagattgtgtcatgcaggaatcgtcgaacgcgcatcccggaaggcaaagcatatcagtcgctccctgcgacggaccaaggcacgggagtgcctttcttttcggcataatgagtctggtgtgtaagaaagagaatggttaatgtgaaaaaagaagcaatggaggtaggaaaaatggaacaggtacgtcgagcagcaagtaacagtcgaatgagagtcagaaactcaaatcggagtaaaagtaggagtcggaagtaagagtcaagtgacgtgaggtagtgagaatggatagtaataaaagtaaaaggaaagtaaaaataaagcgaggaaaacgtggtacttaggagctcgccgggggtacgccctgacgctcctcgaagtctttgatagcctcgtcacatccgatgcagtcctcttcccgcacccaacagtcgtccctagctgattggcctttccagcggatcagatacttagtgatttgacgcctagtaccgtcgtgacggggtcgaccaggcgcgttgacgacgcgcttggcaagaatgcggtcgacctcgtagacgatatcttcggggaaacgctcgtctgtagtcgggtggtgttcgtcatctggttggcgctcccaggggtcgtcaccgtccggggcgggttctaggtgtgcgacactgatgactgggtggattcttgactcagttggaatattcaaacgataagcaagcttcccgacgcgttcgagtacttcgaaacgcccgacgtaacgctgtcgtagtcgccttggtaaaacttggttcaacggtgtgtcgtatccgtgtcccagcttaagatagactttgtcaccgacattgaaaaaaatctgcctgtgatagcggtcgtattggcgtttcatacgcatggcagcccaagcggcagaatgctcggcatctgcacgcgcggcgatgtcgggagctgtggcttggcgtaaaagcgaccaagggtggcgtagttcgacaccgtataagagtttgtgaggtgagtgacctgtcgttacgctgactgagctgtttagcgcagcttggagggcgggtaataggtttggccaatcttcgtcggggtgagtggcgattgcgtgccgtacagcaacttcggctgtctggttagtacgttccgactgaccgtcagtttgtgggtgataggcggtagtaaaaaacaacttggtgtagatgaggtcgaaaagtgctttccagaggccctgcgtgaacttggggtcgcgatcgctgataatcactgtaggaatcccccaattggctgtccaccagaaagagagagcacccagcgcccaatcttcaccgtcccagtctgcgcagccaggtatcattcccatcaacttggtgaacttgtcggtcatagtcatggccgcgtcatatccgtcggtcgaaatgggcatcgcgacgattagatctaaagtgatagtgtgaaagggtatcggcagggcgatgatcggttggagagaaccgtacgggcgatgacggcggatcctgtgctccaaacagatagggcaatgttcaatgtactgctttaggagcttggcgcctttgtagaatgtgataccgcgaagcttatgccaagctctgtcgaaaccctggtgcatctgctcgtcatgaaccaagttgaaaatttcctgagtcatggatcggggcagacacagactctcctcgccgttagaatttgtgaaaatgatcaagccattctccaggtggtagggtaacttctcaacttggggatcctgctgggcgtcaacgctttctagagtgtcgatcagggctgaccagcgagtgtctgactggtatcctcgcaagatgcgatccttagtgtcgtcgcttagctggagcaccgatgctgtaaggaggtacgctgtgggttggtctgctgtaggttgtttaaatannnnnnnnnnnnnnnnnnnnnnnnnnnnnnnnnnnnnnnnnnnnnnnnnnnnnnnnnnnnnnnnnnnnnnnnnnnnnnnnnnnnnnnnnnnnnnnnnnnnnnnnnnnnnnnnnnnnnnnnnnnnnnnnnnnnnnnnnnnnnnnnnnnnnnnnnnnnnnnnnnnnnnnnnnnnnnnnnnnnnnnnnnnnnnnnnnnnnnnnnnnnnnnnnnnnnnnnnnnnnnnnnnnnnnnnnnnnnnnnnnnnnnnnnnnnnnnnnnnnnnnnnnnnnnnnnnnnnnnnnnnnnnnnnnnnnnnnnnnnnnnnnnnnnnnnnnnnnnnnnnnnnnnnnnnnnnnnnnnnnnnnnnnnnnnnnnnnnnnnnnnnnnnnnnnnnnnnnnnnnnnnnnnnnnnnnnnnnnnnnnnnnnnnnnnnnnnnnnnnnnnnnnnnnnnnnnnnnnnnnnnnnnnnnnnnnnnnnnnnnnnnnnnnnnnnnnnnnnnnnnnnnnnnnnnnnnnnnnnnnnnnnnnnnnnnnnnnnnnnnnnnnnnnnnnnnnnnnnnnnnnnnnnnnnnnnnnnnnnnnnnnnnnnnnnnnnnnnnnnnnnnnnnnnnnnnnnnnnnnnnnnnnnnnnnnnnnnnnnnnnnnnnnnnnnnnnnnnnnnnnnnnnnnnnnnnnnnnnnnnnnnnnnnnnnnnnnnnnnnnnnnnnnnnnnnnnnnnnnnnnnnnnnnnnnnnnnnnnnnnnnnnnnnnnnnnnnnnnnnnnnnnnnnnnnnnnnnnnnnnnnnnnnnnnnnnnnnnnnnnnnnnnnnnnnnnnnnnnnnnnnnnnnnnnnnnnnnnnnnnnnnnnnnnnnnnnnnnnnnnnnnnnnnnnnnnnnnnnnnnnnnnnnnnnnnnnnnnnnnnnnnnnnnnnnnnnnnnnnnnnnnnnnnnnnnnnnnnnnnnnnnnnnnnnnnnnnnnnnnnnnnnnnnnnnnnnnnnnnnnnnnnnnnnnnnnnnnnnnnnnnnnnnnnnnnnnnnnnnnnnnnnnnnnnnnnnnnnnnnnnnnnnnnnnnnnnnnnnnnnnnnnnnnnnnnnnnnnnnnnnnnnnnnnnnnnnnnnnnnnnnnnnnnnnnnnnnnnnnnnnnnnnnnnnnnnnnnnnnnnnnnnnnnnnnnnnnnnnnnnnnnnnnnnnnnnnnnnnnnnnnnnnnnnnnnnnnnnnnnnnnnnnnnnnnnnnnnnnnnnnnnnnnnnnnnnnnnnnnnnnnnnnnnnnnnnnnnnnnnnnnnnnnnnnnnnnnnnnnnnnnnnnnnnnnnnnnnnnnnnnnnnnnnnnnnnnnnnnnnnnnnnnnnnnnnnnnnnnnnnnnnnnnnnnnnnnnnnnnnnnnnnnnnnnnnnnnnnnnnnnnnnnnnnnnnnnnnnnnnnnnnnnnnnnnnnnnnnnnnnnnnnnnnnnnnnnnnnnnnnnnnnnnnnnnnnnnnnnnnnnnnnnnnnnnnnnnnnnnnnnnnnnnnnnnnnnnnnnnnnnnnnnnnnnnnnnnnnnnnnnnnnnnnnnnnnnnnnnnnnnnnnnnnnnnnnnnnnnnnnnnnnnnnnnnnnnnnnnnnnnnnnnnnnnnnnnnnnnnnnnnnnnnnnnnnnnnnnnnnnnnnnnnnnnnnnnnnnnnnnnnnnnnnnnnnnnnnnnnnnnnnnnnnnnnnnnnnnnnnnnnnnnnnnnnnnnnnnnnnnnnnnnnnnnnnnnnnnnnnnnnnnnnnnnnnnnnnnnnnnnnnnnnnnnnnnnnnnnnnnnnnnnnnnnnnnnnnnnnnnnnnnnnnnnnnnnnnnnnnnnnnnnnnnnnnnnnnnnnnnnnnnnnnnnnnnnnnnnnnnnnnnnnnnnnnnnnnnnnnnnnnnnnnnnnnnnnnnnnnnnnnnnnnnnnnnnnnnnnnnnnnnnnnnnnnnnnnnnnnnnnnnnnnnnnnnnnnnnnnnnnnnnnnnnnnnnnnnnnnnnnnnnnnnnnnnnnnnnnnnnnnnnnnnnnnnnnnnnnnnnnnnnnnnnnnnnnnnnnnnnnnnnnnnnnnnnnnnnnnnnnnnnnnnnnnnnnnnnnnnnnnnnnnnnnnnnnnnnnnnnnnnnnnnnnnnnnnnnnnnnnnnnnnnnnnnnnnnnnnnnnnnnnnnnnnnnnnnnnnnnnnnnnnnnnnnnnnnnnnnnnnnnnnnnnnnnnnnnnnnnnnnnnnnnnnnnnnnnnnnnnnnnnnnnnnnnnnnnnnnnnnnnnnnnnnnnnnnnnnnnnnnnnnnnnnnnnnnnnnnnnnnnnnnnnnnnnnnnnnnnnnnnnnnnnnnnnnnnnnnnnnnnnnnnnnnnnnnnnnnnnnnnnnnnnnnnnnnnnnnnnnnnnnnnnnnnnnnnnnnnnnnnnnnnnnnnnnnnnnnnnnnnnnnnnnnnnnnnnnnnnnnnnnnnnnnnnnnnnnnnnnnnnnnnnnnnnnnnnnnnnnnnnnnnnnnnnnnnnnnnnnnnnnnnnnnnnnnnnnnnnnnnnnnnnnnnnnnnnnnnnnnnnnnnnnnnnnnnnnnnnnnnnnnnnnnnnnnnnnnnnnnnnnnnnnnnnnnnnnnnnnnnnnnnnnnnnnnnnnnnnnnnnnnnnnnnnnnnnnnnnnnnnnnnnnnnnnnnnnnnnnnnnnnnnnnnnnnnnnnnnnnnnnnnnnnnnnnnnnnnnnnnnnnnnnnnnnnnnnnnnnnnnnnnnnnnnnnnnnnnnnnnnnnnnnnnnnnnnnnnnnnnnnnnnnnnnnnnnnnnnnnnnnnnnnnnnnnnnnnnnnnnnnnnnnnnnnnnnnnnnnnnnnnnnnnnnnnnnnnnnnnnnnnnnnnnnnnnnnnnnnnnnnnnnnnnnnnnnnnnnnnnnnnnnnnnnnnnnnnnnnnnnnnnnnnnnnnnnnnnnnnnnnnnnnnnnnnnnnnnnnnnnnnnnnnnnnnnnnnnnnnnnnnnnnnnnnnnnnnnnnnnnnnnnnnnnnnnnnnnnnnnnnnnnnnnnnnnnnnnnnnnnnnnnnnnnnnnnnnnnnnnnnnnnnnnnnnnnnnnnnnnnnnnnnnnnnnnnnnnnnnnnnnnnnnnnnnnnnnnnnnnnnnnnnnnnnnnnnnnnnnnnnnnnnnnnnnnnnnnnnnnnnnnnnnnnnnnnnnnnnnnnnnnnnnnnnnnnnnnnnnnnnnnnnnnnnnnnnnnnnnnnnnnnnnnnnnnnnnnnnnnnnnnnnnnnnnnnnnnnnnnnnnnnnnnnnnnnnnnnnnnnnnnnnnnnnnnnnnnnnnnnnnnnnnnnnnnnnnnnnnnnnnnnnnnnnnnnnnnnnnnnnnnnnnnnnnnnnnnnnnnnnnnnnnnnnnnnnnnnnnnnnnnnnnnnnnnnnnnnnnnnnnnnnnnnnnnnnnnnnnnnnnnnnnnnnnnnnnnnnnnnnnnnnnnnnnnnnnnnnnnnnnnnnnnnnnnnnnnnnnnnnnnnnnnnnnnnnnnnnnnnnnnnnnnnnnnnnnnnnnnnnnnnnnnnnnnnnnnnnnnnnnnnnnnnnnnnnnnnnnnnnnnnnnnnnnnnnnnnnnnnnnnnnnnnnnnnnnnnnnnnnnnnnnnnnnnnnnnnnnnnnnnnnnnnnnnnnnnnnnnnnnnnnnnnnnnnnnnnnnnnnnnnnnnnnnnnnnnnnnnnnnnnnnnnnnnnnnnnnnnnnnnnnnnnnnnnnnnnnnnnnnnnnnnnnnnnnnnnnnnnnnnnnnnnnnnnnnnnnnnnnnnnnnnnnnnnnnnnnnnnnnnnnnnnnnnnnnnnnnnnnnnnnnnnnnnnnnnnnnnnnnnnnnnnnnnnnnnnnnnnnnnnnnnnnnnnnnnnnnnnnnnnnnnnnnnnnnnnnnnnnnnnnnnnnnnnnnnnnnnnnnnnnnnnnnnnnnnnnnnnnnnnnnnnnnnnnnnnnnnnnnnnnnnnnnnnnnnnnnnnnnnnnnnnnnnnnnnnnnnnnnnnnnnnnnnnnnnnnnnnnnnnnnnnnnnnnnnnnnnnnnnnnnnnnnnnnnnnnnnnnnnnnnnnnnnnnnnnnnnnnnnnnnnnnnnnnnnnnnnnnnnnnnnnnnnnnnnnnnnnnnnnnnnnnnnnnnnnnnnnnnnnnnnnnnnnnnnnnnnnnnnnnnnnnnnnnnnnnnnnnnnnnnnnnnnnnnnnnnnnnnnnnnnnnnnnnnnnnnnnnnnnnnnnnnnnnnnnnnnnnnnnnnnnnnnnnnnnnnnnnnnnnnnnnnnnnnnnnnnnnnnnnnnnnnnnnnnnnnnnnnnnnnnnnnnnnnnnnnnnnnnnnnnnnnnnnnnnnnnnnnnnnnnnnnnnnnnnnnnnnnnnnnnnnnnnnnnnnnnnnnnnnnnnnnnnnnnnnnnnnnnnnnnnnnnnnnnnnnnnnnnnnnnnnnnnnnnnnnnnnnnnnnnnnnnnnnnnnnnnnnnnnnnnnnnnnnnnnnnnnnnnnnnnnnnnnnnnnnnnnnnnnnnnnnnnnnnnnnnnnnnnnnnnnnnnnnnnnnnnnnnnnnnnnnnnnnnnnnnnnnnnnnnnnnnnnnnnnnnnnnnnnnnnnnnnnnnnnnnnnnnnnnnnnnnnnnnnnnnnnnnnnnnnnnnnnnnnnnnnnnnnnnnnnnnnnnnnnnnnnnnnnnnnnnnnnnnnnnnnnnnnnnnnnnnnnnnnnnnnnnnnnnnnnnnnnnnnnnnnnnnnnnnnnnnnnnnnnnnnnnnnnnnnnnnnnnnnnnnnnnnnnnnnnnnnnnnnnnnnnnnnnnnnnnnnnnnnnnnnnnnnnnnnnnnnnnnnnnnnnnnnnnnnnnnnnnnnnnnnnnnnnnnnnnnnnnnnnnnnnnnnnnnnnnnnnnnnnnnnnnnnnnnnnnnnnnnnnnnnnnnnnnnnnnnnnnnnnnnnnnnnnnnnnnnnnnnnnnnnnnnnnnnnnnnnnnnnnnnnnnnnnnnnnnnnnnnnnnnnnnnnnnnnnnnnnnnnnnnnnnnnnnnnnnnnnnnnnnnnnnnnnnnnnnnnnnnnnnnnnnnnnnnnnnnnnnnnnnnnnnnnnnnnnnnnnnnnnnnnnnnnnnnnnnnnnnnnnnnnnnnnnnnnnnnnnnnnnnnnnnnnnnnnnnnnnnnnnnnnnnnnnnnnnnnnnnnnnnnnnnnnnnnnnnnnnnnnnnnnnnnnnnnnnnnnngatcctgtactctaaatagatagggcaatgttcaatgtactgctttaggagcttggcgcctttgtagaatgtgataccgcgaagcttatgccaagctctgtcgaaaccctggtgcatctgctcgtcatgaaccaagttgaaaatttcctgagtcatggatcggggcagacacagactctcctcgccgttagaatttgtgaaaatgatcaagccattctccaggtggtagggtaacttcttaacttggggatcctgctgggcgtcaacgctttctagagtgtcgattagggctgaccagcgagtgtctgactggtatcctcgtaagatgcgatccttagtgtcgtcgcttagctggagcaccgatgctgtaaggaggtacgctgtgggttggtctgctgtaggttgttcaaacacatacggcgctgggatatcctcgagatcgtcttgcgtgccggggactgacgggtccgtacatggcaggcgggaaagagcgtcagcgatcttattagtttttcctggtctatggaagacgcgtaggcgaaactgttggatgaactgggacgcacggactaggcgaagattttggcgttctaaagaaatagaactcaagtttgtcgctttagcaatacccacagtgctactatggtcggtgtataccacagccggaaggtcgctaggacaggcctctaccaagtggcgcaccttgcggagggtccagcagagggcggaaacctcgagctcagtgggccagtaattcttctccgcgtctgtaagaagtcggctgaggaacatgatcggctggatctctgtagcagggggtggttttgaaacgtccttatgagtgaacgtcgtcttcgtatgatagattgtggcaccgtgccctgtttcctttgaaccgtcggtatcgatgtagagctggcgtgtgggatcatggtgtgctagccatttaggttcgtggaactcggcctggagtagacgaaaactctcgagctcagcttgggagggttcattgagaatggcttgcgcgctccacgctcggcgctgggggcctttgatcgggctccctttcagcaagtttgtcttgcggacttggagtggttccgatttctgtgcgtagcttttgatataatggcgaagatcacccgtcattccaaggtatgtttccagctgcttacatgtgcgcggaaaaaccagtgaggttatcgcctttaccttctcggcggttgttgacatgcctgcggagtcaatgtccttgcctagcagggtcaaacttggaaacccaatacgcgctttcttcgggtccagagtgatattgaattcctccagttttgcgaacagtaggtggagtttagcaacatgctcgtcaagcgtatcgccgaccgcgaagatatcatcgacgtaggttcgacaccattctcgaaacgcgcggagtatattgtccatctggcgttgtacgtaggcgatggagtttgaattgcccatggcaacgacgtggagaacttcttgaccgcggtgcgatatgacagcttggtggccataatagtcggggtggatgcgccattgatagaagaattttgccgcgtccacgattgtgatgaaacgcttgccttttgccaaagcaataatctcgtcttgtcctggcaatgggtataggtctggaaccaagttcttatttgtcgggcggttgtcgaccacggcgcgaccgacccgttggagcttggcgttacccttgtcgtctgtgcgagtgacccatttccatacaacaaaaacagggttcacgccctgggcttggtgtttagcaaacgacatctttccttgagcatgtagagcatcgaatgcatcgtcgatgacttgttggctttctctcgcctgtctgtagacttgtgaacgctgtggctttgaaccagggactgttgggagtctcatccattcgtcttgtgggatgtccacaacgccggggttagaccaaatgttgtattgctcacaaacatcgcggagcactgcagctgtttcaggcgtcccatagattataatgccattaggtagtactgtttccagtggatgtcccggccgagcgtaggctgtagatgttggcaggaccttctgcatgtccggtgtgaaaacagtatcaggaagtctatcaggaagtctatctggcagccggggcaagttgtcaacagcggccagataggcagtgacagagtcgtgaacgtctcgattaatcaatggggggcggggctcgaccgcttggggctgcgatgccagaggcgtcacttcgggagaaacttcttggggctgcgatgccagaggcgtcacttcggtagaaacttggtaggcggatgtgaagtccggctctaaaagttggcctacacgatccttcttcctgatgacttgtgttcggtcggtgttgttaacggcgtgtatatatgcgaaaccggcgtcaaccatctgtgccggaatctcaaacttgctgttgcctggctcgaaaacgaagtcacgatccttcggtaaaatcgacttcacgacaatggggatccgtgccgcctggcgtggggggacctcgattttagaagaagcgtagaccggtcttttactcacgtggtgtggttttgcgcagagggcaataggaaaagtcaagttttcgcaggactcaatgatcgcctgggaacgcgggaaatcgagtataaacccttctggtcctagaacatccatgccgataagaagctgggcacggaggtcctcgacgacgtgggcctcgattcgtagctctgcggccgtatctttgttcaggaagtaaacttgaatcacgatgtagcggtcggacaggtgttgggaaccgatcccactcacaggaatcgggctgatagggtactgggggcattggagtgatgccgccagctttgaatcgatcaaagtcataacacatccggagtcgaggcagcaagtgtttagcttgctggggcttccaagtccgactgtggccgttgtatatcgccaggatcgaaatgtatagccggggacgtggtcggtctgtctggccgagtggatgatgcgatgagcgggattcgcgaaattagcgacagcttcagctggtatagcggcagcagcttgaggcttacagccgtcaagatgctgatacagcttggtgttcgacttgaaaacctgtaaacaggataaacaagtgactgagtactcgctgtcgactgtacatagctgggcctgtgccggcggatcggcctgggctcgaaaaccggattggtggtcgtcgtcccgtaggccggcagggtcagcgaaattcgcaccgtacgggtcctcgtcggcgtaaaagtcgtcctcgaaatcctgttgatcgtcgtcgttgactgggacgtcgtcctgatactcctccaggccattgtcattagcttgggagtagtcattcgactgatgatagtcagtatctgtatccacgtggtatgcccgctgaggtttgttccaaacagcacgctgggagttcccggagccgttgcggccggaccattggcggccaggattgttccaggtctgctgagcttgaactccctgctgtggacgttgttgtctctgaaaggtttgggggccttggttgctttgtgctgggttctggggctgatactgatgggactgatattgggctcctgtggcttggtatgggcgctgaggagtctgctgagcctggccacggggcgctggagcctgttgttgtctatatccggcctggctttggggtagaccttgatagtcttgggctggcgagcggttgtagccgtacgggcgctgagggtagccttggcgctggtcttgtcggtgatatggggccgaattgtcctgtcgcggcctattgtttctaaacctggtagtcaactgactctggcgcttggttgccatatctttccagtcttgatagtggtggtcaaggctgttcatgaaagtgactaacgaggtagtctcagttggctctgggatgtcgcgacgaagcgtaggctctaggttctggcgaattcgtaataactggtcgagaacatctgtcgtacccgtagctttgcataggcgtaacataccctgcgcatattctcttggggtgcggcctcggcgtacgtcatcccattcgtatgtgtgcttgtcaagctggagaagggcctcggtacggttgggtctgaaacgccgcgtcatcatggaaaaccatccatcctggagcggaacctggttcataaggcgtttttcgtccgtggtcagctcctgcgaataccatcggagcgcgtcacctcgtaggcagctatggatgttcgctcggacaacagcttccgacttcaggagtattaggtctgtcatacgatctacaaacgtatgcacgtcggagtagacgcaaagattttggactgtgtccattccatccttaaaactcttcgaaggatcgaaaacgccaatttcggacgctttccacgaggtatcggtagtagccaattggcctggggaaccttgctcgccctggggaccttggttaccttgaggcccgcgaagagcgttggcattgttccgaaggcttgtctgtacggctttctcgataagctccgtaaactgtgccatatcgaaaccgggcaacggtggggaagcagccggagttggcgtgtcgcctgtgtggccgggaccctgatttccgttgttacggctgggacccggacctccgttatttgccatttttcgcgggaggtcagagagtttggcttcccgcagcaggctcgatagacctgctatggggctggcctcgctgtcgtaaaaacgtgaagttaatcgtactcttgactgtaccgggggtcgttccggggtcaggtgttcaatgccggcctcgtgagagtggaggtccgcttggtcgtcttcggcttgttcggttcccggagactggacttccgcctggtcgtcttccgcttgttggtcttccggagactggacttccgcttggtcgacttcggcttgttgagactggacttccgcttggttgacttcggcttgttggtcttccgaagactggacttccgcttggtcgccccgtagaaggtctgcgtggctgtccttagcctgtggtgcggaattttcgtcctcggttcggaaaaacttgctgtcgtaactgtctggccggggactgaaacgaggctgccgtcgtgtagtagcgggcctgtgcgcgtagcgtatgacagcagtagcttgggcagtcggtcggtccgaaatgggcgtcgaagactggggtgtggaaaggtgtatcacagcagcaggttgggcagtcggttggtccgatacagacgtcgaagattgaggtatggaagccggtgaactgggaggcttgctcgtagttcgcttaggtcggggtctcccgagcggacacgcaggctcgctcgacagaggggttataggacttggaacggcgaggtgagacgtcagacggaggaaatccttgacggccttgttgagtatagacctgtcgatgggccaggaaggtggaaatggatcctctgaagatggaaggatgacggaagtggatggcgaggttgagggattggcgggcccggcaggtgaaggggtcaggatgatgataacgcgggaaagtgtatctgcgtcgaaatcacctgactaggggcgtgcctcctagcgataattgtcgaactggattgcaagctgggtggcccgacgagtacgcttatccatggattgttatagtagcggctcggcactgtgatcgacagccttaccgtagcggcttggcactgtgatcgacagccttaccgtagcggcttggcactgtgatcgacagcgtggtcgaccgccgatcgtgccaggcttggtgacctctgaccttggcatataggggaacccctgaggtggtcgaacttgttaaaacaaacccgagagagatcctctcggaagaaaaaaaactctggatgaaaccaggacgtgctaccataaatgtggcaagtaagcttggtggggaagatgatgatattatgaaccccttgttgggggtgctaactagctaactatgactaagctgtgacacatccgatcttatcgaggaccgtataaagcgaagtttttctttctacttttttgtatggcctgatgagcataatattagacttacaacaaggcagatactgatacatgtgacgtcctgctggatctgaaaaactacatggcctgtatagtcctcgactcgtacgttgtacttcggaatagcatcggaagtggacatacccacaaatattagtcctgacagtcacctatttagggatttatatactttattttctaagttcaaaggagtccttgtcacatgggttcgatataccttattgtgtacaaaataaatgtcccttcaatacgaagtataatttgaccattttgcctgatatatattggttttctttttaaataatcttttgcaacatttgtatttgaagtttagaaaagaacccattcggaatcattgctagctgcattgggttgcaaagcagttttacattcgtagcgtcattgacaaacacatggctcatggtaatattgacaatctcgacagctttgtcgatgatgggctatgtatcaagctttcatcgttcctgttgagctcttgtgtgcatggaaaagaggagaaaagagatctgtcaatagcatagatgtttttagaggatgcctttacagttggcttatagttttcaccggtgccttcctgctcacatgtgttttgttcatcctgtcctcgttgatttattcctcgattatcattgtcataaacaatagtcttcttctctgtcctttatatgagacttctcaggcataatagtctactcctttgtctgggcaaagatatctttgaaccctttcaatttctgaggaccaaggatccgcttgccagagacttcgtagttccattgcaaaccgttggtcataaacctttacacatttccctcaatgtctagatcagaaaggtcagcatcaaacgaaatgaccatcagatataatatattccagggttcaaagtctctaacgattgtgatttggactaggcgaccctctagctccagtgtgctcttcttgccggccacatatgatatgagcatctaaaatgtcagactaaatcaaaatcaagaagctgcaaactgaccacctcagttagcctattcatatcagttctcagaggaataccgtgccaactatctaatgacgtctccctccaggataacaaaggattcttgaaatcaagggctgtacactgagtatctctcatgctaggtttctttgtcattccgaggggtagcactgaaacactgaaaggaaaagaagccgaaggaatccagaagtcatcgatccccttggaagtatcagcactatcagctttatagattgagaattcaacttcaaattagagtatgttatccatactgtttctcacaatgaaacttctacctgatagtatatactcttttaattgccaagtgaagttatcatcttagggaaagaacacaaaattttacgtgcatagtctgcttaggggcgataaaactatattttgtttgttatagagatgacaagccactacacccgaggttgaaggtgagccttgagaaagattatagtcaaacttgtgaccttagggtgaagatcccctaatcatccgatcataggattttaaccacatcttcttcaatgtagatcactaggaaatcaagcttgtgtgtaaaaccaaaacaatgtgtacatggcggtgaaaacatctggaatcccccgcctaccaaggttctaagacccagtgtatacaacgacatctcacggatagcacccaagatttcgattctccatactagcacagtcatggccgactcaacgagatcaaaagacagtttaccacctcctccacctccgcctcccccagagaaccctcgctcaaaaatatcccccacagtcctaaagatgcgaagcacatctcccagccacttctttcagccccaagtccgccgatctcaaaaccaagggcctgctccaacaggcccatacttcttctacggctcactccatgaccaaaatctactcatagagctgttagacctaagccacgccccccacctacgacccgcgtacatccagggctacaagcgtaagctttggggacactacccagccttgctctctggtgatcccatggatactgtcacgggagcagtgtacgaggtacttagagttgatgacgcgaagaaactagcggcttacgaggggcctagctacacgactgttgcttgctcaatccggtatgcggatggcgaatctccaatacaggcagaggggtatgcgtttctctttgtggggaatacgcgtgatttaagtgagggatcttttgatttcaagctttggttagagaggagggcattgggaaggaagagctgaggaagatagtggcgcggggtgggctcatacttcggagtccgaaacgggaagttatagactgtacgataatacagcgagtcaaaaaacatcagtttctctgcttatctatgttagtctgagtcagatggactggatattgtactgttgtaagcaacaatcccaaggaagcatgaccaaaatagagtatgtgcagaatcaagttgatgaacatcgcggggtaaacagggtaagcgacagagaccgaccaaggcacagacaactcggagaccaacagaggggcaagtagaagtagaatcctcggctgcagcacgattgaggggtaacaatcgtacagaatggtagaatgatatagaaggtgacatgcagggctaagtcgtcacccgcatctacttcccgcacaataggggggaaccttggaagggaattgatgtccgaatcgagaacacccgcaatgcctaacacacagaccctgataaacaagtcaacaagaggacaagcgcacaggtggcttgtatgtcgtacatggacctcgcactaggtgcattcctcgggtgtattcacacggcaacaggggctacttccaaggcaggtgtcaactatgcaggatttgcattctaagatgacgatgcgaatgtggacagcatagtttggagtctagtttcaattaggtacaatatatacatgctccttagcatacaacaagtatatacggagtatggagtacggagtataggaataatagaaagccaaattccaagaatgtcaccgataccagtgacgtcaagggaccagcccagattatagtgggacccgagggagagtggatgtaccggtacctagtacacacatatcatactcgatgttggatgctgccgggttcagctgactgacgcgggggcaaatggagattaggaggtcacagccatgcgaataagaatgacatgtacatcatgagttccaaggaccgtgggaaggattgaggtcgatgatccacgtgccctgaatgacggttatcagccgatgatagggaaaactagggttacgccctggagcgctgcaagcgttcattaaaagcgcacgagcactcaggatcaccatgactggccgataacgacttggcatgaggggtttatttcgttattactcaggtatcttaggggggtacggggtaagggaagtatttccttgtatgaataagaatgacatggagagatggtgtatgaggtattcatcttaagatagagactagagtaatgtataaataggtgtaatagtgatagttaatagctaattgttaagttaatactttaatagtactccgtataactactcctatactcctataatagggagagccggatgcacccggtgtcccacgaggcgccaatcaattcacccacgcgctttcccaatttcatactgggggggttaagtacaaaggtccaagtcactggccaagtcacactttcaacttatatttccccttcctcgactactcccccccctgttggactggacaactcttcgaccttttcttggaatccgctcttatcgcgactatctgtctccccttgccgcgcatcccctacgtggatccaagccctaaacaaagttggccccaacttcgctacacggctacacggctacagtgtctccttggtcgcggtgtgaaaggtgagttcctttgttttgacttcttgggctctttcactctgaaaccatcctgttgccacctgatctttccatggtacctttgtttgagaccgtcttctgactcatatactctggctcgcgcgctttaggttcttctcctttcacaaatccatcttctcttcatcatggctttccagacaaactccagcattgcaatggctcttgctggcaagactgcctccgttgatatccctcagcgccgctctggtctgagtggcggccgtgtccctacgcgtcccggacagcctgcgatgctgcccacgccacctaactctatatccccgaccctccctcctcagaccttcaagcaccgcgcgacactgtcgccaggatcgccgctggccaccgtcccccagttggactccgatatcgatctggaggatgcggaacatgacaacagtcatcacgtctccctgcctgtcgaggacctcgacagtactggcgcgatcacccctgtcatgcttgcgaagtatcatctccctgagatcttgctgcaccaggggcccttggctatccgtcacgttatgggtcatctgacaacttccgtccctggcttttcgcatatcccccctgccaaggcgcgccgactggttgttgcggcgttggagggtcgaggaaatggaggtgtccaaggcgacgtggtgttcgagaaggttggttggggccgctgggacgcgcgacgtcgtggtgaacctgctcacgatcgggatttgaacgatccgtcgtcgcctccctcaagtgttgcaggctcgttccagcagcgtggcctgcagattcagggccagtcgggtcggcagggtggcaatcatcatccctaccgcatgagctttgccgaatccacggcattctcgtacaccgacgattatggcatgcatggagaccttgatatgttagaacacgaggccgataagatgtctctcgatggcgacgacggcgaatactgctcttcctccgaagctcccgacgagatgcaagaaaccgagtgggtcgaaggcgatgacactgatgaggaagactgggcacaaattggcgccgacgctttgcgcgcccgttcgatgaacaacaacggcagtttcatcaacggccatgtcgctgcgcgcgcaaagcctcaaccttccgggattttccccgccacctgtccatctgtggctaagttgccaccccgcacctttgacatccaggaacgcgccgctgtggaggcgctcctctgcctgggctccatgtaaagcccctcatcataatcggcgttatatttatttctactctttgcgcgatacacttctttcacattcaaggccgtcgaagctggtctggaccgcttttggcgttccatggtttttcggcaaatatccaaaaaagtcaaaagccaggaaatttggctagcttgcagtgcaactacctcgattgatgggcgttgggttggacctttgtggtattgggtttccaagatggcgttcaagtctgcaccttcctcttatgcctgctacgaaacacattgtcatgacgattcagggtggcagtttcgtcgctgctaccactatgacaactccaaataccccttatcttctccgctctgctacttttacgtgggttggctcagtattattgtctgtcacctactcattctggcgtttatccttgcattagttgagtcagctaccactgcttcaagactcctatgtttcttttttcatccttcgaccttttttaatactctactttgtctttttttttatatatcagcttgcacctcccgatcacttggaagatctcagccatctggaggttctggtcgtctttattgatcgcactggctcttctgacttggatggaatctcagtcatcttcactgatccaactgagaagttgtcctcttcctctgccctgtttctctctctatatatatttatgtttatctttatgtgctctacacataatctgttgtacattgcagattcatcatccttgcattaccctggaggttttggcttcagttctcgaggctgaatactttacgcggatgaaagtacataatcacttagctagtttagaaacttaacgcgtcgcatatcctgcgcagttcagttgccatttttctctttcatttgtaatctaagtgttcatggtatgtacttatactcatcccaagaccttacaacgtcgtagatgtaggctgctgcctgcatgtcctcacacttgagcccaagtatcagagctttaccaggaagaacgtagtcagaactacactccagcgccactactcaatttcaagatgcaagtccaaccaaagcattggtattaaagatatcattcaaactaaactccaagtacaattcccaagtccataacccaattcaaaactgccatcaacacatgcaaatcctcctccagaacccccataataagacagactccaacctaacccgtccatcccctaatcatgaatatcattaatcttcttccaaacccccttctcaacctccgccaacttactcccagaccacctcatccaccacttcgccgtaccgacgaacccctcctcctcttcggggaagatactactcgccccgccacctgacccagctccagacccagcaccagcaccgtagtgcagcggcagagtctgcgtctgcgatcccgcgtgcgtctggtacacagacgaataaggcgtggaggttgagttcggagtaggctgcggcgggttgtaggagtatgactgcgggtagtttggctgcgttggctgggctgtctgggttggctgggctgtctgggttggctgggctgttggtggaggcggttgggggatggcttcgccggctttgggaggaggagggactagagaggaagatgctgttcctggtcctgtgtatgctgttcctggtgatgggcgcgcgccaggttggggtgcaggtggattctgggttgtggatgtcgcggtctccgggaaggaggttgttggtgttggttcaagcgcggttgttgctgttgatgttgctgttggggttggctgtactgctgttgcgcctggttggggtggtgctggtggctgggtggttgtgtagattggaggatttgagggagctgtggctgttgctgttgttgttgcgggtgctggtagaggttgggagggtgcgcttgctagtgactcgattgctgtggcgggttcgggctgcgaggttgttgcgtgcgtgccttcttcctccttgttggagttcacgggcgcggagttgtaggtttggatacctgttggggcggacattttagaggttgatgtacttattgttctgggaggcttaggtaggggagtgaaggagctttgtagcttcaaggagcttagacgtcatgggtattgccgctgtggagcttcgccgcattgggacacctctcttttctttcttttttttttgtctacctacggttcagtcaagtattccgatgacaaaaattattggggctcgaatggttggctatttgcttgcgcttgtttcagttatgttcgcatagctagaagcatccagcatacaggcagccagccctcaattggttgatctatcaaaactaggccagcacaaagaacacgtccaaggtccgaagctagttggtatctgtatcttagtagaattatttatttactttcacaatgtttacgaagatcaagttgaaaaaacgaaaatagtttgctggcagtaaagtacattgggtacaaaaagggaagaattagaccattctatgcttcaagatccttcggacccatttcttgacgcatctatcttttgaccatcccatatcctcaaattccacgcccagtggttacactgggggaggtgaacaccccctgtttcagtataactacagtggcaagagactcacgtttcagtgaatcgcttagaacttctttccgaggaggaggagctgggccttgtcgtagatggacaggacaccggcaccggcgacaccacggaggatgttagcaccggcacccttgaagagagacttgaagccctccttggcgatgatctggcgggcagcatccatggagctggtgtacttaacggcctcaccagaggtcatcatcatgcggcggcgaacggtgtcaagagggtaagaggcaacaccggcaccggtggtgacggtccagccgagcaggaaggaggcgatgaaggagccctcaagaggaccaacgaggagaacgggcttgatggaatcgtacattccgaagtagagaccacggtagacgacaattccgagaacggagggaccgaaaccacggtagagaccggcaataccgtcggaggcgagggtcttgcggtagacatccacgaggccgttgaactggcgctcaccggtacccttggaggacttggcgtcgttggccagacgggtacgggcgtagtccagggagtagacgaagaggagggaagtggcaccggcagcctagagggtttgttagctgtgagccgtgtgtgagagttttcagatacgtacaccaccggaggcaaggttgcccatcatccactttccgtatccatcacggtccttcttgtaggcgaacatggacttgtaggtgtcacggaaagcgaagttaagagcctgggtggggaagtaacggatgacgttggcagtgttaccacgccacaaggagacaacaccctcagcggcggaggtacggcggaagcagtcagcaatgccgttgtacttgcggtcgagacgaccctgcttgagcatctcatcctatttatcaaattggttagatactaaagtgatgaagatatcgagctgccgaatggcacgggccaagggagaaaatttttcacgagttgcgatcgatgcgaaaacacaactcatgtccaattcaatcacaatcaattgttgtgattctctgcctctggctcattccaatcggtgcatgacgggtggtaaccaacctggttctggatcaggagcttgacacgctcaatgggggcagcagcggtcttggagacagcggcggagacaccacccactaatacacagttagtatgaaaactcgagacgttgaagcaagcaattgctgataatggcagatatcaagcttgacacgtactcaggaagtcgacaacaaagccctgcaaattctgttagcacgactgctcggttcaattcacatcgagaaagcgatgaccgagccttgaaaccgcgtttcgaaacaagctcgatgattattgatggtggacatctcatcggtttgaatcttcacgcgacaacaaggccagctctcacgggtttgcagggaaacactcacgggcatgccgaagatcgacttctcggcctggttaacatcaccggaacccattttgaagatagtgcaaaagaaaccggatgcaaaaaaaaagagaggagatggaaagagtgtcaagaagaaagagacaccggggacaatgaagaagaaaaaggaagagagaaggcgggaaggggggccagaaaaaaaaatactcgaccgccgggcgctaaggcccaatcaggaagcccaggaggtttaattaccgtataatacggttatcatgtcggtactggtttgcctcctgccgatatctcccgatccactgaaaattctgcaatctggccaactggtctggacggtgctatgggcatataggggtctttgttggactgtcaaatggaccacacggttttggtctacaatacagctactccacagagtcacttttgtctctatccttgggaaatcagtcgatatcctatgttttcactgtgatcatcgacatcctgtagtcccgagcaacggcccaagcgtcggtgcattgtaccgtaggggtacggtgtatatttccctatccaatgccgggcctccacctcccggggcaacctcctttttgctggccgggtatccgatggcgaaccagacaaatgatatctcggacttgccaccgacgggattatttccttctagccctgtgttctggggcttttgaatgatttcgaacgtccccgggtgtgccatttgaattcaaacttgagcccaaacgacccgatattactagttgcggagggagtagcctttttcgtattcgggcgagtggattctccccaggtctcctctctacactatcttgttccttcagtacttacttcctgggaatatctaactatggcattgtagcataattcaacaacccaatagagcaaatgtgatccctctcaggtcttgcactgatacggagacgacactgtgatatgtgagggatccctagacttccacggttgatgagacatttttcctggctactatttttatgtcgcgggtacaaaccttaaggtgatagatcgccgcatggacgatgtacctaggtacttcacatgttaggcaatgctaggtacccaatagtacaacattggctccacctcccttggtcctcagtgaaattttctgtatggagcactacgtacgttcaacgcatttcaagctgcatagcaatatttggagcttcctatagcttaaaatcagatttcccgaggttcaccccagcaaccgctagcgcctgagtgggcccgcatcgcatgttagctttccgctttgggagctacggagtcctacaggtatgcatacgcctgaaaaccactagatttggagaaagtctttctcaatagaacttcaggatatgatgatagctgtaatatctctcacatttgaatgacaaactagaggcgcaatttgtgttctatattatagctttcagcgaatatatattccgagtactaccacatcgtatcaagcacgtgctaaccctgtatacttgcgttttttagcacttcgttcatttcgacacaatgattttcgaagttgagatactatcaagttaaagagaaaataattgggttcattccataaattgatttgaaaaaggtataaacaatggtagattgacagatgcaacaacttttaatgcttcttcgacctctttctcttcttacgtgtgccatctccttctctgatatcaaccttatcctcatccacagcatccttaggctgactaggttggacatcaccgccgaacttgaacaccggcccattctcgtcaccgaaagtgtccttgcgccactcgcgaagccgggccttcttgcctaacctcttctgatcgcgccgcttctgctcttcctcgcggaaggtggcgagcttcttcagaccagcgaacttgttgagctgtatgtcgtccgccatgaggatgtcccgtgccgtcaagccaaagctctgcggtgaggtttcgcggtagcggaactttgtggcgttcttctttgtagctccaggaagcaaggtgatgtcgagatccaggttgcgctcaaccgcatcgtcaatgcgaagacggtctttgcgggcctcacgtttctgaatccgcttctcttcggccttgctcttcttcttagacccggaagcctcgtcgtcatcttcgtcttcggcttctgatagttcgactgtgggtttcgcttcttcatcctcgtagtctgggaccaagtccttgatatcgatatcatcatcccaggtaggcttcttaggatgcttcttcttcttgcctccctcattttcgctgtcctcgccctcctccccggcgtagtactcctcaccaaaccgtttttgcatctccgcttcccagtttgagtcgtcccaggaagcatccaggaaacgagaccagtcgtcgtccgtgaattctgaggcacgaagtcctgcaacttccttgatttgctccacctttttctgtagttcttctgtcttcagtttgcgaagacgattcttctcagtttcgcgttgctttttctcctcatccttgagtgcgcgctcagcgtcgcggatcttcttacgggaactcttctcttcgcgacggacggattgcttgttggtgagatcacgagagtgtgtgactatcacctcgttcatcttgttggggtcttcaaatcggaagttgtacgcttcttcaatagcttccgcccgatcgacgtcgtcgtcctcatccgaatcgaacggatgcaactctggcctgtcggtggggatccaggctcgtgctgacaagaagttggacaggaaagtctcggggtctttgtccgcattctcgatatcgagtttgatttcagatttaggcaacgaaatgtcctggccgggcttgcggaccatgaactcgtcggcatcttccatctcttcgtcagacttgtctgccgctccgtgcatctccttgacaatagcattcttcaagtcggcttgctcttgggcataggtccttggggtactttcctcctcagctgggttgacaccactcagaagattttcggtatggtattgtcgcagcgtcatggacttttccttggggccctttccggcggcggcttcctctgggtcgtacttgctgtaaaagctggcatctttgtcgtaaacgcgaggatccttcgaacgaatagcattcaaagtcgccgaaatttcagcatccagagctactgtagcgagctctgcattgtcgtcctcttcttcggagtcggaatcctcagagtcttcgtctgggcggtttccaagactggaggacttgccatacttcgcttccactgtggattaagccaatattagcacatgctagagcgcaaacatttcgagtgtaagcacgtacacctcgcaacttcttctctcttcttgttgtgttcaaatcgacgagcgtagtcttcattgatcgtgaacccggtatcagacgactgcttgccgaggagaactccaccagcatcgtccccagagtcactatcgctatcttgatctaagagctttcgcattttcttagaaggaggctccattttgtgtgatcaggtatgtgattgaagaccgactcggcgaaacccccaattggcagaaagaaaaaaaaacctcacaccgctctccacattaaaaccctcgagaatcaggcaccaaggcagaaacccaatccttgacgtagccaattagatcatcggggggctcatctgaacaggtctgaggaggtctcaggcaaagccgagaccgctacaagccagaaaatcatacacgtgggttctctccagggcttggaagttgaattgatcaccaagtggcatgaacgagaggaggcctattcacacctctcgcgtctcggtctttactcgcgttaagtgtatggccggagacatgcactagatgtcgactcaagcacaaaccccgttaccccaagttgggaaacttgtgagcgttgtgtgagtatctcatatgcctgatattggaattctcgttcttgtatactaatgcatgcgccccttttcagcccggtcggtctcaaagaagccgctctcgactcgcccacctttcgtgccaccaccctttatttctctgatcagatcgatttcatagagaaatggctcgacggatatgccaaagctgcaaccaagctctcctacgagctgaccgctatggagagtgtagtgaacaactttctttcctactcgacacatcccctcgtggtctcggaagcggtcgttgaccatgattacacacttttggctatgaggagatgtggtgaggggtctaaagatctttggagtggactcatcgcaacaaccagaaagttggagtcgttgatttccgaacctattcgagatttcattcaagaggatctgcggcagttcaaggtattaagaagcccctcatccaatttgttctcggattatctgacacgtccataggaaattcgccgcaacctcgagcaatcacagaaacagtacgattacctccaagctcgatatgcctctcagtcgaagtccaaggaggcctcggccctgagagaagaagcatttcagctgcacgaagcccacaaggcctacctgaaagcatcaatggactattcagtacagggtcctcaggtacgaaatgcactggaccgacttctggtcaaaatctcctgcgatcaatggagggaattccggggatttcacaatcacaacagcgggaccttctcgaaatggtcgcgtgagatggatcgtattaagggttgggttaatgagatggaaggcagtgagaaatcatccaaacgagagctgctagccacccggaagctcattgaggaagccgcggagtttgcggctcgaccatctcgtgaactggaggactacaatatttcgaccgttccgtaccttggctctcgtcctatttcggcacttaatgtgagcaaagagatgagaccagagaagcaaggatggctgtatttgcgcacattgtcaggaaagcctactcgcacaatctgggtcaaacggtgggcttttctcaagcacggcatatttggatgtcttgtacagggctctcgtactggcggtgttgaagagagtgaaagaattggtgtattgctttgcagtatccgtcctgcatcacaggaggaacgccggttctgcttccaagtgaagaccaagaacaacaccattctacttcaggcagataaccagaaggagctgatggaatggattggtgccttcgaggcggccaaacaaaaagcactggagaaccccgcaagcactgatctctcggtttctggaaaagtcacagttcaagaccctgcattttcaatttctcaacccccggctgcggagttcgctgcggatcctgctgactctcttacccctcatacgaacgatgagtccggagcgggggatcgcagtatgacgcttcctgttccagaccgtgatggatataccatgagaaatagtaccgatattggaagcagcagaagaccaacaggcttcgatagtgagagctctgcaagagaacatgcaaaagagcatacctctagactcatccaaaagttggatcttcaccgcaaatcgaacaatgcggctccactatctccttccgtccccggccctgcaggtggaatagccagtctcatctctgccagccacaatattctcccttacagcaacgccggtccactcaacgccaacgtcgatggcagtcgaggtcgcagtttaagcaacgtggatgatcctggctcaagtcttgcacctgccacgctcgccaatcccccggcacccacaagcatgagcaaggcggcagtggttgtgagcaatgaaagaggtattggaataggcgtctctgatagtacgggtggtatgcctagtggtatgatggcgaacgtgtggggtagctctaactggggtttcatgaacaagcttcgacgggaccaacaccagattgatggagtatctgatgggccgtctacattgggtgatggctcaacacacacgattgccgcacaacccgatgcagcgggtactttagtggcaccccgacagcaatcaggtccacgccacaggcagacagtaagccttgatggggatgatgttaagctcacgcaagttgcactgggtatcgggtatgaatatcccagctactaccctcaacaattgaggattcaagatgctcagttcagattgcttttcccagacgtcaagagagtggaagcattggtcttggtgttcagagccacctggagccctaacgaccagcaagaattccccggacgagcttatgtcacaacaaggaacatttacttttatagccatcatttcggactggttttgactaccggtgtgtctttggagagcattaaggaggtaactgcagctcctgggcgagactgtgacttccttttccttcatactattccaccactcggcagtgatactcctggccgggttacgatcaaaactttccttgaacctctccgacttcttcaaaaacgactcaacttcttgatccaatgctccattgccgtcgagcaattgagtttagaatccttgatcaaagctttgatcaagatggacactgggtcttcagcccgaacttccagtgcagatagctgggatgatctttcatccggactcgcaggcatcaaacatgacgggggcaaagctacagacctgggccatgcgaaggacattcgactgcctatttacgttgacaaagatcttgagctggatggaggcaggactgcccgtggtcgggatattgctaaattcagacttccaacacaacccgtggagtatgttccacaaggcgatcttgtcttggtgaccgaaaaaattctcgatataagccctaaagctttgttccatatattatttggcgacaaaagcgccgtgtggcagcttcttttacacgagaggaaagctctaggttcgtttattctaaatccttaatcacttatacatggctgacatttcaaagagatccaacaaggcccatgggctagtacggacttgcggcatctgaagcgtgacttccactacaatatcgccacgacagatatccttggtaggcttgattattgatgatcttgagatcgagccatgactgattttgtataggtcgtactcacgaaaatgcgatatcggattatcagatcattgatgttctcaacgaccatctgtgctacgttatcacagataaaaagactccgtggcatctccccttccgccgttcgttccggttggttaccaaggttgtcattacattccaggccaagtcgaagagcaagcttgctatttatacgaaagtcgagtggctgtggtctccctacggcctcaaaagtgagttatcccctcccatccctcccattcgaatattctaacatacctagacgtgatcgacaaaaaagcaagtgaagatctagaacaagactccttggatcttgtcgacctagtcagtgaccaagtacgtcgattgggtgcacacagtcgcaccaaaaaagccatcacgatcttcggccatgttggacgccaaaacaacgtctcccaatttagtggcgctggttccaacctgaagctggaacctcgcaagccccgaacacagcgtgctatgcacgaccttcttttcgagaccttcttgtcattcctcgaaacgagtgtttccttcataatggtttgggcgtttgacgtagttcgctggtcttggaagaccatgagtgctcacaagatcatcctgaccatgttggctacaagtgccattttgaatggatactattcttcgcgggatagttgggactggtggcacgagagacatgcaggcaacttcatggcacggctgggtgtacagccaaacctcgttatgagcaaatctatctacatgcgggatattgatgacgcggttgcaaactccacaatttggcccggcgccggcaatgccagtgattgctttgctaccttccacgagcagaccatgcggtatgccgatatgcctctgtcgctcagtccatccggaccccgggatgcattgaccaagagcgccatcaaacgcttccagcaaactcgtgagcgtcttggcatgtatcgtcacaaccttcttgtcgcattgcgtgtcgtgaacagtattgagaaagaggtcgtccagacggaatgggagcgttggctgcgcgaggaagtccggcgctgtcgccaggtcgaggttctccttggcggagaggccactccgggcgacgactcgcagacgggccgaacgaccaaagctgagcgtgtctttgccgagcatgctgacaacgtcaagcagtggcatgaggagtactgctcgagttgtcgaatggagcaagaacatgtcatatccaatgatcctgacctaattccttgattttcttcctacagcagtttccgtctccgagcatattgtcaagccttctgtacagccatctcatttcttgcttcttgcttatcactataccctgtggctagctgatcatatgtcaaaaaaacttgtgtataatttcggcgcatatcatacaagtcgtcattgctttgaatgtgctctgtatatctgtataccacatggataatgtcaattcactgcttttttgaatgagtattcgtcacataatttagttaacccgtaagggttgagaatgcaataggtttattatgtacatatgagaaccatcaatatccacgcactcagttctgcctcggcttcacctcaccttcatgcacaacataatatgccaccgtcccgtccccacccatccccttatccaccatagcaagcaaaaacctttgcgcaccccattctttggtcaaacgagtcttttccttcttatcatagtattgagccagcttttctgccttttcaggattcagattcgccgcctccggctgcatgcttgtaggaccgacagatcgatcatgctctttagccttttgctcgaactcaggaagccggtcaaacacagcacccatatgacgcaaggtccacggctgaccctgtgtagttggtaccacgaaaatccgctccggcttcaggtcctcatcgcggatttcgttttctagcatgtacagctgctcatctggatgtgtgtacacgcggtgtggggggtagccggatagcagagggattggttcttgtggtgattggcggggttctttttttaatgtgtttgagtcgtctgatcgtccaggaatgatgtctcctattatagaggtccagaggtgttggtgttcgaggttgtgctggacctgggcggatgttgcgaggtggggggactcatggcctttttcggtgatgcgttcggtgatcgccgatgcctcgggctgtttggtgacttccagtatgtctgtcatcatgaatattttcttggagctttttgtcttgttagacttagcagaggagctccggccgaggatttttgggattcaccgcctggatagatctgatttattgacaccgctttcctcaatgggattgtatagttgagataagaggcttggaggctcctaggttagaagagagatttggaatgataaaatgaagaatggcaagtcagatatttcttccatctttgcaccgtgagttcaagtaaaaatagaacagaaaaatttatgtggggtggcgatcataataaggcgaagtaagaacacatggcatcttgttgttttggtttcaggactccaggacccgacaacctaggactatcctcgacacagggtcatttccccaccttttcgcatagtttatatcgccttgtcttgttcgagtcgcttggattttcaacttgtattccgccttgattacccgcaatgggacgacaaaagcaaggcgcgccgctcaagagagccccttcttctcaattaatgcacatctcagaagagtccgacgtgggacaaaattctggaaacaatacagacacaatctcgaccgccaagggaagcgtgtccgaaaaagcatcagcggccctggagacagtcaccgacagccctgggctgacgcaacttgcgatttgtgttctcggtatatatgcggcattgtaagtgcctccaccgctaggactggccggagaaactaacaagacgaaaagcctctcgtggggtgtgctacaggaggcgatcacgacaaccagctatctcgttcgtcctgcaaccgttgcggagccaaaccctccaacggagcgattcacctactcgctggtgctgaacacggtccaatctctcttcgcggccatcaccggctttgcatacctactattctcaacaccgagtggccaaaaaattccatctatcttccctacacgccggatcatcgtccccctgcttctagttgcaatctcctcgtcacttgcgtcacccttcggctacgccagtctcgaacacattgactacctgaccttcatcctcgccaagtcatgcaagctcctcccggtgatggtcttgcacctgaccatattccgcaagagatacccactgtacaaatacggtgttgtcctgatggtcactctcggcgtcgcaaccttcagtctgcaccaccccggaactagtaagaaagtcgctgccaaggaccagtctggatcctccggctggggcatcttcttgttgtcaatcaacctccttttggatggcctgaccaacactacgcaagaccacgtcttctcctcgcccaagctgtacacccgcttcaccggaccccagatgatggtcgctcagaatgttctctcgaccgttctgacttctgcgtacctcctgatcatgccgcatctctcacagagcgggattttgcacaacctcctgccattccccattcccccgtctaatgagactgaactgtttggtgccttctccttcctctctcgccacccagaggcactgaagcatgtccttgggttcgcggcatgcggggctgttggccagcttttcatcttccacactttgtctcgtttctcttcactgttgcttgtcactgtcaccgttacacgtaagatgttgactatgctcctcagcgttttctggttcggacattctctgtcccgtggccagtggctgggaattagtctggtcttcggcggcattggcgccgaagcagtggtacaaagatcagagaagaaggcgaaagagcagtcgaagattgaggctgcaaagaagaagttgtgagttttttttgcgaggctttatagataagctttcatttgaagagcatttagatttccaaaatataaaccgcaagttacagcctctgggtgggttctcgtttcacatatttttctcgggccttttgtgggtatattcttaaggtgatcgttcgtctttcagaggacgtaagtaatgggaagaagctcacttccgcccctcaaccatgatgatatgatatccaaacccagtcttgacctcggcatacttgggatttcccgttgtgctagtttcaagctcaaaagcaacattctcaaatgcagggtccagcccgcccttcgtcttccatccgagcgaccctcctgcggaaaagagatcagccgtgttactttcgtccctcaaagacttccttaccctgtctagccttatcctccgagaattcacgagcaacctcatcgaacttggtgccattgcgaagcttctctagggcttcttctttcttggcgtgtttctcgcactagatgtgattagaatgagctatataacaaccctttcccctgtccacgggatctggtggtatatcggctacccctcagaactataggcagaggatccgagattgaaaagaaaagagccaaaaaacatacaagaatgtgccgcacgttaatcgactgtgcgcctttcactgctcctccctttccaccttttcccttggcgtcgtcagcagaggcatccttgcctttgcccttcgcggctttggcgttgttcttgggggccattgtggaggaaaggtatcaatgatacgttgttatcgctgtctcggccgttgtttgttcagattgagttgatgtggggtggaaacttatgcctgaggctgtcaggcagaaaggatgtgtgacgtggatgcgggtgtattgactctctgctctaaagagttctagttaggcatatgtatggaattatcccagtttacacattgcagcatcttgatttctacaaaaccattcatctctcctttcccttcgcttacactgccaacccctcatcgatagcgattgctgagacaaaggaccgaagtcagcaaggactagggactacgtatctactagtccgagtttgaaaaccaaatgggatttgatcttgaaaagtcacgcatcatcgcattgcccgaggatgcattctatatatcggacttcattacagaagacgaggaggactggctacttcagaaggtaagtgacagtgcttttcttgtgaacatgtgtccttagaaaccatgccctaagggattgatgtcaaatattgcactaatatatgtggttatcattatgtcgtctttcttcaattatacctatttagacgttgcatgtcacttattcatgctcagatctcactcactgcaacaattcacaggtaaagtcagcaccgctgccgcgctggacccaactctcgcaccgcagacttcaaacatggccatcagccctcaccaagggtaatgctcttctcgaatcgcccttaccagcttggcttcgatcaccgatcgtcgaaccgcggtttgcggccctgtgtatctttaatgatgcgccacacaaggcgcccaatcatgtcctagtaaatgagtaccaacctggacaggggatcatgccacacgaagatggagctgcgtactatcccctcgttgcgacagtgagtctaggggcgccaattgtgctcaatttgtaccacaaacatgcccagggggacagggaagaaaatgaggcaccagccaagaccggaagggatgttgccgggatacccgacacaaaccgaaggccccaatacaggattttgcaggagagacggagtctcctgatcacgaggggcaagatgtacacagactttttacatggcatcgaggaaacgacgagagatgaggatctgagctctcgctctatatgcaactgggagctcttgcgagagagggaaccgtaccagagcgggtggtatgagcggaagacgaggactagccttacatacagggatgtgcttcaggttgtgaagatggggaataccttgaagtttttaagtgggaggtaacgatgacctcatttccaaattccggttcttttatttatttttagctctatgttagtaaacatatggaatcataaaccaccagtcctgcaccgagtctttgccgaacttttgcgcataccactgcttggtattccgagctgtcagacccaggttgaccgcgacgaaagccaaacatgaaaacatagttttattgatccattcacctcgcggagcagccaacagcgctaacgagagatagatgatgcattctgcgccatagtggggacaggcaaccccgcggaacatgggatgctccggaagggtatattttttcaacgagtagaggtagtgatgggagtcatgctgcaaaccagacgccaccaggaagagcgggacgagaaagaaagtacgcaaacttggggcgttggtcatctgtagatgagcaatggtcaggtttttggtcaacagagtgccggaaccctcgatccaaatcgcaacccctgccgctaggtagaaacccaagcctaacaaccagtgcataaaccacatctgggacgacgagggtttggagaaaacaaagcactcccataaccgccgcgatccttgtatactcaatagaacacaacagatcaccaactgagtcagggacatggaatgacgttggtggtcctcgctgacgcgggatgcaatggcttggaaaaccaaaccccgcgatagcaattgcgcaatccagaagacagacgacaggacagatgcaacatagaaatgagtgaaataactatgtggcacctgccaagtagcaagatagtcaaggaagcccttgctctgggtgggagggttctgggcggtcgatggtgcagagccggtcgaggccgaggccgcgcgtggaccgtaagtgaggaagcgggaccgtagtgaggttgggatgctgatcgagaatgtctgcatagggggtcggcgttagtcgggttcatctgcaggtggtgttcactatcaccactatcacatcgcgtatcgtaccgtggcggcggccagcaggaagaacgcgcgtagagcatccacggcatccatgccagtggcatccagggtgttatctacccattgagagattagagacatggctcttggatgagcgtgttttttcccccgccccttctctttttttccccccgtctctgtttcgtattgtttctttaacttagtgtcattgtgatgatatcagtgagttgttttagggaggtgtttgtggtggagaaacccagcccccccgccgatccctttcgccaacgggggcgttggggggtcgttgggcnnnnnnnnnnnnnnnnnnnnnnnnnnnnnnnnnnnnnnnnnnnnnnnnnnnnnnnnnnnnnnnnnnnnnnnnnnnnnnnnnnnnnnnnnnnnnnnnnnnnnnnnnnnnnnnnnnnnnnnnnnnnnnnnnnnnnnnnnnnnnnnnnnnnnnnnnnnnnnnnnnnnnnnnnnnnnnnnnnaccccccccccccccgccgatccctttcgccaacgggggcgttgggagttagttcggcctcggggttagctcagggataagaacaattagggtagatagaagataaagggccaatttgcgtctgataagagttagctctaagtttcttgtagagatgtttcatgataataggcttcacaaaatacatagatgggccggtgcgctgagtggcgactttgaggcaaatccacttgaccatattgggtctagtctggtcagggtgtttgtcgcatttgcaacatccaaatcgggttagtggccaaaggtctgtgcccccttttcttctcggtatcacggtatcacggtatcagctgtatcgaccgtatcaaccgtatcaaccgtatcgtctcccgtatggagtcttcgccgaacgagaaggacatccaagaacggagtatgaaaaaaacaaaaatcgaaataatcaaatatcaacgcgggttataacctcaccccctctaagatacaagcatgtttccagtagccaaaatccaacctgcagctcgatgattctactgtggccaaacctgccccagtgaggagccctagcccaatgaatccagtcccattcctttcccttcccgcttttcctctttatttctctttcttcccccattcaactcccaagtgaaaaacaaccctcgatttcatcctcgatctatatatccataccagtaaatcctatatccggacctcttcgaccaacttcccgtatcgctcccgtatctcggagcggtattgcccacgtttcaagactctctttgcgggtgaaacccgcggtcgaggatcggtgtccgcgcacaactgctggcgttgtcgaccacggttgttttgtcggtcgcgttttccccccaaaatgacgagcggcatttcaagtcttcgagtgctatcgctatgagtgatgtcgaggcagtctctttaccagctgccctggacgtcggtcagaataggcttgccacggtaaagccagaccctgttggtccttcatcaccaggcaaagctcgtgcagaccctcacccacgggtaaacagcaatggaccgacacgtgtacattcggaaggggaggaggacgggcctcctagtcctagggcggattcggaggctgagacaataattcaatcaggtcgggagtccttgtcaccggagaagaaaaggaagcatatcaaacacgatccgagtcgccatgagcctaacggaaccgatggacatcagcgaaagaaatcacgggtgcttgacgacactcgacaacgcgaacgcgagcaggaacggagccctccttctccaagccaccgagaaatctcgccatcggtggtcaagattgaaaaggtcgatgatacgcagatgtcagaaccggaaggcgttaccaatggagtcgaccttgcgtcagagatacctcgtgctttccgtaagcgaagcttaagtgacagtgctgaggaacaacaagatcatcgtcgcgcacatcctgtgcaggaacttaaacataccaataatacacgcctctccagacctccgtccaacgcgcgatcactctcacccagtcgaccctctcaccaacgatctgcttctggctctcagttcccgaagaaaaaggcgccaacccctgtacttacaggctctgggcgacatagctccgaagacagacaatcgacgtcctcttctcaaagcagttctccactgccgggagcgcatctacggaagcttggttctggagtcggtgcgtccgcatcgcctgctaagcaaatgggaccgaagaagttgcgtgacaagagtggccggactcctcttgcacgagcgtgtgcggaccggaaacatgatcaagtgatgatgcgccatgctgaacgcccagaagacattaatatccccgataatgcaggcaacacccccctgcagatcgcatcgcttgctggcgaagccgaaatcgttaagttcctactagatgcaggctgcgagattaacactaaaaacattgacaaagacacaccgttgattgatgctgtggagaatgggaatgtggaggtggtcaaacttctgcttgatgcaggtgccaacccacggactgtgaatgctgaaggcgatgaaccttatgaactggttccgtcctttgtagatgatgatgaatacgaggagatgcggaaagcgcttgcagacgccaaggccaatttgcggcctggacgacgctcagaggaaaataccagaccagagagcaaggaaccttcttcgcgacgggcttcggcagttagaggatcagcagctagcccccgagattcgcctcccatgcgcagcccccctccagtgggtgtagcaaatcgacggaagggtgggcgaagcgaagctacgagaaatgaccttctgtggacgaaacccacattcgagaatcttcgagagtttgctgccaaaggtgacgaggctggggtggtgagcattctgaatattttgcagaaagctgacaatgcttccttgattgctgcggcaaagggtggccatcacgatgtgctttctcttctgtatgcgatgggcaatgcagacgcggatccaaacccgttacgtggtcagaaaccaggttataacacgcctatgcttgctgcgattggtcgtggcaacagcgctgttatccagctcatccttaaccaacccggattcaaccctacgcgtcgactgtttgaagaaagaacatattttgaactgtctcgcaatcgacagggtgagaactgggaggacgagcatcagattctgaaggacgcgtatgaaaggtttgctggtttcgacaagggtcgcaaggacgactcgccccgccgtgctcgtggaaaagagaaggaggagaaacgccccccacgccgaacctcttcctctcccgtcgcgcgtaaaaaaaacaacagccccaacgccaaccgaaatcgtgattctttgaaagacatggatctaatcaaagaaaagcgtcgtcaaaaagagcacgatccatcacgaccatcggattcctccaaacccaaatctgcgttatccgctagacgagacagcgagtctagtggggtggcacccaacgaagacatccgaaagagacgactcattcctggacgtcgtccacaggagcgtaggccaagtctattttcgtctgattcgctatctggacgtgaagaggcaccgaagccgcgtgttgacacagcacttgacagcacgatgtctttgaagcgcattcgcactgattggtctccggaacgatctcgttcccgtggcacagacgctgaccgcttatctcctgagtcgcgcaaaaagaagagacgggttgtttctgaagataagtcttctggtgctacacacactgcatcaaagcaacctgatgatgtcagtaaaccacatcctcgccgaccaaatgacgaatctactcgatctgctgaacctcaaccacacaaatccatcgacacctccaagaaacctccaactcgcccaacttcaccccgtcatgatccggttaaaaagaatggtgatacgagaaaggaatcgcatgagcccaaagccgacaccatggaagacacaatggccgtcgctaaacgtctcgagcttgaagcccatgaacgtcgaagagcccaggctaagaaggtgcaagacgagcgcgccgcgaacgaaaagcgcattgcagatgaagccgagcgcgatcgacttgccaaagaagaagctgaacgagtagctcaggttgaaaaagccgaagaggaagaccgcaaacgcaaggagcttgaacaacgacgcgccaaacaagctgaagatgatcgtctgaagcggttggagcaagaacgtgctcgagctgccaagatgcggcgcgatcgcgaggcagcagagcaccgacgtcgtgaggcacttccaagtcgccttcgtgttgcagcgaacctcgtgggctcaagcaacccccgcgcgaaaagccatgactggctcaagtcttttatgcctctcgttaccgctctcacccgtcaactcgaccccagctgtgatgtggatgtcgccgacgagaaatggatcccaaactatttggttgcacctcttctggctaccaatgatctccaactttcgcagtatcccagctgggagaagcgaaaggcgacaccgactcaacgtgtgaatttgtggcgagtcacccgtcgcatgttgacccatacggatgatgttggattccaaagctcgagcatcggacagatcatgcagaaggattgtgatacacgccccaagtatttcgagatggagcatgtcttctggatccgagtaagttttcttgtaccttgcaagttatgcttcaaactaacaagtattttagctttccgatttcacagacctcgtcccacacattcctcacctgcacggcctagagctgcaattcttgaacatgcacgtcgatccggagccgccgacggctggtgcagatttcggcactccccaaattaatggccatggcccgggatcctcggtcgaaaccaatggaaccgggctcaatggttatggcccttctcggtctagtacatacgtctagttttgttttcagcgtcttttcgccaggacccggcgcaatgtcagcaattcagcgaagcggtgtacagttcggattctgattgtacgattatgatacctcttgcgttcagtgatgattcgactatcattaggtagttttgttgggtttcttatgtagtcacactgtaatcatgcatccccgtgtcaaataacactgttcaaactcatatcttcaagttcgtatagatatttatagtaacttatcaaaccatatataagctagaaagctaaagatgataagtgaaaagtgccatcaaaccgaacttgtcgtacattgtatggacaaatatatcacgtgactgcgtttgcggggacagcatgacataatcgtagggcacacacagccgaaaaagtcgaaatagcgggaaatttcactgcgcccgctccacctcttaatttctctctccaacaactctactcttcgaggatcatccgatttcaagcataacaagcaacaaaatggtatgttttatacctgcgaattaccctcacaccacatccgtacccaccctgcatcctgtcacgacaattgagacgctggaatggacatggccggcgagagcaattgcgtcgccgcagtagaggtcaccctcgtcggatgtttaatctatacgctgcaccggtccaaactaatcccaagtctcaagagtcacgacaaagatctacacaatggaacctttgaagcaccatatactaataagaatccttagtcggacggagaagagcccacatcccccattgcccccgccgaggaggtcgaggtttctgccgatgccggtagcggccagatgtccgtcttggacgccctcaagggtgttctgcgcgtctccctgatccacgatggtcttgcccgtggtctccgtgaggccgccaaggccctcgaccgccgtgaggcccacatgtgtgtcctgaacgagggctgcgaggaggaggcttacaagaagcttgttgtcgctctctgctccgagcacaagattcccctcatcaaggttcccgacggaaagatgcttggcgagtgggttggtctctgtatgttctccctctattgatgtaggctattcatctcggggtatgtttgctaacattttgttcttcaggcactctcgaccgtgagggtaacgcccgcaaggttgtcaactgctcttgcgtcgttgtcaaggattggggtgaggagtcccaggagcgctccgttctcctcaactacttccagaccgagcaatagattatttctattgagtggctgtgagtagcaggtctcgtttcaggcgctgggttgactgggggcatttgtggtggagatcaaaggaggaatacatgagaggtagatcaatgtcgaaactactggctggactcggagtatcctctctgggtttggtatttatgatggtggagatctgtgatatctctgtttggtcttttgaacctgtcatttcgaatcacctagtctatagccgtgccccgtttactcgggttcgcggcaccaatggcatctggacatcttgtctcctttgacacaaataggattcgaaagtatctatgtgctttcttgtagaaggttgttaatataagtaatatcaacattgtcagcaaggaacacaaaggcaatccggaaactctgcatatgaaggctattgtccaccaaaaacgacgaaagtccccaatcaatgaatgaagactaacactcaatcgacatatataggacgttcctacgagaccttctcctagatgaaatgcgcctcttgcatatgtaaccttgtcagtgacaggaggcggtttttgcgtaagtctccattttcataaatgaacaacacaccagtgacaccacatgccccaagtgctgttagctcacaattcaagcgtaagcacctagcacagcgaggaatcaagtgctgcactttcacagaggccttttcaagagacctatataataatatgagacaagaagggcaactagctatgtaactacaatatgaacttatgtacgaagtatgtactccgtatggtatccacctttcgacaagaacaaatgagaaccagcaaaaattgatgtctgtcttccttggctctataagtcagacattttgtcggtctcctaagggccattcgagactatatcaagcttaggagctgtacttcttagggctgcccgcaggagagtggatcatctgagtcagccggatttcgtgacttccctaactccgactgggtttctttgtttccttggacagacgctcttttgaggaaaaaattccctttctttttcttctttgcatagattctaatcttgatgagaggtgcatattgccattatttgccatcgttttactctgtattaggctccacatcctattgagacaagcattgtccaatatcctaatcccgatataactccaatcccgaatcccaccgggcatcgggatgcaatctgctcaaatccagggtgggacccctgcgccatatggccgcgcatgtatgaattgttcccgcgccaagtgcaaatgtattctttccgcaactggtagtggctgcgaaaggtgagtggcactgctagagagtgtggcaatagcctgaactaagcacaccggtagatgccagcgcctgaacaaagaatgccggcctgcgcagacagtccgcaaacgcaataagccggcgtcgggttctaatactgcccatcttgaagccaaactggattggattatgtccgcgtttgaaaagagtggtgttacccccagtcttcctccagattggcaacctgtagacctagggcagagtcaacggcatgagccaagccaatctgcaccaatcactcaaacctcaactagagcttcttcttcgactgccgaggaaggaaattaccctgaacactttcttccctcgtatgatccggagatattgtctctgatctacgttccgcccgccatggctcagaagtacctcgaccaattccgcactcggaatttgcaatatctcccctttgtccacatcccttctaatataacctctgaccaattgcaacagaagtatccattcctttgggtatgcattatggaagtgagcacgtttacaaatgcagaaaaaggtgactctttcgggagaattaccaaccatattcatcagagagttatgctcgacattgcgccgagcatagatcttctccttgggatcatgactttcgtatcatggtgagtagagaagaagtaccctcatgaaaaccactttcctcattacaattctctttgcagggtcacatacactaaaaggccatttctcaatgtctatgcacacatgctaatggcggtcgtcgccgaacttgggatcaatcaaagtgtcccaaatgagtattcagccatgcattctttcaaggtcgctatcggaatgaagcaaactccacccacagccagaacactggaagagaggagggctgtgctgggatgctttttgatttcatcaaggtaattagcaaatacccagagatccctaagcaataattaacagctatactaccagcacggcattggcaatgtccaggattgacgctatgcgctggacaccgcacatggaagaaagtctttcaatactcaccgatgctaaagagtgtccccaggatgagctcctgatcgcactggttaagatctatttggtcttagacagagtccatcaactgcgacgggatggtgaggtttctatcccgctagctttctatctggatagcttcaaaaatcaattggatacagtgaaaagccaaattccgcctcaccttcaacagcacagtatgtttatacctcccctgagtcttcacagctatgattaacaagacaaaaggagttgtactgatgtatctctacaatgccgaaattgtaatcaacgaattatcaataggagaccccgccattgcacattcgcctgatctccatcgacttgacagcctttacacctccctccgagcaacaaaaggctggttagatgtatggctagagcttgaaggagaggagtacctacagctatcatgtgtcatttttttccaattcacacgagccattgtcaacctgtacaagctcaccattctggaagacccgcaatggtctaagagtatggtccgagacactgcaaatatcctcgaatacctgaacaaaaacgaagccgtcatcagaaaatgcccagaatacatcactttcgaccaaagcagggaaatgaacctcctcgaaaagggattgagaatggttcaaggcatgcgaataaattgggagccgaaattattggaactatggcgcccaaacatgcccgcgaataccgagatcgatagtggtatgatccagtccgatactatactccctgatgttatgcctttgggtgggattgatgaggcttggatgatggacttccttgggtcgttataatcttggtctatgaagcttgaaacgttagctaggaagtaatatgagggttaacggctttatacataatataatataccccagttcagtcatatttgttgccatgtaagtgggggactgaaaaggaagatttcatcatcgcgataaggtacagcttcaacacatttgaaatcatcggggacttggcctttggcgagccctgtgactgcttacgggaaagtcaataccctatggtcaatacggtctttgtgaagatgatagattgtcaggaggcgcgtcccaaaaaggcttacaaaaatgtgagaagactcattcgtcttggcaacaaacaaagctcatcgcttattagagactaaggttgaacggccggatttcgatttatatcttgcgatacaatgatgacaggtccatgaccacgcaggagatagaagcaaacctagctttgctgatactcgctaggagtgagacgactttccaaattcacttaatatagcacggcaaatctcctggctgttattccgcgtgttgtactaagggagattgcatttagggtagtttggtttagagaatgcatttatctgttttcgacactattctacttagcctcgaggcggaaagtcggacagtcagacagtagttcaaccattttcacttgggcccagtaactgtcttagagtaaaatgaattttggcttatggtatcttcagggaccgggccaactgtattcatccacaactttgcctttgtggagatgcgtctaactgcgaccagggtcttctggagcttcgactttgacacgaccatggacgagagctcaactgcttgaagtattagaaatcctggaatttctgggaacccaggccgttgatggtgaatcacagcattaaaagtgtttcaattagccgtctttagttgcctttagtataactaagtgttgtgaattgctatacaaggtacccaggtagccattcatattatagaatcgctcgccacattcgtgatacgagaggagggaccattaactagcacgtcactatctgccaataaacaaaattcttgatattatatgcgcgtgcccttttggcttttgggtaaccgagaatgtacatatttatatcttactgagaaatttactgcgcatacatgtataagattgtcctacaatagttagtccttcttatacatatgtgtacaactttgaaactgagacaccaatcaacgctggaactaatgagattaagatcataggctagggctgcacatttgaagacaagactcggatttgatctttcttgaagatctagccctaagacctgtctctgaagttacacagcatgaagtttaagtgagttgaccgttgggtgtatcaatctttcccggtgaggccggctttgtggcgaattgagatgaatatctagatcggacatgcaaacttgacaagggcctagcttatgtatcgcaatctaaaagcaagaaaaacatcaaagataaggtacagcttaaagtagcacactcggatagcaaagtcgagtataaaggttgcttcttacacagcagtcgatctactactcaccattgactattttaaaacatcgcaatcaatcaaaagaatgtctagctttgtctatatttttgcactcgtgcctttggcactggctgccagcatgatcaggatggtccctaatcaggtacggctatatggagtgtgtacaccggatcaacttgtttactctttatctaggctatgattcttaaagaacacgacttcgcaataaatgctggccgaaaaggagtgctcattgcgtctgatggaaattgcatggatcttgacaacatttccgactagtaagttgaatattattcccaaaaacatgaagttttgttgacgaaagtatcagccgcataaattttggatcaatctacgtcccatgtccgtccgaggtcaaggaagacatgatctgctcaatgtactcctaagtaaatagcctctgactacaggtttatggtgttaaattatctagcgataactcttgcaacaacgagctgttcacatttactcgaccccatgcaaatttgttcagaccagctgttggcgatagtgttggtagacatgtcagaagcattaaatgcacgacagttcattctcctgccgacagacaggaacatgtattctcaagtgatcatgcatctgccaagagtccaagcaactgccccaatgacagctgttccagtgaactggactgtcaatcaaaccacccggattatggtatgtactgctcttcgagctctctgacctgccagcgaacctctgagactggcagacattgcgaaggagacagtcggtgttctgggggcaattgttcgagtggagagtgtatgactgtcgcagagaactcgcgttttctgcagggctctgagtgtccttctggcatgcagtgtcgtccgactcattttcattggtctggagcttctaatgtggagatggtctgcatgaaagatgaggatgctcgcggaatacagtgctctgctgaaaggccttgccaagagcatatgccgtgcgttcttcggcatgagactagcacgtactgtgagtggaatggtacttgtgggctgaatactatgagctgtgagtcgggcagtcaatgctgctctggattttgcaaggccaacttatgccagtgatagtctttgcggaagatgtcaagcttggaggaaatggtatttgaattgagataaaggctgaatcttagctcggcttatgcaacaaatttgtttgaaagttactcctttcggggacacagccgctgaattctttccaatgcatactctcgaatttcgcggacaatatcttctgcaggtttcacaccatgtatcagtcccacagaggctcctgcatatgtcgcaagtctcccctcaggcccccagccgttatcgcccgtcttagcagcctcatcatgaagtcttctcagttcctcgaagggcttcccttcctgccgctcaacaaatgatttgttcacgatagtccggggactatattgctccggccacccgaaagtgcctcggaggtgattatatagtagcgtacgcgtggttgaggccgcaccatcgaccgcacgtacaacctcgtcctggtagccctggctaatgcgtgcttcactagcagccaggaatcgagtccccatcaccacgcccgaagctccaaggcacaaagccgctgcaacaccgcgcccatctgcgattccgccagctgcaaacaaaggaatttggctgcctgacatggcatctgccacttcgggaaacagtgccataagccccattccgtctttcgcccgaccatggccaccagattcagctccttgcaggacaatgacatctggtcgctcactgttcagaagaagctccttcgcctccttcagagtgccaatttgaatccagatttgggtgtcaggggatacttggcggatcttgcgagaccagtcgtcgtattccttgggtccctggcgtggagcgtatagccaggctgcacatggtttatacttttcgatagcggcgacggcaacattgatgtcgtcagcccagagctggtatcctatgccgacaggcagtgtcgagccgggagttggttttatgccggcctcttggtgtatgagcgatgatgctttctcgagatcatcacttgtatcctgtgttttggcaccggggccaatgaaccctagcccaccagcgcgagagacggctactgccaatgctggaccggacattactttcataggtgcgctgaccacgaatggagtagatacccatgggtatcgcgatagcaagcttgccgccatagtttgatgcttgggatagttggtagatattgctatttggataatatggcagtgagagcggtagttgtgtggtgccttgcgttttgtagttgccgaggaatcgttgacgtcaccatagaaaccccacaatgtccgcatacaaaacaaacaccaaatgtggctggaggaagttgcaaggcctcgggcatcacatgccattcccgcaatatccgcaatatccactgcccactcattccatccgtgataccctacttatcccattccactcggaaattgcgggatctctatcctgcttattgttcgaagatatgccacactccgacctcaagcgaatgcgcactagagttgcctgttacccatgccgggagcgtaaaagaaaatgcgatggcgctgaaccttgtgaaacttgcagtcaatggggctatgattgccactacaaacgtcagtcacgacagaggaaccatcctccccaacaaccacagagagaaattggtccagatccaaggcctccacagcaaaccgactcggttgatacacacgggctggatcgtcggttgtgggcaaactccggtgctgcgtttgttcggaggatgggtctgaatatcgatcctgcgaaagcgccaaaacttagccttttcggttggaatattggaaagcgacaactgtcgtctgaatctcaagctgtatatcctgtgctgtcaattacggatatcacatcattggaacacatgaggaccctcgctcaggtctacttcaccaagattgctccatactatggctttattgattcttctcaattttttgagcgactggaggctaggtggcagtctcccatgattagtagtctatatgacagtgttctaggtggggtcgctgcactaggttgtttgcattcccaacgaaacatgaccatcaccgagttgcatctcatcgcatccgcacaatctattctcgactctcacgttctgtgtggggctccccccgtagaccttctcgttgggtggacattgcgagtcgtctatatgcgaatgacagatctgcctcactcaacatggatggcgagctcgaagttgatgcatttggtggaagctgcaggattccatctagagtctactgattcagtctttccgcgtagtattgacacggagtttgatccagacatccaaaggcgactcttcggcgtggcactacacctgaatatgtggacttcttatgatcttggtttatcaagagtgtcctttcgaaagaatgatctgccattactcccatcaactatcgagggtgactacacgcatgagctgctggggcttattccattatcggcaagcctagatccaggaaagccaaaagaagatgatatcaagctagaagaaacgcttgtgcagatactagaaagagtccataatgagcctccctcggccatggcgcaatgcaatcttgtgctttgcattctgcgcagaattcacacagagaaacttgagatctctcctctcctcgcagaaaaagccttagcggtgctggaaaagggactttcttgctcacgcactatggtcgcgaactgcactccctggcaacatatggcaaatgtacctttccacatcatatgtctcttgcttgtgatggacacacgccaatcgctagcgctactccccgaagcaatgcagacactgaagttcgtcgcctccacttacgatacaaaaaccttgagagaagcctggagtgcggctctcttgctggttatgcttcatcaacaacggaggaaagatgatattgcgatcttcaatgacatcatgaacatggaggaacaagaacgtccagctggactatccccgcaagaatttccaagcgcggaagagtactcatggctaggggctttggttgctgatctacccggtttgcaaagggatgaccttgatcaatttctgaattcggatatgattgatagttcaagtttcttgggtggagctagatgaaccctacctagaggcacttaagtttttgagacatatctaattctgtgtgaacattgtcttgcctcattttagaccttgtaatttagttttgctttgaagttccacatggtacaaagccttgcggaaattgcgggcgccttgctgtgcctggctggtaaaattctctgttccgcaatacccgcttctatacattgggagatcaaaaagctgtttgaacaaaaacatgcacacccattatttattagtgttcataacccaatattccaccacagtacaggaagctcggcctgaattcagcatacctggacatccaaccatcaagctcatcgacagaacgtgtctgcacgtcgctactctatcaagtccaaaatgcatgagaagacactgataggagccaataacgcacttccgccagctctttccaacacagtaagctatgttgattttgaaggaaccgatgaccccgagcatcctcagaattggagattgtctacaaagtaagccacaagtccaaatcagccaaagatctggatattctgaatgcaaactaaccacattcaggatttttaactctacactagtctgctcaggcaccttcatcgtctcactaacaagcgccatcttcgcaccgggaatcgacaaagcaagcaaagcgttcggggtcgggacagaggtcggaacactgggaacaaccctctacgtccttggctttgccacaggacccctcatatgggcacctgcatcagagctacggggaaggaaatggcctctgacaatttcaatgttaggcggtggaatcttcactattgcatcagcagtggccaaaaacatccagaccctgatcatatgccgtttcttcgctggcatgtttggcgcaagccaattgactgttgttcccgctgtattagccgatctatatagtaacgctactcgtggtgctgcaatttcgctgtacgccctgaccgttttcgtggggccgtttacggctccttttgtgggtggcttcattgcgtcgagttatcttggctggcggtggactctttatatcccggcaattttcagcctgtcaattgcgctattgagttgtttctttttggctgagacatatccggcttctattctcgtgacgaaggctactgctatccgcaaagagtcccgaaatcgcaatattcgtgccagacatgaggatgtcgaggtcagcatcgcagatctcgtggagaaatacttcacacttcctttgaagctgctcttcacagagcctattattctcgtcgtgtcaacttacatgtctttcatctacggcattgtctatgcgcttcttgaggcatatccctacgtcttcgagcatgttcacggaatgactcctgcttttgctggtctaatgtttattggcctcatcattggcgtggtacttgcatgttcctttattcttttcggacagttggcctatgcaaggagactggcagagaataaaggcatcccagtgcccgagtggcgcctcgctccaccactcttaggagcgcctgtctttacaataggtctcttctggtgagtagaatgattttctattagaatgatgtatgatgtcagctaactgtccatcaggtttggctggacggggttcacccctcagattcactgggttgtacctgccgcagccgggatattcatcggcttcggtgtgctgtgcatatttcttccatgcttcaactatctcgtcgatgcatatttgccaatgtaagttcttggcccctctacttgaagtagtcaagacactctgctaacctgaattgtagcgctgcttcagctgtcgctgccaacatcattcttcggtcagcagtagctgcgggctttccgttattcgcgaggcagatgtttcaaaatatgggaattcaatgggctagcacgctacttggatgtttagccgcaatcatgattcccattccgatcatattcagggtttatggaccatggctgcgaggaaaaagcaaaatatttgcataaaagtgccataacctggattttgaatgaggtgactttgtgggttctttccgtatggacaggtcacagtgagccacagctgctgccaggccgaaaagcatatatagtgtgttgataagagttgaaatgcttcatttacatattctcaaggtccaaaaaggttcgcactcatcttaaaagctcgatcgagctttagctctaagtgatcgtcccaaagtaaacaagcgctaatggagccgataccaacccaatgatggcgatcacgctgttgcccgatccataaccaagaacttcgtacatattgggcgtagatagcttcattctaattcagtattttaatttctgtcagttaaaataaggcatagttattacggcatattaaggcatcagctctacaaaatcaggcattcggccactgaccgctatacaccttcgcacgccactaagctgctttaggcttcagcagttctgatgacgtggattgcgtcgtagcagcttcggagaaaagaaattcatgtggatatctttcattattatgtaaattgagagcaggagggacgaaaaatgtgataacattggaaaataatacaaacgaactgctcccctgagctctgttcacatggagactacaattatgatattgaacaaactcaattagtttacttcaagagtcgcaatcctgtataggggctctctccgctcattcgaggttattgtcgatcgaactgtccacggcccatccattgagcatagtgtagtcggagtatggcgaggtgccgtgcagggtttcatagtgcttgcgaggcccacactctctcaacttggcagagtctgcgttgacgcaccgcttctgcatgatagccgcgatctgtcgacccgcatcctgtccttcatagtatgcaccgtgaaggaagccaaagaaggtcgggctggtagcctcaccggcaaaccagagccggccagcgttggcacgaaggttctgatgcatctccaaagatgtggaaggaggccagttggagtaactgccgtaagcccagggctctgaggtccagcgtgggtacatgaatgcagttggctcgggaatatccttctccgggaacatcttgcgcagaactgccattgcttcctgcttggtctgctcgtctgtttggcgctcggcccgataggcaaactcgttggtcacggtcacgaaaatgatgttagaatccgggaggaatccgggagtagatagtgactgccagatcgggtaccagccacgggtcacaggatcagcatagaggtggtattgtgtttccgagggccagaaggtctcgttgaactggaagaagatcttggtgtatgttcccatggtgaacttctgaatagcttcctgcttccaatcggggagttctggggagaagttcactgcgccattttgcagaactcccagcgagaatgtggtaatagcatagtctgcctcaacgcagctgccatctttgttgtgaacagtgacaccatcgtccgaatacgtgatgttcgtgacctcggtgttcaaatgaaggcgggtatcattgcgagtgaggaaagtcgaggcgagcttcttaacaatgatattgaatccgcgctggtccaaaacaaactcatcgtggtcgctgaaatagttgaaggtcaaattgttgcccgcacagccgaagacaaatgagctctctattggggagtaagcagcctcaaagtctagtcaaagatgttaatatcgcgctagttgcatctgcaagagagataacttaccccacgaccaccagtcagcagcctgtgcctccatatcatgtaccttggggttccaaccagccaaggccatgccagacttgacgttttgatcctggagattctgagtaagaatctcacctgccctctggttggcaatatcataggcgtcgtcataggcatcgaggagatcgctatagtcagaataaccatccttgttgtaggtagagacattgtcataatttgcccattcggtggtcaatccgtattttttagcctgtccgaggtcagttcgtgtccgatcgaaggtatgttcaagacttaccaagccccagatcgggttctgtggacctccttccctgccaataccttgtacctgtttgacctgtcagcggtgtcctttcctgtagctgaaacatgcatacccaattggcacccatctcaatagtataaggcttcccatctttgtcttcaccgaacgacttgtgccaagcccgaccgccgatagtatcgcgatactcgagaatcacgaaatcgtgcacggaagcattcgttagggcttgctatgaaattgtcagtgatagtccaagataaagcaaaggggaaacctacagcagcagtaataccagccacaccacctcccctatacttggtgagcttttgacatcgatcaataagaagtccagcacttacaagattgcaaccttagtcttcttgcacgttccctcagctcgagtgcgatgaggcgcaccgatagcaggctggatagcgcctgctatcgcgaccaaaaacgaaaggtgctgtaaatgcatggcgaagctctggagatcgcaaaacagccccggggatcgattgcaataaataatgcagaaatcgaccccacacagggctgtacctgcacatccagagaaagataagaagccgactccacgcagccacgcgacccgggaactccgacttcctcacaccttccgcaatcgggcaagtacatgcgggaagctaagagaagcctaatttaaagcgatataggtatctgcggggaggccttcaatatcctccgttttgtgatttaatcatctctaatctcattcctattacgtttggaatgctgaaattagcctggtccgtccatgtggatattcctaagtatcagatatactcgcgttcaacccggaatcttcgagataccctaatcgataacaaccaggggctactcgagccccgattgtcatccaatgtgctcatgatatcgaatatcgtcggagtacgatatcagttccgctaaaatggtgcacaggcaaggaaccatattcgacaattagtcccggcactgtagcctcggcagtcatacgtacctggaatggctcgaaagccgtgtagctctgtgaacatgcaattgaattgtttcaggcaatgtccccggatgatcgtcgtaaatgactctttgaaaaggctgcaggaaagactattgcttccactaaggacttcatgctcacctcggcgatttgagataatctagcaagctccggaaggtcgttggcagatagagttcgtactattgttgctgaggttgtttcaccgatgatcaatccgagctgttggccaacagaataggcagtaattgttgtctaccttcccacctcgactccgtgccgacaaagctacaaattatgtggtaaataggcccgccattccggttcctgcaaggaacactgggatcagactaagatagttagagctggagcaccagaaaaggagcactgcgaaagagataaccgttattcccaatccaataatagacggttttttatatttcatagttctgattcgatagttagacttagcattcaacttaccgacgaatgaaccgaccatgaataattgagccgagagcgatacctaggggaattgtgaaattacgaggcgggataagcccaacgttggccctgcacaatcaaacataagaaagggaaggttcgaggtgagctatttggttagcggagtagcaacaccatcaaattcccaatcgaaacccgtaggccgcggaggactgcgaattgtaaaagctcctgacaagcgccgtaacgtaacgactgggaagaaaacaataaggaggaacagtcctatgaatgacatgtttgcccattagttcggagatacacaattctcagggatggatggtcccatcgcagccaacactttgattggatcgccgaagcttacccaacgtagaggtaactgaaaggtagcttcgtaataccacaactttgaacggacaaacaagatctccttgtaacccacttcttgtatgcaatggacacggaaaggccgtgtatgatggggaggggggttatctaaagtcacagttagaacaatgaggtgtcatcgcaatagtttccaatgttggctttgagaagtcgaccgctcaagtggcaatcgtggcatcaatgggcatctgtcaggcgcgggtgatctacaagttatctctaaccagcatggcatttgtggtcgagagatttattcgtcatccagtgaatgatcttgtcaaggcagctgagacaaataggaaagccccagtcatttttctcatggtagtgtcaattcgattcacagaggccgagagatgattagtcgagtttgccgatgtctttgattggacatggccgaacacttctgcgcgagttctgagatacttcaattgctgtctcgatgagatcaggttagtttctgatatgtcaaatacataatgagcatgtggtgatgatctgcaaggcccttgagataagtggaatttcctcatttccggagtcccagggcaaccaaaaagaaaacatctttgtccatagatacaaaacacataggacacgtagtcaagacatcaggaaacaaggcagaaggattgcagcagttgatgaccacagatctattccacaagaaatagaaataaaccgaacaagaaaaacaccgccgagctatgcaaacaccgtgtcagatgccatctgacgttttcccgaacgccaaaccagagacaccgaaggttcagatagagagcaccagaagattattctgggctaaagcaaagacaagaagaaaatgatatgcagagaaaatttgctttcagcggaaggcgtaagaagggcgaaccattttcgatacttctggatttagagagagctgctggtaaggcgagcttcctgggtcatagtacaggccttcgatgtgtccgtcctcacggcgaagagaaatgtagtagaatccggaaatagtaagaccttgacgagcatctgttggggtgatgaagcatcgctctacggcatgttagcaaaaaataaaaacatacatgatctttcgctacttacccttccatctcatcaagatccatccttgagacaattcctcggtaatccatttccgattcacaagattccgggccatctcagcatctgtcagatccttaaacggctgcagttcacgccagtatgtgctatcaatgtctgcatctgccttgaagttctttgtcgccagcgtgtgattgttgaaatcgatgatctcgccctccaagaaagtcacaatgtgtgcgtcgtgggtgggcgaggtcttatcgggaatgttgtaggcctccatagtgccggataatgtcatgtcctcgtggttgatctggtgtatcgtgaccttgacaggccaattttcatcacgattgttagctaagtatcggcggccacttgtagtagaaacgctgattcgtgcgctctcacttccatttacaatgacaggctcactgggggcgttcggactagcaatacgctgcgacaatattgaacacccggcacttgcagctctttggcagcctgaaaaggccattccagatcgaagccatgaacactccgcgggtggtgcgatgttgcgagtgtacataatgaagttcgcgtttctccaagatttgctatccatcgagaagggtatccgactgtccaccaagacacgcatactatcttcgagagagtttgaatgccgaatgcgctcgagatagtggatggtctcccctaacacgttgcgcatacttgtgtccgagtgtagctggcgatgagcggcagcccgagcgcgtaggtcgttgtgggtgaggttggtattgtgtgggtcaccgcgcgtcgtaggacggtagcggtatccccgagatgcgaccgctgctgtattttcagcgtcctcctctggagtgatatctgaatagcgatcgatgatgtagttctccagtgtgcgactcctcgaaagccggggctgacgccttgcagattgtaacaaagccgccactgcagagatcgatgtccgagcctggttactacgcggtaacgtcgcagaatcatgcggcatcagttgcgcagggcccagggcctcattgcgcggaggtcgtgcggggggtgggtcacgacttgagatagcactgaggaaaggctgcatctgatcgtcttccgactcttcgcgcgcagcaccatcctcgtcatcagagccgggtgcccatccatacaacgaccgtgagttgggcattcggccctcgtagttcggcatgtcggttgatctctcctggtggcggacaatagggatgcgacggttgagttcaacagacgcgcgcaggttcgtgggatcatccacctccatgcggtcttcgttttgtggtggcggattagtcggataacgacggcgacgttgtcggctcagggagggtaatagcggattgaagagagctggtcgcgatcgcaggaagttcacgttgtcatcgtgagcattatcggtctccacaggggcaggtgtgggaatcgacgatcggcgcggagggtcaggtgccgcggtcgtcggggagagtggcgtgccgtactaaaagatattagttcacaaattatactggggtgggttgcaaggataaaacatactgggttaggaggcggcattctgatcagaatgcgccgtcaaggggtgtgcaggatcgacgttggccatgcaaggccaagagaccaatatatgtgtagcaacaaacaattaagtccggggaaagatgtccacgaatcgcctgagaaagtgtcggatgttgtgcttctaggactttggggatgtggagaggcccgcaacgtatgacgttcttcctttcaaccggctcagggcctctggaagaatccgtggacttcattgaacttcatagggattccaagttgatttttacgtattcttattgaattttatatagctgagagtcaaatcccctgaaagccaagaacgtggagccccctgttctgcaaaacaaacataccaaaatggtgtgatctatataggtcattcaaacccctttaaatgaagaacaagcttacatcgagcttgccatatcctagcgattaaacctgaatggctctccatgttggcaacccgattcttcatttaaagggaaattgcgtttagggggcattggttacctcctattagattgcctgtcgggttgtctacgggccaaataaaggctttgataaacaatgcatatggtcatgagtcagtatctaggtactaagaacaaagaatgaaatttctcggagtacagcttgtgactatttggaaggcaaatcctgatctacagtctccatcaagatattgtcctaaacagtggagctctatgtgcaattgaggatctaaatcacagtctaaatattaaccagaaccctgaaaggatttacagaccatctaaaatgttgcaaatcaggccacgcgtgcagcattgcaatcatcggccagctggacacattgtaggaccatgttccagaaagcatctagatcaacacccctgggaatagcaacacccggaccatcaacaggagtagcgatcgagcgccccagttgacctgtaatagatacatctttcccgtgctttccatcggtgacaatactcaaagcaaaacgctcgccgcctttgtcatcaaaagcgagagtttgattggggtgcacgttggcaaaggctgggttcagcgtcgacaggatcgcggccacagcaaggggatcatgcaatggaggcccggtggtcaaaccaaaggttttctcgtatgtggcagcaaagaaagtgagtagcgcgtgcaatatctgccgaaggatagtaggatcctcggccgagtggatcgagccatacaagatgcgcgtttgaacagcctgtgtggccaagacctgatgtgtgagatctaaagccataatagctgtcttagaagcaagaactgggttgctaaagattgactcagcagactctgggtcacactataataccatcgtgattagacgagccagagaaggatgaaaggttttgcgaacgtacatagaagttgaactcagcccatggggtcacatttccgatcctagccttctcaccaggtagtctactcatgggggcatcggtgaatcctccaccaatggcaccacccataatgctcagcccttggatgtgttcagctacctcggggaatgtggcaaacaacagtgcggcgttggtcaatgtacccgttgcaaccagccaaggagttcctttgggttgtgcaagaagagcatctctcatggccacaatggcgttcttatcggtgatgggtgctctagtggccttgggaagaaggtcagtcccatcaagaccggactcgcctggaaagtgttattaaaacattctgctcctgatatcagcatcaacttaccgtgaatatcaggtgcatgaagagcaggccgtgaaaatggcttattgctaccaggatagacgggaatgtcaggctttccgatcgcttccaagacgctgccggcattggcggttgtcttctctaatgatgcatttccatggacagtactgattccaagaagcttcaaatatgggtgatgagcggcgatcaaaattgcaaaagcatcctgtatcgtattaacaaatgtctctctagaatttctttgatgcttacatcgtggcctaagaacagtcagtaataagaaggcggaaggaacatgatagactgaccaggatcgcaatctaaccacaagggagtaggactatattgattaacttggtctaacatggtggataccttagagcaacaaatggaattgaaaatcaagaggccacttgggctcttaagtacatttggccggacataaacagatccccgcatcaaaggagggagataaggcttatcttgaagccctaagccctatggtcccaattgggtcgatacagattatcaacgcttctaatgtcgaccttactgcttttaacagagaacgcttttttccttgatatgtgttgaaccaactctaaacatctgtgcgatgaaatgaatgatccgctccgccccggccttcagccgatatctcatcttaaggctgggccgacaacctccagctccagatccaccgcgctgccttccccaacgacgcttcagcctccttcgcgtccttcatctcgactccgtacacaaagagatactggcaaggatgatctggactccgttagtgacaaggccaccaccgctctaatccgacgcgttctatgcccccagacaagcagccacggagcatcttccccacagcctccggaagagctgttacctcccctcacgagctccaatgacgttgatcgtcaactctacgcccttctcgccatcataataaaagaatttgtttactcgtggtactcgaagatcacccccgatcaggctcttgtgaatgaggttctacaagtaatcgcgcattgcacgcgtgcactcgagcagaggctgcgccaaatcgacgttgcacaattagccctggatgaaatccctagcctggtggaagcacatgtaatctgtgagacttgaccgttctaaagtccctcttgtcggaatccatagttgttccgagaaacattgctgactatgatcttccagcatacagactggccaggcaacagtcacatctttctggtctaccgacatcataccgtacaatctatcatgagctaaacccacaccctggtctttctccagtacctgatccaggagatccagatacaatcgtcgagcagacagacaacgaagcggtctatcgccgactactcgccaacggtatcctagcagttcttcttccaacggaagatctcgagaacagcagtctccgggcgcttgtggttgatatcatagcagacctcattctaggaaaccaagtcagtggcagggcatgtgaaggatggttcatttgggaaactatgggcaaactcgccgctcaagtgggacaccgtcaaaaccaagatgacacaaaatctgccccggacgctggaaccaatcgactagaaaaattcggcttgctttcaaccgaagatgagcagctcccggaccagccaccggcgtcgttctcggccactgcttggatatggaaccttctgcagacggtttatcttggttatgtcgtcttgcgtttcattgcgataggcttatttcgtgttgcatcgagtccaggcccttcttcgcacggtgttggtgtttcacctgccttacccatcgaccaaaaaagagatgggatggagtcgtccgatggcatcacacgtaggcggccggttctcgactaccggatgtatgccatgatttcgcagatcctgggactctcatggagaatgccatggctgagtggattgcttgccctatcccaataccttattttggcaggcccaggcagggtcggcgctacggacggaatcttagataggtaagttcttgttctattttctttttctttttttttctcagtctgctgcttctctctgcaacccctcaacgccccaacactcgagggctcaggccttgggaatcaaagactgtggagcaacggtacgatctccgaaacgcaatctacgggtcaagtgtcacttgtgcgagtcaaggtgggacatgaagcctcttgctcgcatgctgcgtcggtcacttgatctgtaaccttggaaggctgcaattacctgtgcgagggattacggtcatcttacgaccttacgagatctccttactgtacggtcattaccgtcagtcttaccaggctgttctggcataggattggttgccctcaaattggcccgagcgacttgaatttgtcaatcagggatgtctgtgggctgcccgcggatgccccgtctctgaatctcctttgagacagaaaaatcctttgtgtgtgatagcgccggggcccggccctttccgtaccgctcgtccacttttgtgttggaaatcttgacgattgcaacatctgccaactttcaaagcgcttggtttaccaaacaaagaaatgacatcgcatcctggcaagaatcgtgcaccagcaaaaaagagaaagaaaatgcaaaaaggaaaatggggccgatcacccatcggtgaaagtgaactaaggcctcttttggcgcaaaaagaaaaaaagaaacagccccagtcgaggctagtgaattactggattcggcccaatgagcgaaattcctgtcgggaaggattggaatttgtaagctgaccgaggttggagcataagcccgcttgtgctccaggtacggagaacgctgccgggatgttacccgctgaagaggtctttttctctttgacgtgcgagaaaatgatatcccagtccttgtcctggcccaagctccttcatctctgcctaggccgatcatgctccgcctcacccccactccatacggccaatcctgatttgatggcaacttcgacttttccttaactaaacatgtgcgagaaggggaaaaagccacaacgtcccggggagctccacagtcgagattctttcttcacttttttttcaattaatttattatcttttttgggaatttgctcaattgctccgacgtcatgacttgagagagacctttgctaactgctacagattcctccgggagactatcgaggagtacgtgctgacccccactttgttgcccaaccttcttattgtaacaaggaccgccttgttcccggccaatacccgtccaatatctcagatagcggctgggaatattgaagctccgtcctcggctctgcagtcggtgcagacctcgacgcccactcagcaagccttcgcacccacggtctcaaatactcctattgtggaaggagtcaggggccctgatgccggtatctctaataaaaccaataatgcgggtaacagcagcaacggcggcaataatgggaggggtacctcaacatccacctcaggccgccaatcgtcactttctgccattgcagccgatgtcccaacaccatcagagctaaatgacccggccgaaaccgtaaaaaggaacggcccatctaggacggagatcgccgctatcaagcgacgatgtgcagctagtctcctggccgttatcccgcgctccgtcgtacgaactttccttggtgttccctcgtcggcgcctccaccgcattacagtagtgatggtacctgcagcaccaacagtttgccccatctcgttacgtcgtccccaccaactcccccaagggcgccccatgaatctttccaggaggggaaggaaaatctggcgccgtcgcattcgcatttgccttcggacccctgtccacttgcatgtggtcaacttgccgctgagcggctgcgcacagacgatgatccgtctgcggggattgatcgcgaggaattacatctcctagacacaatcgagaaagactttctagacctctttgcagatgagtactgcaataaacatctagtctggagcattatcgagacagttctggccaaggtactccctgaaatggctgagcgcagtgttgaagatttactggaggatcgtgggatagcgtcagtgccgcctgcatttgtatagagtacatatagtttgcggctttgttattatcagcagaccttaattgatgagatatgccttatgactagcataacttccaaactcaaaaatagtgtgattgtagaaagatatcgggggtataatagagaaaattaatctgacatggttcatctataggcgaaccagaaaatttcatgtcctttccgcgtgagcagcccagttttttagaaaaaagaaagggaagaaaattggtatgaaaagagcgtaagaaagagattcagtacaatgtactccgtaggagatcaaggagaacagaatgctagagaaaacaaatgacagggggggatatagaaaaccaacagcaaaagaaaaaaagcaaaaaacccgaagaagaaagcaagcggtaaaactcccgagtccaagtccgaggccgatgatcccaaatccgtataccatcacaaattgccatttgtccattattccatatgcatcgtccagactgggaataccagggtatgtgtgcgcctataaaatccatcacccaaaaaagttccaaaggaaagtagaggtcgccctctggatatgtgtatgtttttgtttggttgcccaggttttatatctcgttgccatcgcggactagagaaataagaaatggatataaagaaaggttccgtacaagtgatcaaaaaaaaagaataacagagtagcaaaagcactagatgaaggaaaggaagaagagaatggggaatcacgaatcaaagtaaagcagataatgttagagggggaaggagggaatgcctcaagaagaaatgaaactagcagtgcacaaagacagtgggggaataatcataaaaaaagagacaagaaatgcaaaatccaacttgcgcaaggactcatcccaaattgtggatgctccgcttcttcgtcacatgcgggatatgaatatcctcatgttcatcaatgcgcggcaagccactcaacagaaagccagcctggctcctggcaagttcaagcctctccattagctttacgatggtcatgtactcctgtgccgccagaccagcaggctgatggtcgaagtagttgatgacgagttcaagggcgcgacgggcctcgtcctgcgtcggtgatcctggagagctgacgggcgagatggtggtagactttgaccgcggcggcatgtacttggtcgtgatctcagggttgctgcgattgcgcttgatgacgtttgtctggcggaccgggaacatggcgggcttggagtcgtccatttctagtggggattgcagggtggagaccgtaagagattgctggagttcgcgcttttggcgatgcgggtctgtggtgtcatcggctgataggagggttggatcaatggggacgggaggggaggtctggctgtgcagtcggttggtgtcgctgttggtgaacgggagacgggattggctcgttggtgttgttgggctgaccatacccgccgaagaagtgtcgagtgaggttgtgctgttggaatatccgtgttggtatccccctgtcagatcgggcagttcagccatgtcgtgtttgtttctttcttggctcgttggggacaatggggatccaaagctatcaatggaggatgtgggcgagtggctgccagggcttcgaagagcagacccgaactctgtattgagctgaattgggctgtttgaacagctacgaattccggtagatcctctgcgcatctttgcgccgaggagattgttcttctgcttgaatttttctagccaggctgcagtggagaccttttccttgccttcagggcagccgcagatactggcgaagaaaagtgctttctctttgatcatctcatcgcttaggggatgtccttggctgtggaggttctttgcccagttggatagagctctctcaatatcggggactctgcccttagcccgtttgataggagaccgactcccatcttcagggtttagatacttttccttctggcgaaggactttggaaacagtgctgtatatgttagattgaatcaaataaaaagcgaggtcgaaatgataccttctctcgactccaaacaacgctgcacatcaaagtcaacctagttcctgaacacagacaaaagagataatgcttacctccaatatcagtctgctttgcagtcttgttttcctcatgatatatacacatttgccggcgatcatcgtcggtaagtgtcctgcgcggcgtagtccctccagtggaggtctttcgcaccggacacatggtagccgaaggtgacaccgatgtcggggtggtagaagcaggtaatccagacgcaacaaacggagagtgtgtcgtgagcatgctaggccaggaatgcgaaggcatgggtaggggcatggaggcgtagggcggcggaactgacatgccatacgagtccacagccatgagctgcgatgagccgtagtcgaacccactatattcgtgcatggggggcgagtgctgaggagaagcaaatgagcctatctccacccacggcgaatgggggaattcgctctctggctcatgatgagtctccgtttccatggcgggctcctccatggacaatggatctcaagaacaatggaggtagggctttttttggtggggttttggttttcgtgataggctcgaatcgggaggaaatcaaagaaagagagacaaacgagatctcgggaaacaatgaaacaatctaagtgtgagacaataaaagctgatgcatgttccactgcttccgtagacctatatagaattgctctgatagagagtattgtcccgagaaggtagctctatagaccacctaagtgaagtagaagggaagtgtataaagtatacaatctgcaagaaggtaaaagagcatgcgagtaaggcaatgggggttaaaaggaaaattccttggacgatcatatcgcgtggatttgacagaacgacagtgaatatcaattgcaactggcacgagaaagaccaccggaaaaagccatgataacctttccccccgagagttatccagcaacccggttggtgattggtcaatacagtgaaaagttccaaccaaaataataaaaaaatataaaaaaaatataagaatagccagaataatatctcgattttaatatttgctcaatttcaaaatcatccctgtaaatagaggaggaacggcgtctggttggttggccgtgcgatatattgcggcaggggttgcatctcgtcaggcccaatgcgtctggcgtattacggtgtaaaggtatggaaatcttcgttctcagggctaacgcggtttgttcttgttttttttgggatttgtgggatcttttttttttcttcttttcattctcccgtatgaccttccaaccaggatggcagactcgacggtaccgagtacatatgtatgttatatactggcaatataacctggcgctagctcatgttgtaaaatagagatgcaacagcgcgaaaccttgaccaatgtctgaatatctagttggtccctcactgtggctggccgttgtcggcctcgccttgacgaggctgagggtctcatctcaagaaacttgggttaaatcagggttgatcatccggagaaggacggggttcgttcaaagggtagcccagtttgtagctcgatttgctgggagccgggtagcggatcgttgaaccgctcaacctaaagcccgcttgacatccatgcacatcgtatgcgagaacggcgatcagagtggaccgggaagaggatagcggcaggcaaactattgattctgcttccgtgaaaagaatcttcattgggaatatcttcattttggccaaaaagcaaaccgttgaatcggagactcaacattcagattcctgtccctatagggtatattgcgaggcaaggttccgactgtggaggtgaccaacccggatccgggggtcttaatctccagtaaacacaaatcataaggtgaagtagaccgagagagagagcaaatccacatggaatagattgcacggattgaacagagtccatacaacgagggaaatattaccagactggggcagaattatgtgggcaggcggatcctaaccttgggagttcggaatatcgaccgcatcagacatccacgagagctgacacggctagaaatgaggaagtgagcaataggccgatcgttgggtggacgaatctgctgtctccgttgccatgctgttgatacgacggggttcatccaatacaagggccgaacagcaggttggatagtggtccaatcaccgggcgtagaaggcatctcttggctgtgaaaaagaggggaacctctcccccatttgccatgcggtttcggcgctaaaatccagccctcgtctttctccactacgacccactgcggtcccctccggcccgggaaccttcaccatttccttgcatcttgcatgttgaacattgtccaattgggaaggtaagggctagaaacagagagcagatacagactatagagagtatagagaatatagcagttggggaaggagtgtagttgactatcaaggtggtaccaaggaccgtaggacggcgggcttctacaacatataatacgctctactatagaacaggtattctcatttgagcggtctaggtagatggatactacccaaatatccagcaagaccccgcttgttcgacttaaccacgaggaagccgaatgtgaaatcagcctgctttatttgggcacttggaaggattcgttctcgaaacctgccgggatggaatgcgtctggaagacagataacgtagcaaaagcaaagcaaaaggtgactagggaggtctgacaaattaatcccaacactgaagaggacttcaattggtacggagtactctcgcttatttggtcgcagtaccaatcattatgcttgctgccgtcggattctttgctttgcaccagttaaatgagcggaaacaaaagaaatgtgtgacaaaattcagaggattttaattctaccacggattttaattagacggaaatcgcgtcgctagtaataatcgggtttttaaggaaaattcggggtagatccagctggcctgacgccattggagaggttttccgatctttttagggcaagggcattactcttcattattcccactactatgtcggagaaggagcaggaacaagtctagaccggtcaacattgaaatcctcaggccaattcgtatctttgcttcttgcaattggatctgtcattcttggctgtcattttcaagcttcgggagaaattatctgttaccctcggggtacacaaccgtagggtaacaagggtcagtgttacttgagtcaggtaccgatggatatacctgttgcaattccaatcctgcccgagatatctccggaaagtcgaattgtgcaaaataaatagaactgtgtatagaaaatcaatggtggatataggggaatatggcatggataaatactactctcgcttgaggtatgtgagtaacacacactagtagctagcaagatactttgtactccgtataccatacaaggctaaggaaaatagagtaagaatgcttcgctactctggggaagagcatggctcatgcaatgcaatgcgacggggatgtccgatggatcctccacgagatcacaacgtacgttataggctacacgggcggtcggtgccctcatagtcacctgatgaagaggttaagtatacataatccgtacaccctcgtacgccgatcgtgcatctgagaacagaccagatcgtgaacagcccctttctcgttttcactgaatcggcgatatgcggtctccacctcactagaactattttgtgtcgccgcagagattcacgagaactactcagtagcgtactagacttagtagacaccataagaaccccctgttgggtaaagtcatggacttcgtactcgtaatactgtgtattggataggaatcgatcagataaacgtccgcaattcaaccaatatgtctctcattcaccgcttgttcttagaatcatttgtaccttgcctcactttttgcttttttctgtttggttgaaatagtttggttaatttgcatttcgatcctgcgcagatctgtactccccccccccccccccccccccccacccccacagcgccnnnnnnnnnnnnnnnnnnnnnnnnnnnnnnnnnnnnnnnnnnnnnnnnnnnnnnnnnnnnnnnnnnnnnnnnnnnnnnnnnnnnnnnnnnnnnnnnnnnnnnnnnnnnnnnngcggaaaaattttccccccccccccccccctcaatgtcggaaagtagttgcaggccagcagccaagagattagaagctaagagattggaaaaacgtgctagtcagttgacagatccattttgatcttccccctatcattctcgagcaatatactcccttgagcctatcggaagccagactagcattgccgggtttatttcacatgtaatggttaaccgaaactcttgtggctttcgaatactacacgaaactttgtcatgctcgttaagctattagcattaggtcaatgcgttgtgtcgcggcccttctcttcacggaagtatagtatgcacaccataattgccttcccggctcttccgtcgaggctatcaacttcgttttttaccggggcttttaagctggcagctatcccatatagagactatgatcggcattaggcctaggcctttcggggactgactcgtcggcctcgaaagtaaaaaaattgggagacaagaagcaatgcgaacaaagaaatcaagccacaggcggagatcttataaatattagaattactagcaaggatgtttgcggcacgggaagtaatggcaaggggaacatgccaatcggaatgtcatcaaaataaattgttatgcagacatcctcggatctgtacatggtagggtctgttaggtccgggggcgataaggagtcgcatgatgccacatcaatcttctattccgtactgaagtagcacgacttggctaggaactgattggtctgacatcatcaatcctttatacggagtatgagaacgcaatttgtggctttcatcaggttggaacagtaggtgaaaacgagcagactgctttgttgtatattggcttttatttccacacaaccataaaatatttgaacttttgcgctcatgaaaaaaatggataatcataacaatatggactggtcgcttcaaagggccagaattcccaaaggtgccaagaatatcagaaagacccaatggccgttcgcctcgtgcgtgcccctgggctggtgtaacccctgaagcctaactcgagctcatcaaatcaagtcaagctatacctcaagacgcaagaccaaaatcagcaaggctatgcatgactgccgattttgatgtccaaaggtagactcaagactttcccctaattatcttgccgtgaacgagtctatccaaccacgctcggatccggtggcgtacggatgtctcagaaacctgtcagatcgcggaggcgtaaagacatgctggcacagaccaccccagcgcttggatcatctcgccgcttcgggctatgagtgtcaaggagttggcataaatcctttacctcttgacgatcgacactgtagctggtcagctttgaaattcatgttgagttttgttcttttttttggtatatttaccgatatcttcatcaccaagctcgtgggaaagacccactcgctgcggctgatgcttcactgagcggccatacacgatagcatgcttgaaatcgtccttgattgtgcggtgaatagcgtcacactgtttcgttagtatgattcttagaaagatgagggcaacgcttacgaaattctcgactgtgcatgcataagaacgcagcacaacaggtgctgaatagtcgggcgctctgcccttaggcttcgtgtagattctgcgcagcttgagcttctcccacatcatctccatcagctcgtcgatattccatccatgctccgagctaattgggcaggcgtctggaatccggtacagcaaatccaactcttggatggaaatagcgtcgatcttgttcagcgcataaatgacagggatgtagctgcggctcttggcttccaagacatcaatcaggtcgtcaatggtggcatcacaccggatggagatatcagcggacgaaatcttatactcgctcattacagctttgatttcctgggatctgttaatactcatcaaagaccaaagactctctgggagatcaacttacgtcgttgtcaatatgagtcaatggctgagtgctcgtgatggcaataccacccttgtccttcttcttgaagacaatgttgggaggcttcttattgatgcgaatgccaaagccctccaattcattctcgataactcgcttgtcaaccaatggcttgttcacgtcaaggacgatgaaaatgagattgcaagtcttggccaccgcaataacctgtcgaccacgacccttgccgtctttggcaccttcgataatacctggaagatcgagcatctgaatcttggcgccattgtacatcacttgaccggggacagttgtgagggttgtgaactcgtaggccgcggctagatgggcgttagagaaatcggttgtcaaggagggtctttacgaaccttctgaatgttgaccagtcagtttattcatcagtgtactcttgccgacggacgggaaaccaatgaagccactgcacttgtaagcgtatgcgatcgcaaatcttctcgggtaacttacacactggccacaccagtacgcgccacatcgaagccagctaatctcaagttagcacttagcagagtgttcagatctagaatactcacatccaccaccgccaccacctccagttggggtcagaagttcacgcttgagcttagcaagcttcgccttcagttgtcctgcatattgtcagaagacgtcatcggtgaaaagtcgtcggtgtgcgcgtacccaaatggtaagaggtgttcttgttcttttgagtccgagccatttcggactcgacctccttgatctgtacaaaatcattgttagtaatttgtttgatgctatgctcaaaaatctttgaccgcactcaccttttcaatagtggtcgacattttggcgatttgacccagcaatcaaaaatgaatcgaagaaaagattggaaatcctagtaccgagggactcgatatatgtcccttaacagccagcgagttgagcgacaagttttgaagaaatacacttgcgacccgtggacaatcttgtggcaccgcagtttttagtcagggcggggtgtgcgcctaaggcgacgagggcaagtatgtcatttccagcctgaggcatcatttcttatcgctatcgccaaattgcaacttgggcaactacatacctccagggctaggtaggtactgtggacattgaattactctacttggcctcaaatttcataatgaaaatacacggcttgtgtatactcatatcctagtttgtatctcgctgtggtggaccctcgatttcgtcattcggccaacttccgataccgcttctttgctacatagactttatcccaaacgcgcccagcacaacgctcattcaatatgccattcctcaacgggtctgagttgatcaccgagaaacctgcctttgagaagctcgtggaggaccttagttctgcgctgggtccaagttcgggtctggattctagcgatgtcgatcccatggagatacagctgttgatggagaaatacgtctcgaattcggatgaatgggcttcatatgcattaggtgatgcgagtaggacatacacaaggaatctgattgatgagggaaacggcaagagtaatttggtatggaaaatgtctccctccaaatgattacttgactaactcgttcagctgattcttgtatggagccctggaaaaggaagtacaattcatgaccatgccaacgcacactgcgtgatgaaggtattttttttttaattcgatacatgagtagaagctgatttgaaacaggtcctcaagggcagattgcaagaagatctatactcatggcccgaccaagagcagatcgagaatggccgaagctcaccacctcagctcatcaagcagacaacctacagcgaaaaccaggtcacctacatgtccgacaagcttggtttgcatcgggtatccaatccggaccaggacaactttgctatctcactccatcgtatgttctctcgtgtcgaaatgaacagaatccagactaattgatcagtttatacaccacccaacgccgcaatccatggatgtcgcatttacgatgaacgaactggcaaggccatgcacatcaagcagaccaactattattcgttccgcggtcagcggctcgatgatggacagaagtagtcttgtcgatgcccgttatcaataacgctcattgtggggtgtttaccttgtacattacctaagtttgccgaagtcatagcccctaatttggtagctgagactgttcccttcggatacccctcttgtactttatgttcaattacatattcttctccggcttttattcattattgaaaggcgttctgcggcgtgattggcaaaggaaatcttatttctggcatgtcatttactgggacttcttggatttctgtaattttttttttttgcttttggtcataactctattcagattcagaagaacagccactcatatgtaggcccgcttgctctacatgaaagcctcaacattcagctctagagtactgactgggtacttcaactcgtacttctcgagcacggtagggtgcagaataccgaaggagccaatgacctggtccttgccaccaatacagacgtggatggaagcagcgtggccggggaagtaagtgggatctacactgttagcgaatttcttagtctgtttcgaggaggtacacaccgtctagttccttgatataatacgagtcgcccgtaggggtctcgccctcgacgaggaagttggtcttaagcatggccatgatacgatcaagaagaccgtggacaatttcaaacccgctagttttaccatagaaggcagcagcaaagtgtctctcgttgcggctcttgcgctccagggacagatccttaaaggcaacatcgctgacctcgaatattttcatgggaacagagtggtgcttgttctcacggatggtcttgagcagacccgggagcaggctggtacggaccacctggaactcaagggtcttggggttagccagcttgacagcggtgtttccgtcatccttgcggttcagccagccaaagttctcatcatgcgagcacagaatcaacggtaacacctctgaccaaccggccatggcagtctccacacgaacaatgtcggaaagcttgttgatagggagaggttgggcgactgtgccagagatgttggggaacgcacggggcagcgagttgaaaccgtaggcaatggccacatcctccatgatatcacactggtggagtacatcggcacgggttggggggatttccacattgatgatgtctgagacagtggtagaaggcttggcgcggaaggccatctttgtgagaagagtacagatctctgccgggctgaggctcaagccacagcactggttgatgtacgagacttcagcctgagcgatgcggggagagatgtcaggggtgacgcgagtctccccgttatgctcagacacaatctggacaggctcgatggtgaacggctccaacgtatattgggagaacatggtgaccatcatcttgttcacaatatccagctttgtcttatcgagagctgtgatctcaattaaaacattggtggtgttcaggttgatcttcgagtgatcgccgttgataatgggtggcagagagcaaacagtccggtcggagtcgtagatgactggatagactggagagtcacgaatgatgtgtaggtacttgcccaactgttggtgcttctcgtagaagttcatcaattcctcgccatccatctcctgggtctggttcaatgggacaaacttgatatccttgggagggagagcctcataagtgaaggggcccttcacggtgtccaaatcatgggtaccgattgatacaagggttcgttgccgggccaagttctggtggagcttgtcttggagagcaatgaaagacgcataacgagcctggtcgaacttgatgttccgtagaatagcgccagctacgtagggtctgattttcgtggtctattttgatcagcggagcccttccacctgagcagagtaggtgttgaagtactaacatcttccttgacaataatccgctccatctgtgctggctgagtcaagttgtactcgggcaggggtttctgacccaggaagatgttcaacatgagcgcaatgccctcgaagcacagcaagtcatatctgatctcttcttagtctaggttctttcatttgttctcctcggatgtcacgcgtaccggttggcggggatctcaatcttgagttgcggaggttcttgctttccatcgacgatagggcggtctgagtttgtagtctgaaaagatcagtattggctatgtgtggtcgggtcttggagaatgtacatcttcgtcgagctcgattcctattcaaagtcagtcatgcccggcaagaatttcccagccaacctaccaaattcgaaacacagctcatcaaactcctccgtggtgtaactgcagcaaggtcagtagagttcaatgacaaagtccagagacgtactctcggcccaactcttggaaaagagcggccttgtcgaccgagatggtgggcatggtgggggttgctgattctggtgtcaatcagcgaaatgtccgataaatcaatgcggaaaccaagtaggcgactccgacagaatataaggaaagcccgtacagaaatccaggaagtagtgatcggtgcacaaagtattggatgactcttgcgctggtggaaattctgcccgcaagccaccaccgccacagatccccctcttttgtgacgatggtattggtatagtaattcccctccatattcaaatgtttgtgcgtacaccgccagtatgtaatttacaccagtaaacactcaaagctcgactgccctgctctggttgctgcatcatcgaagggggcttttttccttttctctttacgaatttgtatcaaatctattaatttgctgatcaaggtactcattcaattctcgaggtatgcttctgctgaaggtgtccatgcggccccaaacccccgccctcacgctaccaccattcatccccttgccatctcgcgaagtcggaactaatacttatcagccatcccattgcctcctacaccacctctgccgaatcgctgtcaggtccaacaccaccctcttctcatccaggaccgggactcagcgtgtctccttaatacatatccaaatccacaatggaaggccagaacgagaacgatgagctctaccccatcgccgtgctcattgacgagttgaaggtagatctccctccagtcatacagacagtattgagctcacatttctttagcatgacgatgtgcttctcagactcaatgccattcaccgtctatccacgatcgcgcttgcacttggacccgaccgaacccgagaggagctcatcccatttcttgatggtttgtccagtgttcaatcgcctagcagccccgtctaacagtaatagattccgtcgaggacgaggacgaagttttgactgcgctgagtgaagagctgggtaattttacagaatatgttgggggtccagaacacgcgcacgtcttgctctccccgctagagaatttggcggctatcgaggagcccttggtgcgagagaaggtaccacaccagctgaaagtttcttgaggcgcatgctaactttacaggccgttgaatctctcaacaaggtatgcgaacagctttcagagagccaagttgaagagtattttgttccgctagtcctccgtctctcaaaggcagactggttcacttcgaaggtctctgcgactggtctttactccacaccatacaagaaggctactccggcgttgcaacagagcctccgacagcatttcggggctttggtacacgatgaaaccccaatggtgcggcgacaggcagccaacaatctggccaagtttgtcaaagaaatgcaaacccaggtcattattgatgaaataattcccttgtttcaatacttggcgagcgatgatcaggacagtgttcgtctgcttacagttgacattcttattgcgatcgcggaggaaattcccaaagaacaacaacctagccacggcgtcttgttgacttcgctgcggaatctgttcgaagacaagagctggagggtccgatacatggttgccgatcgatatgaaaaggtaaatcgcctttgccgaatttcagactattgagcgacactgatgtatgcagattgccaaagctgtccacgaagaggttgtcacccgtgacatggttcctgcctttgtcaagctcctcaaagatacagaggccgaggttcgcaccgcaattgcgggccaaatccctggtatgataccctggttatatatagttgatacatgactaacacattcaggcttctgcaatttgatcgatcgcgacactctcctcaatgagatcatgaccagcgttgaagaccttgtctccgatccctctcagcacgtccgggctgccctcggtactcagatcagcggcctcgcgcctattttgggcaaggaggagtaagtatcctgcttatctgctagcaataacctatactgaccatccaggactattgcccatctactccccatgtttctccagatgcttaaggatgaattccccgacgtccgactgcacattatctcgaagctcgagcaagtcaacaaaggtaaatgctgtccaattcttttaaaatgtatgtcttctaaccctttacagtcattggtatccagcttctctcccagtctcttcttcccgccattgttcaactggccgaggataagcaatggcgtgttcgccttgccatcattgaatatattccactccttgccagtcaacttggagtcgagttctttgacgagcagctgagcgatctttgcatgggctggcttggggatactgtcttttccatccgagaggctgccactgagaacctgaagaaactgacagaggtattcggcgtggagtggtcaaaagcttctatcattcccaaggtgatggccatgggccaacaccctaactatctttaccgcatgacgacatgctttgccgtttctgtaagttcactttcttgctacatcagtcaatgctaattgtcagacccttactcccgttgtcaacctcgaaattattgagaactctctcctacctattctggaacgcctagtgacggatgaaatccccaatattcgcttcaacgtcgccaagtcctacgccgttctcatcgtcacactgcgtcgtctgccagccgataagaccttagttgaggtggagaagtccgaagagcctatcgcgccatcaccccggagcctggagttgattcagtcaagagttgtgccaagtttggagaagttgcaggaggatgacgatgtggatgtccgatactttgctacaactgctggtggcaatcaggatgagatgcaaacctctccttaaactatgcacttgttcggccaatacccaacaagacattttgtcaggttagagaataaccaagcgtccttttcttccaggcgtttttaatgtagagctttcacataacgtttaaccagggtaggtagtcaaaagcaaatgcgcaaataaagacgtgcggtgcatgtaaagccactagttactacaatacagttagtacatgcgtattagagggtaaagagagggctttaagccggccctggctagagtgcgccgggggagcacctgaaccttgtgattcatttgtcagcaaaaagcggcccctgggccggggatccagtccatggtcggactgcttgttttagttatcactggcagtatatcaaataaatttgggagaccaatatcaacatctaaaatatgcttttctaaaccgcagtgcgtctcatcggcatgtcgattagcttgtgatcctatcgagactctcatttatatgactcttcagtcgccatgtcgtggccataccatttcatttctctctcggaaaacgacaagctgcatcgcagggagctgcttgatcttcgcggctattacgcacaatggtcaatcattgttgtcatcgtcgcggttcgaatttttcgctttgctacgagatcaactgctaagtgggatggcccagtttctggaaaaacccgacagtatcttgtctgcgggctgtggctactatggcttctaggcctttccatatggaacagtggtgatggtaagtcttcatcttctggtaagtttgagcaacgagctaacatggaagattacctccatttgaccaaagcattggggcgagttggcctgtcccaactgccactgcaggttctaatgtctccggcatacatctctcggccggcagcctcatctgtactgtctcttcttactggtatccctcagccaacgttgactccgtaccaccgtctctttggtcgggcggtggtctctcttctgctggctcacgccgcgctgtacacgctgttcttcgtgcaatccagccatcctgactttggtatattgctcctcaaacgaatccaagacttagacgtccaatgtggcctagccgcgatattctcggccgtgctactcattctcttcgtgcggcctgcttcccagaagggactccagtcttggcttgtgcagggaagcttccaagaacgcagaaagatgttttactttggtcatgtgtctttggtggtattattgtgtgttgcggcttatattcatgtcaagcaggcgcagaagtacattctgcagactttggcagcttctatgcttaattgggtgtgctcttgggcgctatgttagtgtaggctgggaaaatataacatcctttcaaaaagaaaattcccttggtcaagatctcaatatttactctatggatgtaatatatgagcttgtgtagcatgaatctcattcctgagtgaggtccataggagtttttaatactttttttttttgtacttggttagatcttgtttttctgagacaacttcgatctacatgtatggaatttaaccccttttttctcccccttagtagtagaaacaacaaagagtgagtaggaagttcaacggtatgttgtataactatatagtacatgaactgtgtaccctgatatatattcgatagtggtcaggtttgctactaaatatgtttctaccaatgaattcctgaacgacattcttagttttctgtcgcacgatatacatcgatgtactccgtacggtcgaggaagtcaaagcacatttggtgacacgtatatgaatagattatggcgtacctcccctgcatccgggcaacgccacatactaatagattggccccttggagaattggggccacacaaattaaaacatcatattaaaacatcactgatcgcctttgtcttttagaacgcttgaacagcacatagatagctaattagattgtgacgattacgttagaaaggcttggcggataaggttcactaatagcccgaggccaactctagacttatggagaaccctcctgacgaccttagcctcgctctctttcttcatgcctccccccaatggcagcatgcgcattcaacggttgattgtattacttgcgatcggcgttcttgcctgtctttctctcctactactacgatcatcgaagcactccgagccgcagcccatagatttgcctcctcccgaaccaatacaacaccctcagctccatgcggggcagaacacatacctccccgaaaaggaacacccgatcacgcgtctggttggaaatgcccaacaagatttcaatcatgcgcagtcccggcaatccaaaaccctggccgaggccgtgactgaatacaagcgtcgctataatatgcacccgccgccatttttcgacaagtggttcgagtttgcccagtcgagaaatgtacagctcatcgatgatttcgataccatctaccacaccctcctccccttctggggtgtgaaacctagaacgattcgcgaacgggcgcgcgagacactcggatttgacaatgcgatgatcggtgttctaattcgcgacggcaaggtgtccttaacggatggagggggcgacgccggtaagtggcagcgagacgccacggccggtatgatgaagtctttcgtgaaatacttgcccgacatggacctggtgttcaacactcacgatgagccgcgcgtaatcctccccagcgaagacctccagcgattggtgcagacagccaaggatttcactatcccagcagcgttcaagaacactccgaccaatgcgtggtccccacgtgcttcggacctaaacaaaggcgatcgcatcgacgaggtgcgcaccactcgtttcaaccgtttcgcacaccaaccgacctggacaaattcccgagtatcttgtccggttaacagcccagcgcgctcgctcgaagaaaatcccactgatgacgttgatccctatgcctatggcgaactcggcttcatctacaacaccacggcggcctctgacatctgcaataccccctccctccgccatacatacggattctttgaccgacccaacgcctttgatgtcgtccacgatctgttccccgtcttttcacagagcaagatctctagcttccaggacattatttacccaagtccttggtactgggccgacaaggttccctacgatactgaaaaggactatgcttgggaggctaagaccgaccgaatgtactggcgtggctctacaaccggtgggttttcgcgtgcgggtggctggcgccgacaacatcggcagcaatttgtcgacaacgtcaacgccttaggcaccactcaaattctcgctcgccagggggacagctgggtttcccaggttatcaaccgagacgcctatcgtgattccttcgatgtcaagttcacatttatcggccagtgcgacccggacgactgcaacgcgcagactgcgtactttggagtgttcaagcaggctgggcaacaagatgcgtgggcgcacaagttcctagtcgacatcgatgggaacgcttttagcgggcggttccacgctttcttgcatagcaacagctttgtctacaagatcgccatcttccgcgaatggcatgacgagtggttgaagccctgggtacattacgtccctctcagcttgaaaggcaacgagtatgtcgagagcatgcgatacttcacttcagaagaagagggcaaaaaggccgcccttcaaatcgctaatcagggtcagcgctgggcacagcagaccctacgaaatgaagacctggaggtttggttcttccggttactcctagagtaaggacctcgtcattccatgagagaattctgctaacttgctcacttttcaggtatggtcgcttggtagacgacaaccgtgaacaactagggttcgttctttgatctgtatatattcccttcgacgagatgatggctttttgtttttttttttggactcctgttaataccccctttcccttggactgtcttctaccaataatatttgtgcatgtggaggtggcgttcggtctgccatagattgagaaaagctgtaaactgcctacaatttacagtgtaatgtgattgcaatcctagatttcatcctgatatcatctaaattatctagattatggataccccgtacctacatatttagatgtaggtacccgctgtcaaccgttttatatcgctgactcaggcgtgacgctacctgtggaccgagctccggttgccacagctctagatttattacaagcttcttcttgctccttcaacacatgattccaatatgggcaggaccatatcccgcgttttgatcggggcagctgtctttgcctatggcttttttacagttattctttacgacctcgttgccttagcaaaaggcacctactttagacgccccactgaaaccgagaaacgagacctacagcttggtgagctatatatgtaccaatcgtgaaggttctttgctgactctccagctcgtgctcgcctgtgggatttatctaaagatttcgaaggtctctctcaccatattctaaccttgcaaagcggattcaagttccattttgttagtaacgatactccaaacacaccgaaaaccgtcaattccgataaaccgttggtcatcttcatccacggattccccgatagctgggcgatctggcgacacattatcaaaaaccctgctctgcaagaggccgtttcactagttgcgattgacctcccgggatacggaggaacagagagcctggaagaatataatgcaacaaatgtcttggagaaattgacagagctgatcgtcactctgcgaacccagtatggcgtggactcgggcaacgagagcaacaagaagaggacgataattgtcgcccatgattggggttgtgtcttgtccatgcgtctcgctgccgaagctccgtccctagcccatcggttcatcctgtccaatggaccatcagtatgtcaaaacaccggggaagatgttatctcaactaacgtttcagatcaaattggttgaatctaatatccgccgtctactcttctcgactaataagatgctcggcaacgcctggcgttcaccaatgcatgcccgcgtcccgctgatgcaagcactccgaagcttcacccctctcgcccgccagcttgtcctatccggctatatctttgccatgcagctaccaacgccaattgtctactacctcctgtccggaggcaaccagtcactattgaaaatttgccacctcacctcctacaacaaggacgaatatacttccctcgacgtggccaacagtatggccagcaccatgggtccgtccaccgcagaatcggatactaaaacttccagcggtgatgcctatcctgccaacctcagccagcgcgcgttcgcacatgtcatgcacatggcggcttattaccgtgatcgggcggcgacggcgtcttggaccaagtctattgaaacggtcgctagcttacacagtatttcatccggaaagcgactgtccagcagcggagctggactgtttgacgaaggtcccccgggcgctctcaaagctagcgcaaccattttctggggcaaggatgatattgctcttgaccagaggatctgccttgatgggatgggtgattacttagcgcagggatcccatattgtgctgcttccccgcacgggacattggacgccggttgagcgtgagagcggcgcagctttggtcaagactattgaatgggctgctcaaggtgaagagacagacatcgggacggccatcgctgaatcctacccgggtgttcaggtcaccttttcgcgataaacataggcaatatgtcggacgactccaatattcaacgttttcgttttgcggggcaacccgaactaaagcggctaggcgatgtttcacttagaccagaccgaccacttatagaagatggattccatatatgctttgtatagaagtgtagaatagcatagagaatatcggatattgagtccacgaactgtagagaagaccgaaaacatacggagtacccaaaagagaagtccagcgggatcgctgatttacccgaaaccactccacttcccctcgggagctttgaccttagctctcctgcatcccggcctttgctttcccattgcctttgcttctctcaattccacaaaagatttcttctttacacaacatgctgtgaaaaaaaaaaattcaatctcctgttttcgtcgcccctcgaacctgcggcccaggtaccacagtcggtgtattgggctcctaccggcccgaactttccttggcgattgacaggttaaatatagccccgacagctcttctcagctcttctcgtcttattttggggggtttttcttctctgctccagacttctttgggcgcctgatcattctttcgctgttagactgttggatctgtggcgtgatggattccaatggaggagcagtctactgcacggtattttaccaaccccccccccctatgcgtacggcgtaaactgaccgatgagacagcttctgttgagtgacaattatcttcccggtaagttcccattcatgtgggatgtggaattattctaaatatctataggtgctatggtccttgcccattccctacgtgacaatggtacaaaagcgaaattggtggcactctttacgccagaccgactacaatcgaccaccattgatgagctaagggtacgtacagcatccccataatctcctatacttttggcttacctattagaccgtctacgacgagctggtcccggtgaactcaatggtaaacgacacgccggcgaatctctggctcatggaccgtcccgacctaattgccacattcaccaagatcgagctctggcgcctgacgcaataccagcgggtcgtataccttgattgtgatatcatagctctccgagcccctgacgagctgttatcactggaagcagactttgctgccgcgcctgacgttggttggccggattgctttaatagtggaatgatggttctccgacctaatctacaggactactatgcgctgagggcactcgcccaacgaggtatcagcttcgatggcgctgaccagggtctgctgaacatgcatttcaaggactggcataggctaagcttcacgtataactgcacgccaagtgccaattaccagtacattcctgcgtacaagcatttccagagtaccatcagtcttatccatttcattggtgcccggaagccgtggaatatgccgagacagattgtcccgctggagtctccgtacaatcagcttctaggccagtggtgggctatctatgacagacactatcgtctgccatttgtaagtggcatgaaagactatgaagatatggactgacatttttaggtaccgaccacgtcagctgagattgaaaaaacggcgttggctcaaggtcctgttggagatcccacgagcttccacggcaaatcagtcgagcacgaacactctgctgccgttcctgttttgagtatggtaccgcagtatgttcgcggagaggagcatgtctcaacatttatcccaccatttcctcccgcgccaatcacttttgcgcctcgactgagccacgaaacatacgagccagagatacaaacaccgacacaggcacagctccactatcccagtggccatattcaccaaccacagccgctggtgccgattcgtccaattagcgagtatcaatcgcccccatctccggccccagatgcctcgacctttgaggcgccaacgtgggatccttcacggtgagagcttatccctcggcgtcgtctacaatgctaatatcccatagagagccgccaccggtcaacacgagacccgaaggtattagcttacaacagaaaacctacaatatgtctgaagacacgcatctattccaacccccgtcatcctaccccgaggcgccgaaaaacatgtggtatgaggttccagccaaaccagagcctaaacctactacggtcttcccctgggagcaccatgctccgaaacccacccgcgtcttcgccgaggcacttgtagagttagtggaaactcccacggtaccatcagaacaaaagcagcattcacctccaagcgagtctactcctcccggaccctcatcttcttacacccgggtaccatatgaacccagtgccgaatcatggcaaacatacactcgctccaacgcctgggatgaggacccagagattcagcgctatattgagacgatccaaggacggcgcacaaaatcacaagtgaccagcccgggagctcaatccaacagccccggaaaatcacctcccacgccaggcttccaccccaataccaaaattaccgactttccaacagaagtcgagcgccccagtctgcctgtaacgccggccccgatccaccgcaccagctacgggaatgaagcctccggtacagccgctctccctaccgccgagggcgtgtgtagccaggaggaatgggtgggtattacggctgatgtgttctcttctctcctcagtgcaacgtacttattatggcggtttatagaatcccctggctcagctcgaggagctgcatcgtcagcactcggaggttttggagcatcccgagcggctgtctagtcggcttgccgctgcagcatatcgtgagcgttgacagtacttattccttttcttttcttttcttgtctttctgaattttgggataatctgactttatttgttttatgattgactgattaggagatgtactcgatcttgtttgattgttgttgcatatgcatgtgtatggagatttcatgggtgatattttgttatgaaataataactgaagggagcattgaattcttcctacgcttacatttcaattggagatccatttcctaggagatatgaaggaagtctcaaggctttaaattagttatttctaccaaagagtgtgtcgttggcttgatatacgctccagttcgaaattcctgtcacttctgaaccaaagtaatattgaacgattcgatccgattcgaatgtggacatgaaatcgatatcccctcacactatacgcaaagtaggcaccaggtaatcgaggaactcgcacggaactagacaacagatatcgaggctttgattccggtgtatgatacctgatattcaatggcaagaaaagcctctcctggtcaatgtagaccacacctcgaacacctttcaatgcgatgaccaacgtattggccagtacaaattataggattgcgaataatggctttgaaggtcatgtaattttgattgcgtgaggtagagtatcaggttaggttaggacagaaaaaaacatttactcctgagcgaaagtctccgcaccaccctctgcctctgcggcctgctgctcggcaagacgctgctgctcggcggcctgctgagcggcgatagccttggcaccgtaatcctggctcataggctggagaacgggctgctcctccttgggctcgatgatagtgaccgagtcggggagagtcttctggggaccggccttgccctcggggtcggagccgcgcatgatcttaaccttgataccgaggacaccctggcggagaagaacgtgacgagtggcggagtcgatgaactccttggcgggctgaccggagtggatcatgaaaccgtcctgttacttgttagccataatattcttcaaaagctcgttttgcgattgattcgtccggcgcaattcctctggtatagacgtacagtgaacttcatggacttggcgcgggcggcacggagctttccggacacaacaacctcgcaacccttggcaccggactccataatgaaacggaggacaccgtagcaggcacgacgaacggcaagaccgttaaggagcttgtagcggagggactcgcactgagcgacagcggagagaccgcggttctggaccttggcggcgtagagggagacggagttctcggggaacttgaagcgcttctggatgagggaggtgagctcgcggatgcggcgaccctgctcaccgagaacctcctgggtgtgggtggcacggacaactggaaagcccgttagcatcagatccccaatcgaattccgcagatcccaacgcgatcgtaaatcgtcctcttcctcctctttccaggcaatttcaccagcgattttcaagcgatcacacgagggattggtttttcggatttgacgtactgatgtcggtgacagtgggagtcacacggacttccacaccggagtagccctcctcggccagctcgcgctggaagaactcgttcagctcggcatagaagacaccgtcggcgacgaactttctgcgcttagaaatagctccctgaacagcggccattttgacgttcctggtggtggtggaatcgggggttgtcgacggaggggatcgtggtcgagagacttcaattctgagagtgcattatttagtggggatttttcgggactagggctgcttgcccgtttgggccagggctcaaccctcgcttgccggcgcttttcctgtttggtcctagtgttgttaccttatccctgaggcaatattcgtaaggcaataaggcattacctagtctacggattacgagttaacattacatcgaactatacggagtactccgtcattggacgaatcattcatggttgtttaaacgcagatgcataacatacagttgtaaattcttgcaaatcatatctgattcctttgattatcccgttcattgcatctctacttctaactcggtcggtttatcggtgcgctccgctggaaatgcaagcttagatacacccgacgtcacagcagctgccatccccgagacatcagtcgttttgacagcactatctggccttgcagtctcaataccagtcaacaccgtattttccgggatatcactgggtgccgatgaggaacgggggccgttcatctccgcatctgttcgaccgaatacctcattccaccaccgtgtttcattgacccggggaaatataagtcgttccttgccgcgctgattgtcatcaatgacagggtcatacagatggttcgtgaattgttccctgcgagcgaggaaataatcccaaacgctacgggttcgttcactggctttccaatccacgcgttccttctcgttgttgaacaaaaatgtgccatattgacaggagtagagatgataaagaagtcgtcgcaggaaacgctcattaaactcaaaccgtgtcggatattgatgaagcagctgatatgttgcgtctaagaactgatggaacacagggctcgtctcttttggcttagttatctccttctcgggaacccccgagcgcggtatagtaggcttcttcgcaggagtgtcagagtcataggtttgaagctctccatccaagtccggcaaagagtcacggctattgttgtcccgaccaaagaatcctttggcactaaggaatgcattttcaatggccttgcctgcacccccgccgtcaccaaatgcacgatttggatctccaccgatgcgttcattttcaatctggaaccatttctcgctgttcaaatgaccagaccggtgtcggaacatgtgtccaaatgaaagccagtctttctctaccagcaccatgaatccctccagcgtccggaagtaaggatccaaacaaatctggctcagcgcactgagctgactcgtgcgatcccagccatcagagcagtggatcaaaacatgagaatgagtgagaccaacttgccgagtgatcagcctggctccgtccaagatcccgccaatgtgcttcaaccagccgctgcgcgctagctggtcacgatttggccctaatggagtaacatctgagtccttcaaagcatcgatcactttgttcagcgagtctcgcatgacgtggatattgtcaataccaagatatgccttggtagcgaatttgtagttgtccatgttctctgatccaagtccaacagcctgcatggcaaatgcattcaccgtagggcgtgcgtccactatcagattagactgctgagcgccatatatcgagcgatgatcttcagaatcgccacttgtagcagctaacaggtcgtcctcgagttcctcggcattggtgaattcggggactatcacctggttcatctccgggctgctagaatccgtatctttctccgtggccgagaaactcgccaatggccgctcagagcgagaagtcaagaaaatagcggacagaagcttttcgtcttgaatgcttcggttctggcggacaccgacgagcggctgtgagcttctggtaatggtgcaattattgacagggtgaaagtatgtgagggcagggattcttgctcgagatcgatagcgtcctgcgtaattaagtgtattgtcggagatggaacaaggtacgggtatgagagcgggatacgtaggggagaacttaaatgtgttagtagagcacatttggactaatttgtgcgagcatacctcgtagttcatgttgatctctgaaagacgccatgctttcccttcgtccaagcagccctggcgtgcccattccttgcgcgggtcatacagctcccacccattaaactccttttctggcgggggaggctgatagctaaaggcgtaaagcttatcaatacgactcgatttgcacgtccactgtttgatgctctcgaatacatctcgtgctttgtgctcatttacaaagtaaaaacaaacgaatgtgaagtctcggcatcggaggcggatagaagagagctgacgggaagcggcgggagctggccgcagggtgcagaaagcgatgatagggtatgtgatccacagctctctgggccttgttatgacgccctttatctggtcttctggtgagattggtggggtgtgcgaaaatatgaggtggtgaggggttagatggagggtgccatcgacctgctctccgcggcgagccaaggtcacattgtcaacctggagtgacatggtcagtgattggtctgtggtggcactcaagatatgtttttcgaaccttagcaatccgtgttttctccatgccgtataaatcactggcgcatggtcttcatgatgaatatgctgggtgaggggaacagtaggacaggagaagcggagaatcggagggcagcagtgatcacgagtgagatggaccaatataggtatatataatttaatgtgggtctgtaatcaattggggcgactactcagtctcaagcacctgcctgggccgccttggagttatcgtgaggcgcgcagagtacatgtagttgggatgagtggtgttacacgtcacgggccttgatcggctgtggggcctcaccaaggtcacgcctacaacctatattatgttctatgcatttttgcgatacccggtcagaatagattaatttcaaatgagaaatctcggcctatatagattaaaagccaaagcataatccgtgtctagagcatatatattttacataatgtacagtaaatacaaacccaagacgccgccatgatggccgttgatgcacgctgtacaaattcaaaatagaagtgacccatgctattaatccacgtatcttttgccgtggattttgaatgccatgtcacatgccgcgttgtagaacgaatggaactcatgatcaagctgctcggagtggttattccctgcggccaagtcaatttgaggaatctgcatacccagagagacctcgtttgtccgagcagcaaggaacgaaccgctttcgtagtaccggtagtcaagcggccgtccatcaaagttgtacttttggataacggcgcctcgaatgtcgctgagtggagggaacatgtattccacagcgatgctgctctctgccattgattcgtctgacttcttggatttggttttttgcgaggcaggctgatgaacaagatcacagggaaggatgatgttgcaaaatataggaatgtgaacaggaccttgcgaagccccgctgttgacaattgagccctggagtgaggttttaatgctttgcagcattacttggatcgggagcgaaaaggaagtctcggggaagaggtgctcagaggagctttgcgggttttctgagttgggagatgacttatacaagaggtcttgggagatagttcgtgtgaaacgcaggtccagaccattttccggaagcaagtagtcaacgctgtttgtggcgaggatagcctttacgctgtggacgtccacgccattcaagtttgaattcacggctatctcaatttcgagttccggtggggatgctgtgtttgaggttggagacaatcgaagtcgatatagctgtgcctcgttcttcgggcgaataggcgtgagtgtgttgatgaaacgcgacaccagaggtacgtcgtttgtgaaagcccgtggaagggagagtctccctagctgtgccggactgatggctgtatcatcgaaagagggcttttgcataaaaaggcatttcccaaccacggctgtcacggattcatgcaaaccggcgacaaaaccgttcttcggaggagtaaaacggagaagcttcaatagttcatctgagagtcgtgtttgatgcttgtcgaagaaaggggtttcgagggattccgcctccgcgttttgactggaagacattgcccagcggaaccaagacttttgctgctcgaaccacgaagcatgagtttctggtttgtagctataggcactggcaagttctgaagcaggtaaatatgttgaaaatggcgtcgatggagatgtagtgttggataaggccaagttcaaggtcctccgcgcattatccgctcccaacttattctcgttaagatagagaatcttttgtggtggtctgtgtgctcggtgttccacaaatacaccgtgtgtgctgttgacccattccaaaaagtctggtgtaaaaacttgacttattccatctccatgaatatatgggttgattccaacatcatcctcgcggattctgccagtggcatcaatgataatctcgtgcacagactcacaatcatctcgcttgccagtaagtgataccaggcccgcagattgtgtgacatcaataccacagccatggagactagctagctcatggaaagagaaatgctcagcatggagaagcaaggatatgaattgagctggtatgcggaattccagctggccacgctcgccatcagccaccagctgccaacaattccgaacgatcgtctctgcagcccgggattttcccctgaagcccttggtctttcccaataacgatttggagttacttgacccccatgtccagcctttctcttctatcacagaattgcggttgtactctgaaataaactccgacaattgcttgtatgtgaaagaggaagctaattttgaccacaatgccttgagatcggcagcaggcaagatctgtcctacttgatatgatccacgaatctcatcaattctttcatggactgacttatcgctgggcgatgagttttcctcgttaagttcatccaacatggtgctgattgtgccggcatattcattcccgggctttttgttgcgattgcgattcaacattcggcggcgacgggaaggcacaacaactatttgccctggctttccaagcgtatccacatccaatgtaaacgtgcctgtttcacgttttccattatctttcggttcgcggtttcgttcggatttggggccatcgaaagcgtcgcgttcatcatcgcgactccagttactctggtatcggggaagaacagcgtgtgggtatgacaataatggtctccgatatgaaagcgactggaagctcagaagccccagcttgttccctgtggggcgtcgaagcatgacagaacaataggtctattgcaaacctggtgaaggcaaatatctgtgatcacttttctccggcgataatcggggcgctaggccgcgataagaaaataattcctgcctcaggcagaattccctatctactatgtgtacgattttcaacaagaactttgattatgtaggacaacgctctctcagatatctctcctaattccgtgcgaaatggtttatctaaagtagatgattcaaaccatatgctaataagtaacgcagaaaggtatgtagaattcattcctttggtacaacttcccagctgcgcaagtcctctcttacatcgaactcggaaagctcattatttgtatctggcaccttccatgcccgacccatgaccccctcatacaactgctgctcgatgcttccacccttcttctgatgcccaagcgcagcgagagactctggggtcttactgctcctatgtgagcgattgctggaagaactcttagggcgccgctcgaaacttggagacaattttttgccagaccggctttgtcgtggggccgtctctgttgtcaataggatatcacggcgatcgcccgctgagattccagcgtgggaattgtgtgcatcgttgttccagcaggaacttccagcaaacaactcttcaaccaactgatcagcaggcaaatcaccagctctggaagaccacgacgctgctaaggtgcgccgatacatgtcttgcatatctgcagtctcccggctcttgctgtcaatagacggcagctggccaaattcatcggcgttgacgggctgatcggtggattgaacaactccggcgattcctccaaagacagtggcagatttcagatgtggtcttttgtaatcagcattgagagtgtgggtcagaaataagtttagggcttcacttacgtcgtgaagttgcggtctccttctagctgacgcatcgcgatcccaatcttgacagtactgttcactttactttcatgcatcaggtatcgccgaatgatcccttcgtcttcctcggttttttccacgtattcagcaagattgagtttgattttgcccagcacgctcttttcggacatgggcgacgaggtgaactcttgtatgacttcaaaattgagttcacactcctgaagaattgatgtcctgtcaattgtaagccttacttgaaggcatttctcataaccccagtaagcgcggtgatctaatagagttgctttctctgtgtagccttggtgttcagtggagcttgacgatggcaatcgccatcgcacaaaagcaacgctgtttcccaaggggacgttattgatatcgatgatctttttgaggtcagaaatcttaataacatttcgacggtctgtgtataatgcatacccttaatatgagctcgaacctaggctgtagcagagtcagttacagatgtaattcagtcggctttattggttaacttactcgtctattcttggggactatggtgagtgtgttagcttacatcaattaacaggtatagaggaacataccaaatgcctgcatgttaacggtcacgtcaccggctcaagcttgtgggaactcagatgccacaagcacatcaactggtccactcaggaccgacctcgaggaaatatctcggtctgaggctgagaagaaactcaactagcatgaatatcaaatgccaagcagtgatagcgtcgtcaaattggctaagagtcctccccgcatacaccgtggacattatgggcggtgaagtgtcataacatggcagaatcaataaccagactcgccagtatccatctcacctcttctcccaaagtctcaggcgatcaatacctgttgcttgcgaaatagtaccatttctttcaaccttatatcgctccacgaccatggtgaaacccgagcctactcctcccgcttcatctctccctgccgaagccgcaacagtccctttggattcaacaacccgcgttaccccaatccaccccgatctcaccgaaataaaagttccaaaaggggcactgccatcatattgctatgacccagtaacatgccaaccaatcaaacatcgggattaccaaaatgagcttatgcaactggaagaacaatacaaaacacgtgaggcagcgctccatgcgcaggaagaaattgccaaagaggtgaaagagaagattgagactgcggaacggaaacgagaggaggttcaaaaatccattgacaaaaaggtcaaggaacgcgacaccgagatgaaggtcgtgtccaagtttcaagagaccaaggcatcggacattccgtcttgagggaggtgacagcagcgctttttctaaaccattcagacgacaaaggagtaaccaaggttttcttcacgctattgtcaccttttctggcggacagcctacgcttcacaaaagaaatttaattcgctttcagctcgaaagaactcttcatctataattcctgtgaaggcaactaccccgacactcactatggatcatatcattgtcaacaattctttagaaagaacatctctgtttggtttaaatgtggggaggcaggcaagctaaggaacatttgcgcctatgtctatccgtgtgagagttcgcttgaacactatgccaatgggctctccaatctaattccaacatcttgaagcgaacgtcactcgactctttggggaatttcagcacaatgataaacgcctctcgcgcacaataccaactcatggaaatcgaagagctattatcacatgtcaaataattctcccatctaaatagcaacccatccagatcaaatcgtcggaaattcaaacagcatcaataaaacaccccgacatgctttgagatgttctgtttagacgtatagaaggctgtgaaagcatagaccatgcagaggactttcctatgtacaactagagatgtcagtgggaatggggtgattggacccgatgccggcggagaactacgctttttcgttccgttttcacggtttcgagcgggctgtctatgacctcccaagccgccggcgaggttggggttcatatgtcgtcaatcgatccgtccactgtctgaagctagttgcttggacttacggagccacgaatagcgatgctggattttacgacttgcagatttagcatctcgcttggtttgcgtggtttgcactatgattgctttcttgcttgatggtattaatctcgtttgacttaatgtcctgagcagatatcgcacttgaccgctggtttcgtctaacgagacgatgcattaaatcaagccaggaaggacagtgtcgggccctatgataagcgtatctcagtgagaaaatgaaccacacccttcgatcaatagtgtttcaagttcactatcctcactatgtttcgttcaaccttgctgagggtttccggtctacgtgattcgttccttaacaatggcatatttgaccttggtatatgctcccccatgaggcgggtgagtatatagagctgcggagagaacaacaatgtatctctataactatctattgttcctcgtgtagttcctaccctcctcttaactttatcccggagagccccattgtgtgataatcttctcttcatatgttttcctcattcgctatgcttttctaatttttggaattacatcctcatacggtactcggccactctatgctcccctatgctaaaaagaaaagctccaacagtcattcgatgctagatacacggttcccgcattgctacatagtttacgtcatcgtaggaatatgtgtcaactcgcctactccgtagtagaatataacctaacaatgattgagaacaaggtgtaaggctatggccctcaacacactatacagacgtttgtgtgaaaagccgccaagagatatgccatctcatggccacagctagagggagttattaaggccgaagagatataacaggtaggagtaacgagtttcttattgagagagaccaccacatcctgtcgaataataacccctaatgacaactcagcagtattcttacgtatcgttattccaacggcttatcagaaaaccgagtccttgagttgtactatgaggaagcgacaagccataccttactggtgagacatgaacgatgaggctcaatatatgtattcgttaatgtaatgtattttgtcgaagaactgctcttcggagctatagggaccaactgaaaaagctaaatgtatagaaaggtacaatttatgctcaccgagtcaatattatgtataaaagagtagtcataacaccacaatgtttaatgctacgaaagatgtttttacgctttctcagtagcgatgtcgttaccatactctccgacctgacttattggtaaggtgctttgtttccaaggctgccaattagcataaaaaatgttcggagattttcaacacagccaaacgcattactcggaggtttgagtactacccaacaataggggatgtctaggaagaagaaaggaaattctatcagggctgttgcaaaatgaacaatgatttgtgagtcacgggtttcatgatcaagtgtaccactcattcatgaataagccccttgggtatattccaaaagcataagtcatagtaaagcagttgcttagcatagctaaaagcaatgatttattccggattcacctaggagtttgtccaacgaacggtatcgcgtccaatagtagagcattgtctagcttcgtttcaaatcgaacatcatcagacacatatgagtcataacagatgcggtctgcaaaatataatggatctcagatataactccgtttatagtgcagtgatgtcaatattccaacttgatggcagccttgacaattacgaaactaggcttgatagagctgggtttcagtacccgcctggctgtggatgtggttaagatctacctgagattccagctctcaactcttgccaactcatacctcttctccagtggggtttcagcaagacaagtgaagtggacagagggaggcaagaaaatatacggagtagtaagttactactgtactactccgtagtaactagggctttgcattgtatgtccatgtggggccggagatatccgccacaacgtggcgagtaaattgcaccgcctcatatctattttaggaaaagcgacctcggtcgcatatcgttaggccatgctactctatagatacacaataacaatgacgaaagctcatccgactcaaagcgaaccctcatacacccacacaagaccatgtgaccgaactcatatgcagcagggattccattttagggaagaggcagaggcgcctgcggagtacagagtaagatgagatcattgaagacatgaatcatgtggagaaaacaataggaaacggtatttcagtacgtgaaggctagtggcgccgacccaaagtctggcaatggaggctcagcccaatggcagatcgtagcagggatctcagcttcctgtgcattggccggactcggttggtctcagcgaatcccagccctgaagtgactcaagacgggctctgccccacgcttggtcgaccctccatcagctgaggtctacgactctgtatcgtcctagcggcactcgataggtccaaaaaaaccttgatatggttgatatggttgttatggatgtgtttcgtgtaatttgttaatacagtaaaccttggagtattattttctcttctccaaggctaatatccagttggatattgaagcacaaacgatgttgaaacagaaaatgggatcgaaactaaggcttggcctgcagccaaatttaaattagagtcttcacccaagcgtggaatctttagtgttgaggatcctgtatcttttttaacgatgtgtagatcttggcgcacactgaaatatgcacatcgcccagctgagaaatgtatattttaagtccccgctagttgtagatagtaatttgatcgctctagatgatctatggagactcaaatcttcctgtttctttccgttcacggccgtttccatggatcattggggcttagctgttgcagtttagggcaccatgcagctattctgaccaaatggacgtgcaacgggtgagactggcactgtgcgagtcaacctgtcaaatttgatgaaacgtttagatgtcgcgcatttcgaaccgtttcaagtggtattatcgccactgagtcttcaggttgcagatcggggagtccgagatgtgtatgtacgtactccgtacactgacattgactccatcaagctgcataccagaataataccgtagaaaacttggtttatatgttttttttttcctaatatgtcctaagagccaaaaaaatagaaaaattaacatattattgtggccattaaatctccgcttatggtccccctcttaattattattcttcttaacttccctcttttcttctataacctcactcttgactgactttcatgtcatctcctttcttttatattataatttctgttctttttgcgcattcgcccgcactttaatactggattactcgacatatcaacccaatctcaaaaaaaatccaaaacttcttgtgtgggcgaatgtcgcctttatgattcatgttctatattctacattcatttatatcaactataccaacgccggacgtatcacctttcgcacagtgtcataatgcaaacaatcttactcccatcttctgccgctgcttttgcgccgcgatcatccccgaatgtcgtgttgaataccaaggttgagccttggttgacggccaccctgaagcgagttaaccgggtcaagcgtcctttgaacaatgtcacccagcatacccggtgtttgacggaaacactttcgtcaaaaaatgcaatctggactctatgttccatgatgttcaccaaggccccccaggcagagctagagaagaacgagaaccagctttgggaatccctgcacagccaccaaatgattcacatggaggcctatgttgtacatgtcgacatggtctcccgcaacgaggtggttttcaagttgactccggaaaccatcgaatccctggttgattttcacaaggatgtctactcggtggacgccgccgccaacacatacgactggccaggaaagcacggtgagctgaagaggttacaggaggagtttgtccaagcagccaacaagtttgtctaccgtgccaatgcccaggcacttgaggggctagaagaagacggcgccggagagctactaagcggtcgcagcgacgaagcaaaggcagccatcggcaagctctttatcccactggttgccccttcacctccagtggtggatgtcatgcgcccaattcctctcctgcctagttcgacaggcccggaaaactggtggcaaaacccggtgccccaacaagcaccactcgagtcgtggaaagtactgtcgcccagccccaacccggccaccacgggtgattctaatccgaatctttgggctagtctcagtttcagtgatgcccaacttgcctcaccgaccccgtcttacagccaacccttcactccttcgccgttccagacctacaactgcctaccaaccacctgtatgccaactacctgcatgccgaccacgtcagccgccatcagtccgctcccgttgccgaccatgttcccaagcatattcccgagcatgcttgtacaaccctgcagcacagctttcaacatggggggctttagctgggccgactttgctccgctaccgtatggcacgatcgtctagctcagccctcctgagtagactcagtgatgtcgaccatctcaagtccaggctccctcggttcatacaacgtgggttcgagaaacgtggatcgtttcttagaactagatgtgcgcgcaattctttcggtttcttcttgactccccaactcctctctctcgtctctccctaccgggaacccgattccaagcaacgacaattcgcatccttgacggcgttctctttgatttgacactgtgcatctgtgatactccctcctgccttttgcatgataaccagaattatctttttctgcgcttgttttgatagttttgatgtttgattctagcgccagcgtgtctttttttactctttctctttttcatttttctttgcattaagaagcggcgggtcggctctctgttatgtttcgtttcttttgttgttcccgcatatatgtcatgaagactggtctgcctcacggcatgtggaggatatgaatttggacgtggaatgtccaacgttatgttttcgattcttctaccgcaactcctggaaatggaagaaagcaagtatgggttacccgactggactgggttcagcgtctgcctttggtttcctcctttcttacgaggtctgtccttctggtactggttactggactggctagttctctttatctgagaattagaggatatgtttatgcgatggcgtcaccttcatccatgtatctgtgatacttgattggagcacgcatttttgtcatctttggttcaaggaggtgcagatcagcaacacgagtgtgggagaagattgccttcaacccttgtcagactcgagtacatccgcctgtggcagattccgagcgcaaagggcgatgcactggatttcctcctttggtctgtgacctggggatcttcacattccgccccaagcggcaagtggtatgagtggcagtcatctccgtcctctgtgctacgaactcacctctaatggccatagttggctgatagattcatcttctatcgtccaggctggtttttagatattcctggacaagcttggtctgtcggtgggctctttcactggatgtaagagcccttcattctttatcccgacgacaagaatcagatgctcgatctgatagatactctcctttatgatctgtttggtcgaggggctggtccctcgcgctggttgctccttttctcctggtcttttttgttgatccatcagcagctctgtccaaatcttccatgtatctctttagcttagttttgaaaagagcttgcacaatttcttcctctcaatttgtacctattcgtcggaagtaaagtatcaaacacagtgtccggcatttccttatagaataagactcatcataacaaaaatctgaatataaatacatgtctcaagatccagatgatgttggttgtgtacacagttatttaccccaggtgtatgacgtcaacgtcaaccgccaagacagcccggcctacatcatatccaagttgatcgagactcggcgtgtttcgttcacaggtcacttcttttctatacttgcatctatatctggcttcttttatctgatattggctttttgcatgtaatttcgttgcatttgtctcttatctgggatttaccagctcatgcttcagcaattgataacctagagcctttctgcacagaaccatttccgcctaagcaagccacctgaggattgttagacattgcaatcttcattagattcggatatcttggtgcccaagtgtccgccacccgcttatcccacctccgtggcctaatcccggcataaccacgagctgacaaaccccgctccttgaaacaagtggacatcccgaggtcacttgcactaccggcacaacttggataacatcacagaaggagaggacttcaaatattagggcactcctactgcacatatggctaccttacacgatgccctccaatgcctcaaaccgacgtcatgggacgaagtcccccaggatcccgacgagctccgtgactacttgcgcgcgatcttcaaaaacagccgcctgatagcggagtcacttccagaccctccaatctccgataatcacgactacccaggattagacgacacaccgaattcctccgaccgacgaatagtcccatcacccgcacgagtggaagagaccgattcggaaattacagacctgcaaaaggaatgggggaagccgctcaagatgggcggaccgaaggacaacccgttagacgtgactgtgtggaaactttccgcaaatgacggcgggggctcatggttcgggcgacggagtgtgcatgagggcatgccattttcacgatggcggaagaagctttcatctgagtacgatgaaacgctcaaagtaaaccgcagaaagattgagagggggcacacgcctgacaagagcattcgcgggatcggcgccgaaggaaagatggatactattgaggtcaaggatcatgatggttcggttctgggccatttagttgtttaccatgtatcggcgcagtttcccaaacctacttctccccgcgattttgtggaattgatcatcaattccgattctggattgcaaattggcggaactaagcagccaggtcgcagctggatgatgatctctaagccgtgtgaacaccccggtatcccgcataaacagggatacactcgcggacagtatgagtctgtcgagctcattcgggagattcctaagaagcacagcagtgggagcagctcttctagccaggggagtaagaagaatagtgattctgcgtcctccaattcgcaacgccctgtggggctacctgggcaggatggagctggggatgaggaacatgaagaaatgaatcctgttgaatggatcatggtcagcaggagtgatccgggcgggaacatcccgcggtggatggtggacaagggaacaccacgaagcgtggggacagacgccgctaaattcgtcaattgggctcttcaagatgacaagccgcccaagcgaggagaaatcacaggaatggaagctgcagatactttatcaggcgtcaaggctaaacccggggagtctgtgaatgaatacgactccgaccaggaagatgactcggattcggattacgaatcactcgacagcgactccgaccagtcccatcatggtctgattgctagtgtcactggcttgctcaatactggactggaacggttcgcgccacaagttctaggctatggcgcccccactagggtatcgggtgatctaccagccgagaatgaggtttcctacattgatgcagatggaatgagacatctacgtccagaaattgcccaacaaaataaatcagcgttggacgccgaatcttcaagatcccaagagcaagacgatgtttcattatcctcggccaattccgaaaaagcagcaactgccgtcgaggacgtaacgaataacatgtccccggaggaactgatccaaatgacaaagaatggcaagctcagttccaacgagaaggagctcgcaaagctagccattcgcaaacgcaaggttgaaagcaagctagaggaagtccgcgccgaaatcgacaaattccaaatctcatcgcaaccgcctagtgtctcagggaccccagtaaaaggcatcagcgaggcagatggtgacactaccggaatgcgcaagcgcgcagcaacgaataggtcttccaggcctgccagcactcgcacacagcagagccaaggccaaccgcagagcgagatcagcaatgaagaccaaccatctcctgggcggatggcaacccccgacccgtcgcatctccccaaagcagccacccactatgtccacggagaatctaagctgcttaagcagctgcgcaagatcgaggctaaccaactgaaggttgcgtcgaagattcaagcaaggcagcaaaaggatgaggagcgctcggagaagtctaagtccaaaaacaagtccgaggttgataccttgaagcaggaggtacataatctcaagaaagaggtcaagcagcttcgctctgagcgccagaaatgggtcgatcttgtttcttcgttgcaggcggagaatacgaagttggcggcaaagtcggaggttgcttaattggtggatgaccataattctatggcttgtacatactacattgttttcttttttcttgttttgattttgacgggagggtctgacatgtcctatgattttataacgacatactttgtcctatgtcttttactgcatatttctacggaatgaaagttggaattggatatcttcatgtctcaatacattatcgtcatgatgatttgattatgatattgcagaccatgatagatcaagtgaagatacggctctggggctgttttccctatgcattgggtgcagttgagtaatctgatgctcttcaagcaattccaggccatctacaggccatggtgctagttgggtagttcagaacttgctgataacttcatgtggtaggcagggtatatcacaagttgtccgctcactgacaagaattgaaagattctcgaggttccagaatacgggcaaacactcggggataccaactgccagaaatagggatacgacggccttgttcgtttagagcgtttcatatgttgagttggaattgttattcctaccgaaggaatcgaggggtggtcggaatatcgggggatctgtatggaaatccgaggacgcgacaaggggtatcaaggaaaacaagaataagccacacttagtaggtttactcttgagtctaatcattggagagcacttgttagccaacccatccttgtatatgctgagcaactccgcaagatgccacatacctctggcggattaccagcgcctctaaccattttctccagcatcattgcgcgcaccttctcttttggttcgcccatgccgactgccatgtaggatagcagaggagggtgaccaacgtaggaggagtagctgtcacggaggatgttggatgtccattcgtacttggtggtgtcggcgtgtccggtaccgatgtaacgggcctggagagcctcaaggttctggatggtacggagcttgtcggccatggtggagaatagagatgttgacgttggactgagaaggatcgcgggaaacttgaaaggacgacaaaagatagaagggaactaattatgcctcaggcatatattatatgggtaacacgtgactgtgtgggcatcttgggattcttcaatcctgtctttgccttcaacaaagcctttggttgtttagaaaattgctactcggactgtgaccatatccaatgtctgtggacacatctagttcatcattaccgtcccggatagcatcgctggttcatgcacatttcgatgctctgccaacacgcagtaagccaaccatatttccggatggatcgagagaatggattccaatgactggtattgtagctgtcaaaggtatgctccattacttaacatgaccaggttatcatccctcatccatgcatgtaatgtgaaggggatgggtccatcatttgctttttacttcatcctcacaacacttgatgttctatagtaacgtttttgtctcttcccttataggagaaaacacacattctgaaagtctgacctgcatatctgtcacgtaagttttgaattccccacttgcaagtctgacccatattcactgatattcatgtaggagtggcgcaaaatgcttgtcagcatctcacatcccacgctgtaggggtcttgtactacatgactgtcacgccgagatattggccatccgagcattcaattattggctcttgacggaatgcaacagtgtcctatttcgggagaagcaattaccgaatggccatgatacttgtaccctcgataatgagaaaatctcagattccccatttatacaaaggagagagattgaagaggatgaagataatactagtacaccgctcacagaatggccgccttttaagcttcggcctgatatcaagatttacatgtattgcacatgtgctccctgcggcgatgcgagcatggagctctgcatggcagctcaagaagacgctacaccgtgggagatttcacagcaagaagcctctttgtcagaaatccaagacgcagagctcccagatacagagacccttctagatggccgggcccatttctctcttctcggggtcgtacgtcgaaagccagcacgaatggacgccgagtccacacgcagcaagtcctgctcagacaagcttgcattacggcaggtttcctccttgctgtcctgtgagaccagtcgcctcattgctcctacagaaaacgcctatctagcaggtctgattcttcctgaggacgaaataagccaagttggctgtgcccgttcctttggcgagaatggccgaatgcagcctttgggtgggcgatattggcctagaggggcaaatttcaaagaaagcacaccaggatatcgattccggccattccaggttctttcggtgccgagtgaagaggtgacagcactttggcgtttcgctaagcccaaatccgggcctcttcctgcagcttctgtggagcagcaaggagacccttcgagccccggtacaaatgttaggaagaccaggccagggaatgtgagcgccatttgggtattggctccctcgtatcatcacccattggtaatgaccatggataccggcagcaagtcagtgccaactctttgccgttccaagactggtttgtatgagactatcatcaacggtgtgaagcaaggaaaccgggcatcctcacctggtgcccgtggagcctcttctctatcccgagccaagctttggtctctatttcgcgaaattgggcctacatccgttccacgcacctatacaactgatgtctccccagccggaccgttattggggactgaagattctcatatcaaggcagttcaacaacacatgccagatataaccacctaccaggatttcaaaaatcctaccagattaggagacccgttgcaaatccgtatgcaggccatcagggatgcgaaagtggttctcaagggatggattcctaatgcaggagatgaatcttggggcttggatgttttggttgaccccaaaaagcgaaagcgttgattgtgtccagggatgaaagagtgctaaagattactctaggccatacatagtaaacctatcgtattcccctctcaagatacccatatatcgtttctaaacaaaaaaaagccatatgtttaaaaaacttcttgctatcagagagaaaataagaggactggtttgtaccgttcttgattggcagccaaaggcgtcaaacaaaaaaccgcgatctaatcaatcagggtgtcaatgagtccaagagaatgtcaacaatgggatgtctcagggtttttctcacacctttgattgtttgttcttgttcttctcaccactatctttcttctcccatgctttctgatcccagtctcaccaacccacgacttcacaccttagatgtcaactcccatgagcaacattcgatagaggaatccgcttcttcaagagagcactgatttcatactccagctttgtcttcaagatgactccgaaggctctagccaagtgtgcaaaatgtgagacaaaagctaagacaatgtgtttgggctgctcgcatgcacccgaataccaaagcggcgattctcgagttgttttttactgcagccacaagtgtcagataatggactggccaaaacacaaagcctattgcaagaatatgcagcgacggaaattactcttccgagctgccctgatattgaaggcagccatgttggcatacagagagactgtatacgacgtggatctaaccaagattgagtatcgagatggagtcctgtatctccatcaaaatcaaagaccggtttcatctctatctaaacgtggtcccttcccaaaccacatcactgacaacatcgaccacaaggaagcggctctcctgaaaagccaatccacagcagccatgtcactcttaggtcccttgaccagaaaactccttggaggtaagaattatttctaactcctaagtacccaagtgagacatggctgaaacaaagcaggggtacccttgaaaatcgagaccatggtcgtcaatatcgggaggccacgggttccaactaggcttgttcctggtcctgacttgtacggcggtccgcacgcggttttgaagatagaacggatggagaggaacgaaacatggattatcgatacaacaggttgtcaatatggattccgagatgtgcttgttccattcgccaagtactttattgacaacgaatgccggatattggacggccctcgggtttacgacgcatgcgagacaaaggagctagactacttgtcaacccttcatatcttcaacaagacaaaagcacaacggcaagatatgcgactagaacggctgacccgtcaccattttgctgtcttcgtttatatgagtgtgcatgataacttccttgtggactctggcgccagctacaagagaaagattgatcgcttcgtcaatgagctcaaaactcacatggttgattctatgaggaaggcaggtgacaattttgaagattctgaagatgattgaagaacaacggaacggttcatactggtacatttgttcaatgagtttcaaactcgcgtctcactttcgatatcaattatgtaaataatttcccctattccctccatccctccctcctctacttggtagttattgccatgggattgacactgaggaataattttaagttgatcggaacgagcaatctatcttattcgagtaattcccgcccggttacatagaccaattcatgcagatattcctttggtggccaactccgattgctcggttaataggaaattccgatatccctggcatgccgaacacagctcacggatcgagtcagaatatcagagatgactccggggattgggatagctagtatcttgctccttatacccttgagagcaggcttgattcggtgggcctattataaaagtaatcgcagataaaagtattggggatcattaatatacaaaaataaggcatagaagtaaatccaaaaacatgtgaaagtagttcttgataaaatctctcagtagattccagggatgatgcgactgcggacgatcgaggtataacgcttccagtcagcgccatacttcttctcgcatttctcctcatcacgcatctcacggtggatcaacaagataccaaagtagagcatgtagaagtatgtgaaaatcataccccagccacggatttctggggtctgcatggcttgcttctgggcagcgccactggctgggttgatgctctcgatgagaacatatcccgcaacaccagttggtaggcagtaggcccacgacatagtccagtcgcccaggtagttgatgtgacgcgccagaccccaccagccggagatcatcagtttagatccagcggcagtttcgatgtacttgatgtttttcacgcgggggtcattgggattcgtgcggaaacggttcttctgattgttggcgccgcggaagatcgaatatccaacggctgtgacacctagaacaacagtcataccggtcaagccaagctcgtaggggaagacagagagataacggctctggatgctgtacagatggggcacccaaaccacgtcgccaaaagataacatgaatccaaatccgtccatgattacatccatggtggtcatgattgctggctccatgtatagggcatcaagaatgtagaatccctggaaaagagtgaccagcacaattgagtcagtgatatagccataggttcggtattggtgggctacattggacaggttcagaattgtccatccaagcaagcccggtctcatctccatgaacaccttgatatcgacagtacgcgatgcctcactgacaaacggaatgggcaggcgaacacgagggttgagttcacgtccaatgaagaagtcgtagagcatgttgcccgtatggccaccgggtgccagctctcgtagatttgggtttgcctgccctggggctggaactgtgaagctcctcacgtagacgaacagtgcagcaaaagaagagatcaacaagtttgctgtaatgacctggacatagttgtcccatagaaatgtccacaccacaaagtcggctccatagagataagtgcccccggtgaggcccgagaggataatgatggcagaggagaacgctacaaatgagccgagtcagaaaaaaaaacttcaatgttttgaatgcgatgtgtgagggaggactgctgccaatgccataccattgaatttatacttcagctgtcctctgcaggccaacacaacaccatctgcctcctgaccgggaaggaagacctgcaagaacagactgaagacatagtagctcagtgtccacagtgtaacattggtatcataaagcgccgtgattccctcctccggccaacccacttcacgcttcaattgttcgagtgacaaagtcgagggattcagtagcgatggtgcgggacaaccagagacatcgttgcagacgaaggtaaagaggtagatcaggatgggcaatccaaatataataccaaaagcacctagtctattgcaaatgtcagctcagcttaacgcgattgaaagggaaaagacatacggtccaccaaactcataaccacgtttctccggcactggctgcacgggtgtttttttggagtcctttttggtaggcatattgaagtgatgactgggccaatggatagacagagaaataatccaagagctggggaagatccttaaataagacccgggagccttaaggcgcgtacgacatcggatggttggtgttccgccaggtttgctccgcatcgcccccacagcggtgatgctacgtaagcctctatctctatcagcccggcgttacctgcacgcatacaacctacctccttcgcaccgatccattaaggtcatttctatcattttgcaggttatatatctttctctagtctctccacattctttactttattccatttcatctcgttctattctcagactgccttaggcttgggtgaccagtccaccatgaggctcactagctccgctcattactccattttccttctatcctcaattctcggattatctagcgcatcatactcttcccattttgaagatgacgctccctgtgttgcccgctcgccgaccactggattgtacttcgacctcaatgcgatctcattatccccgcccaaaatgaaggacggaaacaaactctcgaaggatgcgcggaccgagagctggtatgccaggggtcatgattacccggctaatttcacaatcaacatatgcgcgccggtcattgagaacgtgacggatgtggtcgggatagagtcatcgcggtggaagaacgtcagtgcatattacgagcgggatgataaaagatactccatagggtatggcagatctctatctaaaccggttacactggttgtattccctgcttactgtgctaacgattctcggtcatatacaggcaacaagcatctgaacctttcttccgtggccgcaaactcgttctcaattataccaatggctcgccttgtccggacaattataacacgggcagttccaatgcctccacacgcaataagtcgactatcatgtctttcctatgtgaccgcgacgctgcgccaaacgtggccacggcttccttcgttggctccatggatgagtgctcatacttcttcgaagtccgtagctcggcggcatgtggtggaatcgccgtagatcccaacgccggcggcttgggaccgggcggcgtattcggtgtgatgtgagcaccccttctgcgtcttgggggaacaccccatataatccatgctgaccctgtcctctagtatggtgatcgccatcgccgtatatctgattggtggctgcgcctaccagcgaacggtcatgcatcaacgtggctggcgccagtgtccaaacttcagcctgtgggctggcgttttcgactttgtcaaagtaagtatcctagcattgatcccatgttggcctcgtcgcaaattcagacatggcaagttcgtgtcgcataagtttcgggattcaaatggggcaggactacctgtttcaaggatggattgaagtcgctctggctagtctagggaccaatcccttcgggaaagacggttgcggttggcctgtcccatccatttccttatttcttgtcaggcatagatcattcttttttttacctgcatgttctttcctttgattctgaccgcctgtgttgatcacggcgtctacatttccatatgtttgacaagatgtcttgattcatgcaagtggattgtcccttgggtacttgtcaatgaatctgccacttcatcttcgggatggtaggagacagctcctcttacttggttagacggactatatgttttattgcgtgtacttaaatgattggtttcaattgcgagcctcgttgtttgaaacatgacactgaccacttctttctttctgcaccaacaggacatgttcgtgattctcttttcgtcgctaggtaacctcttccgttgcagggggtccgccgcaggcaatggctacacccgcgcggactcggacggccgtggcggtttcatcggcgccatcggaggacgtggggggcgtgggggacgcggtcaggggcgtgacgtggatgccgagaacaggctcatagatcaactggatgaagagtgggatgattagtcgagggttgcttttactttatcttctctgctttcctatacactttccttgcctttttcgtctggcagctattgccacttttgttcctcagctctttcaaacaatagatttcgaggccttcgcccttgtctttttatctgtgatgcaaataattcccgtgttatcatattttgtaagcgtttacatacctctcgaggtcggtggaatatatattcacattcaagactctgtgtaccatatcaattcacacattgcctacagacttgttcaaatgtgagcagaattgagattaaattctaaatgaacttatccaatcacatctatcaaattcaattacgcatacctactttaactatttgatcttactttcaatgtgaattatagtcgtgagtctaagcaaacatagttactacagtgaagaacaaatcatacaactagcatcattggtctagtggtagaattcgtcgttgccatcgacgaggcccgtgttcgattcacggatgatgcacaacatttacttttttgtatctcatttgcaggattttatttggcagaggaaaaagattctaattgcttttttttttatttctttagatcactggagtcattcggaaagttgtaatgtctaaccaagaagaccgagccattagacttatattattcggaacatctgccccaaaaaagggatataaatgccgtagacaagacaataatatttacacaaatcaacacaaatggggtaatatgaatagcagcgcgaaaagtaacaaaccccagccctaaaagtccgactccaaccctttgaaatcatcgtaaagaaaagtgaaacaccacgtagcagtcgtcgagaaagcattagctgatggatagtatatgatccgatcatggccgtgagactttcatattcgaaccagtcaaaccaaggtcatatgcgcttaaaggcatgccaccagcacccctgaagccatacatatctacagaaggaagcccgggcgtgccgccactattaactaccccaggcatgggagctgggggtggagcttgtgatggttggtttccaccgctaacagggtcaagattgaaaggcaggaaccacgcgctgggctggtagaactcgcccattccagcaggggcacttgggtccagatggcccgtgaacagtgtttgatctggacttggtgtttggacgccattgagtggtgggataggagggttgtttgggacaaatgagctggggtcgaattcggaaaatgaaccatagacgaattgccggtctagctgcggtaattggtctggtgggataccgaagtcgaatggcggttggccgaacgacattggtcgggattgttggagcatggatggctgtgggaatgcgctgcctgcaacactcggggtatttccgatggttgcttccatcattgatggtgatgaagactgttccatgcctgaagctccatcggatagtttgctgttcttccgagaccgcgatttgcgcggttggcttggctgtggagtaggggaaaggccggcaaagaaatcctccacgctctggaggtcaggtttctggcccataactgcgtcttcgcccgtttctttgtgccgagtatcggggtcctcccaatgcactcttgacactccatggggatacttatcgaaccagtcaccatattggaacatgggcgttagcgatgcaccattctgagttgccacagagcccttgatagctgcatcggcgaactgccgataccgatccttggcactctcaaccatatagtgaaacatgccccaatactttttcattttattgagatagcggtacgtatgccgtaggttctcttttgaccgtgcctctagctgaacgttcttcgagaatatcccccagatgtggactgtacttgccgagtaagcacagtatccagcaaaaggaacagtgagggggtaggctgaagcccgatcaaaaagcactgaaatgtgatgcgccgcttccaccgcggctcgacctgcattactgaggaaggactttggcatatctcttggtggacgcccccccggggacaagggaatggcgaactggttgagaaacagcatgttttggtgtatgataatgtggaggaaaatgaattgatttgcaatcttctccgctgcatggatttgaagatgctcgtaggtgaaggtaaaaggcgccggaagagacgcggagaactcctcaatttgccgcttaagctgcatgtaccctgactctggatgccaaagtggatgtaagtccttactctttccacctagattcaggtagtcgacaatgcgcccccaaatgacgatagcgcggataatgtacgctgaaacacccatgttttctttagcgttagataattggccggcatcgtcaggtacaggattaagaatatcgccatcaagatcttccgtcggaccaggtatctccatctggaagtggggttccttgataggaagctgtatttgtaggaacttctcattcccaataggtggccgttggcttccggaagagttataccgatccatcaagtaacatgcccacatagtccggcgccgaatttcttgatctgtgaagctcaactttgagctgttgccattgttctgactgagtaatggatcctgatcaagctcctgatggagctgcaacgcgtatgccatccgtaatgcttgacctccaaaagaccaacttcgcccaccatgacatgtcccaaactcatgaagaccaagaagtaagaagaccgtaagaattgtaatgttcggctcgtcatgccggctcagagcgatggccgctgcaggattagcccagttttctccacggaagaatggcggatctgagttcagctgaggatgtgtggagaatcgcgcagatacggcacagacagcaagaattaggacagggggaattgtgcctgctttgagccgtcgcataaagctgggtttgtgtaataagaggtatgactgcccatagacacaatcaaaaaatacctccgcaagatgctcttgaatctccagtgagggcagaaactcagctccttcgataagaagcccagtcccatcggtggatttaggttcacgattcattgggaacgtctcgtgtggtgggcggctgtgcccacgagtccattcatccatctctgccgaaaatgcctcatctgcggttcgtttcttctgtgcctttgacggctgagccgaggcagaaggtctgacaaccgatcttccaatagaaagcatatcccttgtctcctccttaggtattgtcttgattacgcgatcttccatcctcttcagtcgcttgtccagcatagccatataatccgtgcgcggcgccgccttccgcgtagtaactttataaacacacggaatcctcgagcgcgtacaatgcttgcaggcaggcttctcgcccgagcagcggattttcttgcggcggcatgcgatgcatgccagtggcaggcgcttccgctccttccccgccttggtcttcatctcgctccaagccggtttatcgtcgtcgtttagatgttcaaaattggacgggccgttgccggagtcgtctcgtccgttgtctgggcctagcgcggggtcgacggtttgtgtgctaccagggtcacgggaacttgcatggctttgggtatcgaaatcctcgagagctgctgccgcctcctcctggcctacatcaaagctgacaccaggggttttcgatggcaattcgtcgggagcgggttggatcatgacgggtgcggataccccaggacccaagcccgaagcatccttcggcacggtcggggaaaaaagaaggcgcttccgaaatggagcgcgaggtcgttccggggaagatcaatttggagtggaatttgaagagcggggaagaaggagaggcgaaatggaggagaaagtgaaatcagccccgaatatggggaaaaggttcagcggcgaatggtggcttggcaaataattacaattcggccactggcggcgctgatattacgagactcgaccacaatctttctatattggagtataaagaatcaatgaagtctgctgtagctcattgaaaacacttgaaacagggaaagtacatacgcaatcgacttgaggttattggattcggaggcgccccaaccctatatccccctttaactcctatattattcccctatagttctacgtctgggaatatatttgcaatctaattccacttgagccacgcatattaaaaatggccccagactcataataccaccttcatggatatactcgcagtatgcctggctctctcaggacggaccgggacagccggattggcatacgggctgacacatcggaagcttgatagaagactaggactagcgtgcagctacatgccaggggatccttattgagtggccaacataataagatagttattcattgatcatctcgagtgcattacagaagcaggaccccttttttttctcttagactagccatcgatcggtaaatgccacctaccgatagataggccaaagtcgtctggtttttttctctcaagagtcgctagcgtcatttcacgtgtcgcatttctgtacgcaggctattctctagtttgcgcgactgatcctaggtggatttcgggcgtccaaccttatggcgtggtgttgcgagctcaagcgagttcagaatctcggccccgagaacatagatattgtagctgggaaacacgagccacagcccactgaatgatattagtgttatatttcatgtaaacatgcactagacggagctcacttagggaggatccagtagaggaacagagtaagcgggtcgttgtgaccgatgttctcgaagccagagaagatctcgttgagccctattttgttttgtgttataatccgacacacaaagcccaggaaatagatatagcttacagtaaaggatggtcttgctcagggtcatgacagacgcggtgtaggcgaccagaagtgcggtcgcaccaatgcgcccagcgacgaccttgtcccccttcagcaaccaggtaaattccttggagatattctgcgatctgccacctctcccaaccgtcgatccatagtggtagacaatccagaggtaatagatgtaaccgatagtctcgaggacgttgagcatagtctgtgcagccgtgaagccattatgcgcattgaaggctggccagccatagatatagtccacttttccgtacagcgcgtaaggcgtccagatgggagagtgtagacttccaccgggcatgctatgtggtcgcaacaagacatagcctgtgtcccatattaccaagggaaccgaaacaatgagccagattgtcagcgcagcagcgggcgtatgggtccatttgcgcgaattggcgctggtggtagctgggggtaacttggctagctctttcccgacctcgggggaggggaattcgcggggatggtgtcgcgtggagaccatgatggaaggggttgcaatgaataatgtgagtaggacagagtcgaatgcaatcctaataaaatttactatgagagggggaaaagttcaggtagaaaccagtcaggcgcagaggaatgccgggggttacagctcaggcgcgactgacggccaatgacgtcgagggtgatcgtttgccatttttcacccgacggctacttgcctctcgctctcacttttgtatgcggttgaattggaaatctgactgcagattttggaaattagcgtgaatttcgttgggtacgtatatgagcgtgtcacatatatacattacatatgttattgacgcaaatcaacacacatcgacagtttacggtaccacgagctaacttttggcatttagtattagtaccctggaataactggttaactaattagctctgaatccgtttaggtcatcggatcgtaaactagttatcaaactcgggaagctgccacctatcgtctattctttcacatctctactcatccaacgtttcaggtttatcaagttaccaaattatttcaaatgatcaaactacacgccatcggtcgtggcgcctgcggcactgtatgggcatgcgaaacaggacccgcatacaaaagggaggacggtaacccagcacgatccctccaaaacgacttcgaaatgcacaatcgagtacttcaaagtcgacaaacccttatgaacctgaggaagtcgactcaagttgaaatacaaataccatcctgtcacaactttatcgagccaaagaacaaggagtggtgggctgcacatctagaaagggttccacaaggctatacatcatgcaatatgatcgaagcaccaacgcattccaccctttgggggatcaacccgacaccttcttattcaagcattctacccggatgagatcaaacaaattattatcgagagtgagccggatcgagactgcttaattcgactatatttaggcaggcgtcgaacacatatccaggattcgaaaaccttctcacagttccgagcattctctttgcgaaattacccgctacatgaagaccaactagaagagctggcgatcacaacagacgatcttcaacaatatgcccgaacaatggcagaagcactcgctatgatgcactggattgctggcatagatgctaatgatgttgagtttgtcctcgcaacctacaatgataacgatggtggtcgcattaataatgttttgggaaggcatagcatgtggatgctagacttcgatctatgtagaaatatgacaatgggcgagaatggtgttgcaaaagccgtgaaggccttctagagaaacgatcctttctatcctcgtccgggaaatgccctatgggacacattccgagagaaatacatttatataccagtgatgagtgcctggagctttgtggcgttgaagaaagggaaaagcggcgattcctgtcgaggttgtttattgaacaagtggaagcctggggcaccaatgccaactcttgaaagtctgtggcagcctgaataatttatctgtggacccagaggcaaaaatgtagggcaagcatcatagcttgagacactcaatagtaccacacactgcacaaagagaatcgtaggaagattaaatatgtagttcacgtgacttcaagaaatgtccacgtgactgctaaacagcagccataaaaactaggcaacgacgtgaaacatcatttcggaggtgatttcggagatttcccgaactcgaaattcaaaggagggactgtcaaactgcccactactcattctaatgtgtgctttgtatgtcaagtttaactgataggaagctcggtcatgctccacacttcggagtcagcaactgatggattcaaccaaagaacagaaggtcagtcacatccgttttgagtagatgcggtcaatctaactagcatagaagaatgtgcgactcgcacgggtgcgtgaaaaccagcgcaagagtcgagcccggaagctggagtacgtgaatgagttagagcagcgtcttgcggtgtgtaaagaacaagcccgccaaaaagacatcgagcaccgactagcaacgcaaaatgtcgaagctgaaaatcggcatttgagaactcttttgggatcgctgggagtttcgagtgcttatgtccagcagtatctgcaggaagcggatacgggagtaaacaccaaccggaaggttgctatccccgccattcagcgagtagagagagataatcctctatctctatcgcttcgtgatactcgcagatcaaatttgtcgatggcagtaccgcgcgtttacaaagaggaatcaaagacgactgaactaccaacagcggttagtagtacgtgtgccttgacagtggtgcaacgaacagatcagccgtcaaagcaaaacccccaagaagaagatccggctttgtgtggatgccgctccgagagacagaatccggaaacggtatctgacgaagatgtgctcaattcgacgctgtgtgccattgcagaagaaatgatcaatcaatacaacaccaaaggaattgatgtcgatgagatccgacgaagaatttggtctgggttccgagcaggtgcaaatggcacaggctgcagagtccagaatcacattctgttccaagtgctagacgatatcagcagtgatgtctgactttggcattgacctggcttccacagtcatttgggatattagtatttgagtgaaactgctagttgcagctgcagctgtctttgaatttggccaaaggcacgaggatggagatcacagtttctactaagaatcgcttgcaatcatgtcatcttgtcatctggaggagtgagccttgagtataacaaaaccggtctagaacccaccaacgcctactaaaccaattgctctgttccgcactcctcggccccataccctgaatgcgacgcattctatgcctcaaaattataccaatatgtgggaccactctacaccgacaagcccatgcaggatatttctccggtccaatccaccccacccccagatccagatgaaatgggcaacagtaccccgacttgcagatctgaatgagagatggataataacccatagccatcgcattagctatgccgatgatgcaaatgtgtttcatattttccgatgtagcatcccaggccacaaatagcagctgaattaatgagcaccacctatccaaaaagaattccagtcagaaagcacaagaacaagcccatcacgctaatagtaccccgcaaaccattcgctcctgcacgagcccccagactgctgaacacccaaccggcaaaagccctggaactcaacaatattgagccggaacattgataattagccggtaacaccgatgattagccgcaaatcaggaaaagataactgcttggcggtgcattccgtgagggatcagcgttgttcctcataagtttttctaattgcgggcagtagagttctgggatagtcagacttacatagagaggtgttggagcatccctaagtcaatgcggggtccgatctccacggcagcaaaaaagcctagctacggatggagcagtccttgttgtgccacaaagatgtttgtgtaggaaatagacaatgcatttatgttagagcgaaacatacagcatgctgtcttgaagccgaacagaaatgcacggaacacttttgtaataggattgttagcattgttagcattgagaattgagaattgagttcaggtgtgcttccccacactctctcgaagtaacgtaataagaagggtttccccatccggcaggacgagcggtgatcagttggacgtgagaagatggctagatcagattagaatattgaaagtcatctccgtatatttatttgatcaggtaagagtggtgaggtatctgccacggaatggttaggaatttaggatagccgacattatgtgtactccatagttctactctgtataccaccacagcataagaagctgaattccaagaagaattaccaacgacttttttgcttgttcaatatataacgaataattagaattagaattagcggggaagaggcgcgggcgcggtgttacgatcgtcacgacgtcgacgtgagacgccgatatttcgccgtcgtatacggaatcgaagcaaggcgatggattcggaaatcaatggctctagaagtgtactccgtatgctgtgtcgtgtaaaacggagtggctgggtaattctggtgatgtacttgggaaaggggttgacttctcaccctgcgtttctccttgtctcgaccagccacaatttgtaccttgtgtcccctttcaaggatgagtgtctctccaacttcaatgagactacggagtacatactccataagaataagtcatatccaatgataggacacgatataatgtgattagtgggatagtgcatattttgtcgatccttttctccatttttattatttttgttgatctcatttgatctcattttatggagtagatatatacgctatgcattctattatagcccctgtgagtaatcaggaaacagaacatttaagatcccagtcttcccctccgagatctgtggcttgttccttcctcacgccctcttctttcaatacttgtgccctgtgagatcctatccagcgctttcacagtaatgaagctcgcgtggtttgaggtagccgccttgtcggcctcggtgaccagtgccagtgtgagtccaatttaaacggttgacaatatcactgctaaccaagtcacatgaaaatagtccctggcctattctcctccatactatccctccccatggatgactggcgagggcgagtggtccgaagcatacacccgagccgtcgagtttgtctcaaacctgacactggccgaaaaagtcaacttgacaaccggtactggctgggagcaagaacgatgtgttggtgagaccggtagtattccccgacttggcatgtggggaatgtgtatgcaggactctccattgggtgttcgctctagtaagcttgccagttccaaataagcttgtcgttgcagttaactaatgagactggaacaggtgattacacctctggtttcccctctggtgtcaatgttgccgcagcatgggacaagcgacttgcctaccagcgcggtgtggcaatgggagaagagcaccgtgacaaaggtgtggatgtgcaactgggtcctgttgctggccctctagggaagaaccctgatggcggtcgtaactgggaggggttctcgcctgatcccgttttgactggtgtgatgatggccgaaaccatcaagggtatgcaggatgccggtatcattgcttgtgctaagcacttcattggaaatgaacaggaacactttcgtcagcccggcgaggctcagggattcgggtacaacatcagccagagtatgagctcaaacattgacgacaagactatgcacgagttgtacctctggcccttcgtggactccatccgtgctggtgttggctctgtcatgtgttcctacaatcagatcaataacagctacagttgcgcaaacagctactccctcaataagctgctcaagggcgagcttggcttccagggatttgttatgagcgactggggtgcacaccacagcggtgtcgaatctgctctggccggtctcgatatgtctatgcccggtgatgtaattctcggtagcccttactcctactgggcaaccaacttaaccatctccgttttaaacggtaccgtccccgaatggcgcctcgatgacatggctgtccggataatgtctgcttactacaaggttggacgtgaccgcttccgcactcctcccaacttcagctcctggacccgtgatgagtacaacttcgagcactctatggtaagcgagggctggggcaaggtcaacgagcacgtaaatgtccagcgtgaccatgcccagatcatccgcaagattggctctgacagcattgttctgcttaagaacaaggctggtgcactgccccttacccataatgagagattcatcggcattataggagaagacgcaggctccaatgcctatggcgccaatggctgcagcgaccgtggttgtgacaacggaactttggccatgggctggggtagtggaaccgccaactttccttacctgattacacccgagcaagccatccaaaatgaagtcctggaatacagtaacgggcagaccaacgtcttcgctgtgactgataactgggccctcacggagatggccgcccttgcctcccaggctgatgttgccctggttttcgtgaacgccgacgctggtgagggatacatcagcgttgacggcaacgagggtgaccgcaagaacctgacactctggaagaacggagaggagatcatcaaagctgctagtcagcactgcaacaacactatcgtcgtgattcacagtacatccgctgttctgattagcgattggtatgacaatgtcaacattaccgccattgtttgggctggcttgccaggccaggagagcggtcggagcttggtggacgtattgtatggtcgtgtcaaccctggcggtaagactccatttacctggggtaagactcgcaaggactacggccctcctatcctcacggtgcccaataacggtgtcgatgctcctcaggttaattttgaggatggcgtcttcattgactatcgccgtttcgataaagacaatacggagcccatctacgagttcggttatggtctgagctacacaaattttgccttctccgacctcaaggtcacccctctagcctcatccgaacagcgcgagtacaaggcgaccaccggaaagagccaaaaggcccctgttctcggcgaagccggcaaggtcttggataacctgttccccgagggaattacacgcgtccgccagtacctttacccgtggttgaactccaccgacttacgtgcatcgtccggtgatcccgactacggcatggactccaaggactaccttcctgagggtgctaccgatgattctccgcaggaccttcttccctctagcggcagctccggcggcaaccctggtctgttcaaagatctctaccaagtgaccgccactatcaccaacaccggccccgtaactggtgacgaggttcctcagttgtatgtctccctcggcggcgatgataatccctcaaaggttttgcgccagtttgaccgagtcaccattgcccctggtcagaccctgcagtggaccaccactctgacccgtcgtgatgtctccaactgggacgttgcctcacagaactgggtgatctccgacgcccagaagaaggtgtatgtcggcaactcatcccgcaagttgccactatcggccgacttgccctcggttgagtaaatgatcttcctttttggaatggaaactggaggataactacacatgtccacatgagtcaattctcttgatgttgtacagccaacattgcgtttttgcacatattctctttttctcaagacatggctcctgtgactacttccatagctaatgaaactcattaatatctcttatgcagttcgttcacagaggcatccaattgctatctgcagaaccatacttcaactcggacgtaaaagccagacatccattcaatctgcctctcaaccatatctctcacaaatttatacaccggtaaacccgtaaaatgcaatccatccgtgtccacgcagcaccaccctccgcaacaacatattcccaaccaaatccgaccgcctcaaatcagctcctaatccatatcaaatcaacaaccataatctgcagcatgctcacatggcccgatgaatacaccgaatttacaccatcccagagcacgacttctcaggcacagtagcatcaatctcccaagcttcaacaacaaccctgaaacccgccgtcttcggcatgacctccatagaccgcggctcaacatggtcatcgtatgtgcttgtcacaaccaatgaagtcgcactcaaaccaacaggtctcgggagggaagaggctgcggagttaccgctttgcgcgcagacggcgtacgaggcgctctttgtgcatgcgggtcttcaacttccgcttttgggcaggtgtgcgctgacggaaccacagtgttaccaggagcaggatcaccagcatgcttggcagttgggagagcgcgtgcttggtactggcgctgcgggtggtggtggtggtggtgtttttctcgtgcaacttgctgcgcatactgagatgcatgttgttagggcgggtgagtctgttgcgagattgggacgttttgatggagttggggatgaggaggttattgagtatgcggagtttgtgggacgtccaccagggtctgtttgatgttgttgttgatttggtgggtgggtatgtgtcgcagcggtgttggtagtctgtgaatgaggaagttgtcttgatatctgttggtttggcgagcttttgttttgtcgaggttcatacaaagcgtaagttgagaagtaatagagttaaagcgtgatttttttattcttgagggaagtggagaggtcttgcgtgcgcgacggcgagagggaagttgcagtcatttgttgctgccaatttttgcttataattatgttaatggaagggctgatgctcgagggaaggttgtgctttatattttagattcactagatctatgagcattgtagcaattccaaaatcactagagctcgcttaggtagaggttaaatcatcttcccagtataaactttccctggcaagctgtcaaaacgtcttcgcggtgtgcattagagagagatacacccctcaagttcaaggactgttcctcaaaagtcggtatgatagtgcgcaaaaatgccttgaaggaatcataggtgatttcaatgcaataaagattagttagggatttgttgtgaatttgagtgtaagacacgaagggcagcagagcacaatggtcattgctgcatatgtctgacttcttgagtttcctattggaggcaaccgctgcctctagaagagccgaaaaagctatagcatggtacttgtgtatggttttctgaggttcaatccgaatggctcgaaatccaagctgatgtttatcccgcgccggctgaggaacccggcatcattctttgcaattggatttgtatctcgggaaaaagccgagtgcttaagctgcaatcttatgatagtgtgattcttaagcgtatcggatttgattatgttgagatgatctgccactaaagcctgatatgcagtacgctaagcattaatctaggtgacagtattatgtggcctgtctctatgtgaagtggtgcacacttgaagaagtcaaggttcatcttatgaaagccctcgaacaaggatgatacagtccatagctcttggactcgtgttcggaggtcaacccgtttagtatgagaggtctgccgtcacaaattatcttttagtttacaatgcctctttcaaatccattacacttgcggagacccgattattggtgccagatagcactccagcagaatgtatgaccaggtatcgacctccatcctccgacagcactcgtagagaccgtgtgtagccgtgctcttcgggcgaagtgatctctgtccactctccttcgccaagagctttgttaatgaacagagtactctgtgtgccggagctggcgataatagtgccgtttttaccaccgtatggtgtccacacaacgtaaggcgaagatgtcggccgagtaccactcgagacaactagacgctggcctggggcggaggcgattttttcggggtcggacgacagacggtagtatatagggaaggagtagcttgatgtaccgaagaaggagccatactcatatatgtagaagtattgaccgttcgggagctagaaatgttagaattctccgggtatgacagaaacccatcgtaattgcattggtgtcttgggtttagcttaccttggtcagaactggcatgccgggtcggtcggtatatgtcgggtaggtgacatcctctacaatatctccccagttctttaggtcagttgagacctggtgaaccattgtctgtccgtgtgttgcattatcccgctgatccgagtaataacaaatcaacttgcccttactgtgaaaggagttagggagttatttcaaggcagaatataagaacatactgagcaagtaggaatggctcccatacaggagtcagtccattgttcggcagtgcctctcctccggcagcaatatggctaacaaacttccaattcacgccatcatcttgcgacgcgtaaagatcgatgtgtgtggacgacaggtcagttggaatactactaccagctagaagtagagtgcctttttcaaatgaaccgatgcgctcgggcagggagtagaggaatggctggtaacgcaggccatatccgttaacagtgtcatggaccttggagatctcgttccaggtctttccgtggtccttggagcggtatatggggaagtaaaccgccggtggctctggagagtagttttcccatgttgcgagaaggtcaccattaggaagctgctcgttacgtgggtaaagtgttcgtgggacgatgtagtcggagggtggtgagaagatggtcacgtttgtgagcgggacaggagaagattgcttggagcgcgagattgtcactgcagctgtagctgcagcaaaagcaaggacctgtggaattctcatgtttggtacatatgttggaactggtattctatatctccattggcagcattatcctgcttttataaccgcatttcgtaaaaaagaaatacgggttgattttttgagatacatagtatcccggggttatcccaccggaattaaccttattgtggactaattggagtgtatttcatctgaagaatttccgtcaattacggccatcgtagataatccggggaaatatgaaatgacgacatcaattgccaagatatcacgtggcatcacgtgatgaagaacatggggtttccaccattccttcggggctataccccgtcaggatcgggggataacctcgtatcgaccaaaatatactttgaaattcgaacctttgaagtccacgccaattgggcagcacaagcccccaggcagtttggccccatcatccaaagccaaatttagaaatgcccgaaaagttgaccaattatgagtgtggatctacattattccaactacgttgcctatcagcacacagccttacagcatcgccacgttttgctggcaaccaacatacctgaaagtggttgattgggaaaaatcgggctatgtatcatgagaaacttatttaccttggattgcctccatctttctgtcttccagatttcacctttctccaagacatccaagacagaaatatccgtttccaagttacaggtgcatttgtcttaaaatggtacctaccgacttcgcacaccggccaaaagcccagttgatagggaaactgcaacaatcgacgagggacctcatcagtcgttcaacggccatgtgggataattcaaagtatcgctaccatcaatcgataatggaaatcaggcacaaaccagcaaacacaataaataattcgacggataggtgtcaccagtcaactgaattgatgctatatcgaccggtatcaaaacggaatcagtcagcagaccagttacaccgagtcgctcgtgttgaagacacaacacaacaggttggagcacgcgatgggcaaacccaagagcaaacgcccccacaatcacgattttattcacgggcattcaactcgcagtcaacaaactcatctccaaatcccaagaccacgtcacgctccacaaaagtgaaatcaatcaaatctgcctcggtcaccggaccttcactatctctggaggagcagatcggagggttttacaaagcaactatacttgtcaggtccacggtgaagcaggcaagacagttgcgggatgataaaagagcactcctcggcgagatcgagcttgagtggatcaactcgaccatcaccggtgccgaaactgccgccaatgatttagctgcgtctgtgaagcgattcaaacagagcagcccacagaaccgctgcagttggaagcgtcgtgactacgaggtcaccctggaaaaggaatcccgtgtgcttcttgctcatgacaaagtcaagacggttcttagccatcttggctcactacaactcaccttgggcaaggatgaattatttttctctccatctgaggtttcaatggtcgcttctgcgattttggaacttccatctgagacgactgttctatctgactttgagcttttgcctgtgaaacctgagcgacctataccgaaaatcgtggtgacacaatatgatgacgataatgaatactcccatagctatcaaagttcccctccaagctacgaagcaagtggaatgaatgccatggcagagtttcggtgatcgtaccactgcatggcttccgaacgctgaacaggagcggtgtgattgttctgtaacttatgatggacgatacgacatgaataatggatcaaagttttggctctatagttacattaaattcccagttcgcaagcttcttggcttatgtcgatccaatgcttctgcctggtcaatgaaatctaaataaagccacaccgcaaaaatacacccaaagtggacactgcgaacaacatctaaagacgcgactgagtattaagcgcgttgatctcctcaatcacagtgtcgactgcctcaaccgccattccgtatccagcctggtaaccggttccaccggcgccatagttatggacaacaaccccccgacgtcctgaagcgcctactttcacgttctccctggcaacgcgagcgccaccctcgcgagatgggcgtagcccagcaaaagcaccaagaatctcagtctcgcttgagtttagagcaggaagcaaagccgttgttcgagtaaggattgattctgactcttctccaaatgtatccggtgtactgttgatatagttcagttgctgtcatatggaacacccgggagaaaatcccaatggactaatgctactgggacaaagggctgaaaggaacctacttacccaacattcttttgcatgaatccaccaaggatcacttttccattcgagtatggtcgaggtatcacgtaggtttcatagtccttaccatgtctcatgatgttttgttgaacatgaggtgcttttgcaagcagaatctgacctctagtgggaaaacactttgagtcttggactcccggtaactctttcgctgcattgccagtgcagttgaataccaccttcgtatccgtgctgatatagccggatgagactttggataactttttgcgaatgactcgcaccccatattcttgggtgagcttctggaacaaataccgaaggtgcattggtgcattgagagttattgttgtgaactctataccaaatgcaacacccgctggcaggtcgtgtgtggcaatctgtttgaactgttcgatggtaatattgataagcatatctagggtaagcaaggaactcatccataactcacatctttgagatacgcggccatcgaatcgatcttctcatgggctggaagctcatcccaatactctaccgatggtgtttccttcacaaatgcattcttgccatccttggcagcaagatcgagaagatacatatatccaattttgtcccaccgcaacgcatttgggtcgcttgcagaaatagcagagaaattggcaccagccctgaattcgggttagtcgtttgaatgtgaactggcagcaggagcccaacataccatggtgatgtgtaatttatggaagtatctcctggaagatgttctgcaatgatggttatgtactggctatagcccttttcgcagagaactagggctacatttagcccgatcacgccggcccttacaaaaatcagtatcaacaccccgaaacagtcatgtatgttttggctctcacttacccgatgaccactacagattcgcttttcatattctccggtagatttattgaccttgaatggaatttagtttccttatttgtcccttttccgctccgtttgagagctttaaatactttacaatcacagttctttggattagatggtctgattgatttaaaccgcggcaaagtccgcggtccatcccccgcgggctaattgagggctccgattggcggcatggctagtggggacggatagggactggcggggacaagcggtatcacatatcattggtcaatattattctaacatcgatgagcctcatcacgacggacagtgatttcgacgaccgatggggaatcattatacggctatggaggtaactctgaaaaggaattcgtttgctcgggaaattgattcaattgtgcctagaacccactttcaaagaagagagagagtaaacagagggcaaaataggtaaagtctggcgtgttttctttttccactgtctttcatgagatctttccaattctctcagatatagtaagaagcacaagatctggaattttataaaccactctagtcctacagcagatttctaccgtctatgatgaaatcatctcttctcaaaatatgatcgctcgagtacgactgctatcccaattctaatcggagcctgctaacgtcttcggtcagcgggctggccacccgtagacctcaggcatgtaagctgattgaccgtcccaaaacacaaagtaaatgcaacgttatatcttggcaaccacgtttctatttagtttcattacttgtcgatagctatcgacaaccattctcagtagtatatatcaatttcagataaatcgaaaatttacattattatggtattgaaaattacatcactgaactctagaattatatcacagtcattacacatctttattaggtttcttgaaacttcttcgagtggctagatataaaaaaaaatctcgaggctatagaaaaaaccccatttagaatgtcattgttgatatagttcaatatcaagttgtaatttatctcattcataatttagctactggccagcccggggctagtaacatccccgagctggaacccaggccgcttaggcatcgacttcgggaagacccgtagacgttttcggtgtcaagacccactcactagtcctaggtagcccgatgtaattttagttatatgcccaacatgttccatatctaattagctcacgtctccagggttctccctcttacggtatactcacttcttcttctatacctgtccgttttctccaatggtgcatgttgccgtgcttccacagccaatagaaggactcatctggcgtgaagataagaacttgctaatacccaatattggcaatgatctcatataatggaaattattaaaacaacttcaagacttcaagtatcaaattcaaataggagaaaaaaaatgcctcagggtagatgcggagatacctcggcggtgatatctcggtattctgtcgggtgagaccggttcacaaatttcagacgacccctacttcacatgtcatcatataaaggagcgaaaccgccgcgcaaatacaaatcaaacttgagatcaataaatttacggattgtcaatacatcatgtttcaacatattgatcatatcggttcacaagaatcgatccctagaatgagcaagtcagagtcctcctccgtcgtgaatctcaacgccaccctgcaggagtcacatccttcacctctccagcgcttgaaaaaacattggaaggagataaaaaaggagtggggacctctcatggcggccaaagagagcattgatgacgagtacactttcccaccgggccgttattgtggacaagcgcacagatagcttgacaatggtgagtgttttacagtctgccgcatacatcataaactgatctcatctaatgttgttttgaagaaatatacaggactcaatattcttgccaagatgggaaaggagtggaactttttcgagatagggaaaggccaagtctttcctaatacttcgacgatcgtggccatacaagatatgcgaccttcctactatcaacctggccagttgttttccacaagcatctcaacttcttttctttttttttcatgataccgacgaaccccttcaaaataatggcgcttgctttgcgaaacatagatggggactattttccaacatggcgttacccttctttcggtcacatttcgctagcggacctcttgggatgttgaggatttgactatttccttcaagatagaacgataattcataacttataatattctaattcacatcataagtactgctgtctgcatctatatcttgctgtcgacctcgaatggagctactaagagaatggaaagaaaacagaaaataagagacagaaatgaatcagggtggcaaaaacaaacagaattacatattttcatttcccgctacagcgtatccgaagcgtatcccctagttaacaaactatagttacagtggtgtttcatgtgtatttgaccttgagtacttcggcctgggcccactttgtaggcccacttttaatattgctaggcagaaacctccgaaattcaatccaattcaattagagaataagaaaacagtgcagggcgcgcgaggtttaatatactaatatagtaggcggtctaaaatggcggtcggagcctaaggtgggactcgaagtacccaaggtcaaatactcatgaaacaccactgtacgatgaaagttctttgcctgagtatcgaggcattaatagtggggatgttagtgaactacgcttaactctaaatttagaagcatccatcaaacacaaattctgggatgtgaattttctattcagatcagttaggcactcataggttctccgggtttctggccgtaaaccacccgcaattttgtgtacaggtgatgcgatgtatctcgcagctccattcgaattcctgccaacagcccttcaatctcggagcgtgtccacccaagcactcttgaaaacaacgcatatgtataaataggcatagcttcaagcatgttgagctgatggtaccgaccaaggtccttgagcttggggtctttaggccatggactctggggcagctattcatcaataagcaagcggttccattttcgttaagagatggcggaacataccttgtagatatcttctttgacattcacaaacccagccttctccatccgcgttttccaggatggggacgatgtcatatccttgccaaacatgcgcgctgattcatgcatgtgcttgatggataagagaaggttggttgcgccaaggtgagttccgtcgtccgaataagtgttgacgtcgaagctcgctatctcaaaccatccattgggattcaggttgctaagtacccgtttgaaaagaaggtcatggtcacggatggaaccttccaattcgcgtccatggatatagtcaaatggtttgctgtacgaccatggttgttcaaagtcgtcaatctcaaagcggcagtttggaggcaccctggacatatatcaatattatatagggaaccaacatagtagcagtggcacataccatgatggctgaatagcacttaggtcaattcctatttcaattagccaaagatttgatcaggatgtaggtagatgctcataccaatcacctcgcagtctggatttgtactatatttcttgttagagggtagactttatatattggagaagaacttgctctgcatattcgattgcccataagcctgttcctgtcccgagatctagcactcgctttggatttttgattggtgcttggaacaattctcctttgaggagcattaggtaaatgtggtggctctgttgctcattaaaatttttgtgtcatcagaatcagcaggtgagaactaaccagatcaagacggtcttgttcccgttcatcatttggctgtttggacattaggctaagacagagagtaatcgttgatagggtcatgtaccaaaatgtattccccttcatgatatgaatgatatctgcgaccgttctgtatctgatcagcacagttcgtgatccgtgatcaagtagcgttgtaacacacttcatatctgcgattattagcaaccattgaacaaatatttcagctacattaacatactgatagtccagcacgctcgatgtgatacttgtggtgtaaccggcattgtcaagtctatcagggtcagtagatatacacaccatcataagtcactggtcttacgaatcagggtatgatgaggcctcggcatcggactaatgatgttagttgaataggaaatagtgcacaaaaaagagaaacactaacgtcaggttcaaccggggtcgatccgtgttgtgtagctcgatgcatcttcaatagtttcggtctataggatagcacgcgaactcagcgaaagcgcgttataagtgatcgaagggatcaggaaaaaagtgaaaagtgaaaattgcaggcacaccgattgcagtcctaggaccccccttatgacccctctgtcttcgatgcagctgttagcgtcccaggttgtcgggtccagcgttaccacgttgtatcccacgatgatttgcaccgtcagccggataagtactcctttgagtaaagagggccgctgtaggacgtacttttttccttagagtacatatccccgtgcaacgtgcaacggctttgaatggcgttagttggataatctaagtggttaaacaacaatctagcgtattgatcgccctaagctgattagctcactcctgtgtgatggtccatagtgctaaaaaggggctgtttctcggccaatcaggggtgtattgcaacgggtggaggcccacaaggtgtaatttgtaccagccacgccccattaggtttggctgatatctactccgtactatgtatactaatccagcaataggtagtttatatacaaattccgttaatcctttgtgtagactcggggttgcaaagtcgaactcctactacaacgaagtccgtgcagtgaccacatcagggttagagtggggcggacaacgtaattgtttgtgagtatcccgtacttttgcccaagtcctcgtattcattgtcagaaaagtgttcaattcgctgctagtaacgcagtacttgacaccgtcagtcccgacaacttggtcgttcgccactaggcagcgtacatatgtgaaggaaagacctcggaactcattccactcatcctccgtgaagatagtcgcctcggcccaggtctcaaatatcttctagagttaagaaattgtgatccgtaactaacgcattgatgttattgctttggggatgcatataaccagtgctctagaactcgaattcttgggttcgaggcactatcacatgctaggtgtgtgatatttatttatataacttgtcggagacaacgagtaatcgcggaaacgcacaaggctacggacccggtacgataaatccaaagtgcagagagactgaactacttttaagtactttttacaggaggcgaagcagctaatcctaagtcgagaccctcaagaaacatatttttgaatgactacggtgcaagtattttatctaatatgtcatgcataaatcatcaatgaaagatatattaattaattcagcccagttctgcatttataagaccatcaacagcaatatctattagatgtattgataaagaacgttctatcaccgagggcaaaaatgatagttttttccttcaaggtatttctccggattttgctgatagaaataatctcgaattcataagttgcctagatgaatgaggcaaatgggtgttcaaatacccagcatcctctatcgactcgaacaaaagtccggcatcctttggcatggtcgcatgttactagtgcaataaagatacttttatgtattgcatcagtggcgctcacccatgtatattacccaacaaggtgatattcgctggacctgactcgtttccccgcatggccctttgttcagggatacaaagccggcctctggaagttgcatgcaatgaggtgaatatccctaaacgattggttggttttgccctaaacatttattgctctcgcgttgctttgattgattccattgcgtggtttcaacatcgagtgtgcctgccaaagaaggaccgaagtggccgtatttcaatttcttactctctaggtgacttcaacgtccattctgtgattactagcttgaaaattaaagcaatcgatcttcttatacagtacaagaatagtaggccacatttgtggcctctgtcgctgagaatgatatgttccagtatactagtcattttacatgttttcctttatatagaaagcttgctctccttaactttcctaagtagacaggcgcaggcagaaaaaggcttagattgtatctatagcctttggcacaagagcgggagatggaaatgaacgagatgtgcacaaaaactatatgcatcgaacctcctattgagtatcgctattgattgctgatgtcaaattactcaagtctcttgcttagaacagcaccgtaccagactgtagcaaccaggctgatcaaattgaccaaacttgagatgccatgcacgcggccgaacttcttgttcagagccagcatctccttggaatggggcgccgggtcgtagctcctctttccatcacgagtttctgcgaaggttagaatattcaattgaatgttacccaagcatggtggcagcagctaacgcaccttgatgcttgcgctcgcgcatcacgttggtggtgatgggacgcaacacgaacatgttcaccaatccggtcactgtcacagttgccagaggcaagagagtgttaaggcggttctcgggtgcagcgagacctgacagacccaatacctgtcccccgtgggaagcggtcaaggcgaccactataggtagcgcagattgcagtgagaaatatatggggaagatggcggtttgcagattagcaaactgaggccgcggaagggcgcggaaagcaacgaagcctccaacaaaagacttcggatatgtcagacaatgcttttagaggcgacgattcgaccatgcgtccggttcagatattgatctcacctggaagaactgtgtccctagaagggtgccgtagctacctcactcattagcatatgagccatgacgttcgctaataaacaaaccttagaacgtgataggggcgaggatccatgatttcggatatggtatgaccttggggaagttgagttgagttggcgataaagttgatgtgaagtcgcaacgaggggaagaagtggtaattatcgctacgacccaattattaatgaaaccattatttccactgccaatcaagcgtatctgacttctaacgacgcacagaccaccaaaaaccgacaaacacagcgtgtgatgtcatgtgccttcgtgtttcggtctaaaccgcaaatggaaatatcacgcgtctgcctattgtctttgagcctcgagcaattttgacttgccgttttccccaaacaccaccatcaccatcatcatcatggcggagaaagaggctacagtttacatcgtagacatgggacagtctatgggcgagcgccaccacggccgtcctatgacagatctcgaatgggccatgcagtatgtctgggataggatcaccgccacggtatgcgacttggctttgctcaataccaggacactaacaatcctaggtggctaccggccgaaagacggctacggttggcgtggtcggtctcaggacagatggtaagtggtagcctaccagtcagtacccattgggagccttgtctcatgttcggagtagaaaccatcaacaacttggaagaagagaacttctctaatatctctatcctctttgggcttggtcagtatgtgtggtttgatgagttgactgtttcatgtcgggtcccttgactaaatttcctttcagggtcctcatgcctgatatccggaaactccgagagacgatcaaacccagcaatactaacagaggcgatggtatgtgacagatgaaatctcatcaagctgctttttctgacattatacaagccatctcttctattgtcattgccatgcagatgatcattgagtacaccaagaaaaacaaatacaagcgcaagatcgttctggtgaccaatggtaccggtatgatgagtgatgacaatatcgaaggtatcatcgaaaaaatgaaagaagtcaacattgagttggtgatcatgtatgttcctcgtctatatgactccgcattatgctaataccatccagtggtgccgattttgatgacgctgagtatggtgtaaaggaagaagacaaggacagtcgaaaggtattaagccgtcttcaatgtattccaatattcatgttaatcaagttctcctcaggccgaaaacgagactcttctccgaagcctgactgaggactgcgaaggtgtttatggaacgctagaacaagctgtttcggaattggatattccgcgcatcaaagtgactaaaagcatgccatctttcaaaggcaacctcatgctcggcaatcccgaagagtatgacacagctatcactatacctgtggagcgatacttccgaacttatgtcgccaagccaatctcagcaagctcgttcgtgccacgctccagcaccgaacccggaagtcaagcaccggttgaaggcaagggtgaaggtgaaggtgacgctcttagctcagtgcgaacatcacggacatatcagatcacagacgaaaccgccccagggggtaagattgacgttgaacgcgatgacctcgccaaggggtacgagtacggacgtacagcagttcccatcgagcaaactgatgagaatgttgcaaatctacaaacatttgctggtatggggctgatcgggttcgttcagaaggatcaggtgtgtcttcatactaatcccatgtgttataccagctaatcccgtcaactagtatgaccgttacatgcacatgtccaacacgaatattatcattcctcaacgtgcaaatgacaatgcgtctcttgcgttgtcttctctcatccatgcactgtacgagttagagtcctatgcggttgcccgattggtgaccaaagaatccaaaccaccaatgcttgtattgcttgctccatctgttgaagcagactatgagtgcttgattgaagtacagcttccatttgcagaagacgtgcggtcatatcggttcccacctttggataagatcataactgtctctggcaaggtggtaactgaacaccgaaacctcccaagcgcagctttgaaagatgcgatgagtaatttcgtggacagcatggactttattaccactgatgatgatgggtaagtagagttcacttgattgtccagtcaactagctaatcaaaagagccagggaacccaccgacgatctcccaattgacgagtcattctcaccattactgcaccgtatcgaatcagccgtgcgataccgtgctgtccatccctacgatcctgtccttgatccctcagagcgactcacccaattcgcacacccctcggaagagatggccaagaactctaagtcccatctggagaaattgatgtctacggcagatgtcaagaaaggtgaaccctattcttaaaccccatacattcagaagagcccctactcaccaccgaatttcgttctatagttccaccaaagacaaaaggccgtaaacgccaacgcgaaacagagaaacccctctcaggtctggacgtcgacgccctcctcagtctcgaaccaaagcgaacgaaaatttccaccgagaatgcaatcccagagttcaagcaaacgctttcccgagcagaaaacatcgatgcaatccacgacgctgtgcagcaaatggctaagatcattgagacccagattacgcacagtctcggtcactcgaattacgaccgtgttatcgagggcctcggtactatgcgcgaagaactggtggactacgaggaaccagtggtgtataatgactttgtgcgccaattgaagggtaaggtgctgcgggaggagctgggtggggatcggagggagctgtggtggtttgtaaggaaggggaagctcgggcttattgggaaaagtgaggtggatagctcggctgtcgaggaagaagaggcccaagaggtgagctttgatttcttagtggggagtagaacgagtgctaacgctgcatatagtttttcgctaccaattgaacggtcgagtgggtgacaatctatggtctcgatcttggaacacatgaaatagtgcgtatgcgagagatatggaatactcatgatatttttatgccaaatttacccccatgtagatcttgttgcgtccgtgatgttatatagaacgcggttgaagcgaaacaaagttaagagtccacctcagatgactggattcgataatactgaccatctagatcgagggatacaaaattaaaagagtttagggagaaatgggaccactgatggagctcatgcaatattgccatatcgacgtagaattgacacatacaggagcgaaacccgcagacgaaaacatgtggcacgaaatgaatcggtacccaattgcaaggcatctgacgattcgacaacaaaaccaaacgccgcgcacaacatgcccaataataaccagtactcgctcgagaaaacaacaatagaccgagatttgcaaactccaacattaaaagcatccagatgcatcacggaaaaggggtatgcagaagtattgcccggatgggacgagaagaatggaagaagcgcctcgaggaaacttgcacagttccttggggcgaaagaagagagcaggacgtttagtggatggtcttgattgcccgtgcggggctgatggtattgctaccaatacggccactaggcttacgaacaccgcgagactcgctgcgggtgttttccgttgccctgcgagggctggagcgaatcttgctaaccgaaattggggcagcgccgctcttacgggtcacaggagtcttgggtacagagtggtcagcccagttttcctgatccttgtggttgtcttctgcgagggtgtagctggctgtgacggtagcagagtaactgatagaccgtgatgtgggtgaggcaacaggagatctagatgatcgctgggctaatcggcggagctgaatctcttcttcgctctcactgctctcgttgctcttcctgtgactgcgatggctgcgctgctcggtttcaacagcgagagatccggagacagttcgggaataaggatggtgacgcgagtcctttcggtgtgacttgcgaggctggccaggagttggtgcaggaagatcctggtccgggtaagttgcagcttcattgtgatcaatctctccaagggctgcgcgtttggagtgactattgtttggtggggtggagacaaccccgttactagtgcgcttcttagtcgacactcggggagtaacaggtatggactgtgctagcttctcgcgcatgctatcctcaaaccaccattcacggaaggcaccttggttgaggtggagccagtgctgctgaggtccaacgaccataccgggtcgcatgaatctcatgaaggcaattacttcattggcggtgaatccatacttgtagatcaggtaagcgccaatcaagcagcccgtacggcccaagcctgccttgcaatgaactgcgatacccttcttcttggtagttatcatctcatgagccatcttgataaaccgtctgacaagctgcaggggagggcacgtgccatcctcgaaaatcatgtcaatatgggcgattcccattgcggtgaaataagacgggcagtagagctctgagttgagtcgtacaacgagaccgacgttccgctggtggaaatgggccagaacattcttgaatggcatagaaagcttcgaggaagagatttccgagatggttgtgggcaatgcgttgtattcgggggtgctgacaggaatgggtgccacgggctcctgctgaggggatgcaaaggcaaggaaatccggcgtaacccagttgaagtcacccatgtcgactcgctcaaatttctcatacctattgaacaaaatcagtactcaatcttcggcagtataaccagtggcacttactcctcgagattgaagtcgcgaagtccgcaaagagactgctccttagccttccagactccataaacgacatcttgaatattcaaaataaaatctgcctggctgtatccagcatctcggaaaggcatgtaaggggggtctgcctgtgcgatgggtgctaaagccaaatgaggtggccaagattgaatcatgaccatatagcatgcaacaaggcaggccgcattggcgcgactccgggaatcagtcttgctatagaagactactgggcggtcgctgttggctgggtcgccaagaatctcatggaaaagcacggcaaatcggtagaggtgaccaatgtggagtgggccgaaatcagcgtgaaaggcattgtaaagaagggtgtcatcgatagtgaagtagacaggagagcggcgcttgcttggagtggcgggctgggcacgtgctcgcttgcttggggatttaggtgcgccctgatggaagggaaacggggttctggagctgggagcagaatcataagatgcaaggtataggcgatctaggtggtagtttttcttagctctctatactaggtaaaagacattcaaattgtccgaagaacgttgtaccaaccttggatgtactcgatcatctgcccgccgtgattgaagtcggtagtcatattgggggttgtttgttgacagccgcctagatctgcagtgattgtggaacgctggagcgaaggcgaatcaatatggtaccgttgcaggtcctgatgttgttttggggtgactcggaagatggcgaagccaatggtaagaaaatagtcgcggtaaaagtcagacctaaacgttcatgatcaaactgagggaaggagatctatgagcatagaatgttaaggataaagaggaaatgaaagcctggatgcaaaaagcctgtacaggtgaggggattggagaagaaggaaatcaacacaaagtccgagttcatgatgtttggggcagctgccatgccactgttatgttgtgccttacctgtttgggcctagttgcagccgttgacgtgacaacgccttggcctcaggcattcaattgtctgccttccgcattccaaaacatggcaaccacaacaaacaaacaatataaacaccacaaacttcacaaacgtcgcaaacaccacaaacatcaacatcaacatcactcattattagctcacatctcatacatctcatacatctcctctccagttcgtaccccgtcttcagctttgcctcctgattgcacattcccatggcaaattatatgtttggcgagtaattgattcatgtggataaacgagcccaagaacaaagcactcatgcgcccctctacttccatttaggtaacgagggccggtatatcatcctcgtgatggtcactgcggtatcaacctaaaacaaaccatcgcactgaaaggtgatgttcaagccgctgctctctaacactgcctgagattgagtgacctatctggtacagaatatgcagttagggcctccaagctgcattttcttaacacaacatctgctcaatacagcggcttcttgacgaaatttgcttcatgttgaatattctcgatggtgcctatcatgttcaatggttgtgacggtacaacactcgaccagtcatctccgatgatcctgggatcacaatctacctgaatgacgtctactgcattgctttgtttctgtaatagaagacagttgctgaatcaaaaaagaaacttcaaaaaacaacatagatggtcttcggtttccacttccacttccaacatggtgtgcctccacatgccatcaagtaccaagggcagggtggctgctacaatctcggcagaggctgtggctcatgcagattcaatgcaaggacatccctcggacgatgaactgtatttgtttcgaagccaaagtgttccattcacgattcagtacccctgggaatgcggtgatcgacacaaatttggggccccatataatgacccttgcctgagcctaccgtcaatcaatatacacccctcacttgaacttcgagagttccgggtgttgtggtattattcttactctgatggagcaatatttgacttgattccacaagttcgaatagaccatgctgaatctcccacgcaatattctctgtaactatgaggctgtgagatagtcaccccaaatatcctgcaaagaagaacaagcttctacagtttatcagcctgctttatccggcccaaccttgctgaaacttattcatctacaccactaaactaagacctgctactcatcctaactcgaggccatgtaggcacatacatcccttgtttcgcgcaatctccggtgaaatgaaactatctgcgcggctttctaaactgcagcccgttagcgccagtcgtgctaatcaagtaccttaatggacaataccaactacagtcaaaacatcggtcctaataaccccaaatgcgaggggctctcaacaatcgtgcggggcactgccaaaacaaacccagtgaattgtatataacccggcatttccatccaaatgtgtgtcaatttctatacacaagtcattcattcactttcagtcactcttcttctacctgtacacttcctacacaccaattcactcttttcacccgagactccacccacatcgaaacaatgaagttcactggattgaccgtttcaatcatcctttctagcctatgctactccaccgctcttcccgtccttggcaatgtcgagggtaccttttctagcatcgagggtgcggttggtggtgtcacaggctctgctcctaagattgctgcgcccattacctcagccactcacggcctacctggcactctcaagcgtgacgataccgctgccctcggtgggactgtcgagaccatcccaagcctggccaatagcgctgttactgtcgctggcagtgccgttggtaccggtgaaagccttgtctctggtgctgctggtactgccgagaatgcggttgccggctccgctacgaagcgccagctcaacgaccttgttggtagcactttaggaagcgctgttcctgccattatccaagaatccaaagccggtggcctggctcgtgccctcaagcgtgacgataccgccgcacttggcgagaccgtcgagaccatcccaagccttgccaatagcggtattgccatcgctggcagtgccgttggtaccggcgaaagccttgtctctggtgctgccggtaccgcagagaacactgttgggcatacttagtcaactcgatatgcctcatattatgtcgtttcttcccgcatgttggtcatttttcgggatttttcatgattattgatcgatgtttcgtgtacaaagcttcaaggtgtctttggcacttctataactctcaaatgtgttttcttctttgccttattttttccccagaacttaaaaccagtgaaatcgattgagtattaggattttctatgattttctttaggcgttattaggggataaaaataaaaaacaattgacgctttcttcaaaattttcgtttcgcaacagtttttgtctagccgtggtcacccaatacccgaatggggattgtcctgaaaactgacaatctagtcagcgtagttaactgccaagacatcaagaccctccattttccacctttctgtttccccaaaaatcttcagcgctactttacctgttcggaacataagagatgccttacactgacttccatcgaccgcattatgattcgaatccatccaccgtctttgttgactcagatggatcacaggtctatgaatcgccccaccaaggtctactttcccaaatcatctcacgaaacgattcggcagctctgaagtcgtataacgattgtcctcatacctatgtgttctggaaaaattacgaattcgatgaaagcaatccgttacacattgccatctacaacgacaatttcgatattctgcgtgagctcgtacagatctagtccttggatacaagcttgacacagcccttgcaagactacatcaaaagccatcatgtctctcctgttgtagaggcttgtgcaattggtaaccaagagatggtgctctggttgatgaaccataatccctcgtcagggacattggaagatcgggattcagaaggtcacacagcgcttttcagagcagccgagggcctgaaagaagtgggcactatgatgatgcaagcacaagatgaaggaaatgaagcgcttccaagaccaaatctcgatcagcgttgggcgcgtatataaccatttattggttggcttctgaacatgaactgccctatggagatggaagacgaaacgaatgaggaaaatgacaaacaactactaaaggacgaatgcgcctacactaatgttctacctggaactgtactcggtgaagctgtctcctacgcaagctacaatctagtctcacgtcttatttccaaaggagcagatcctcatgcattccagagatggcatggcggcaatagctttgctatagagaaagcggaaaaaacaacaccattacacattgctgcattgtatggaaatgccgaagccatcaaagctttgtttgagcatcgattacctggaaaaatacaaatagggtgtctatcgtcgatgatgagggacgaatcccgctacattgggccgtggcaggaactcacgtggatacaatcgactcttataagatcacgtcgcggatggtagctagtgtcaagttactccttgattccaacccggatacttttcacgctcgaaacaagcttggcgctacagtcttccattacgcagccaaaaacaacacaggtaatggggcaaatattgaggccataagcatacttctggaagctgctcgggattgttcagatatgctcaactcgcgaaataattctggggtcagttctcttggagagctaatcgattctcaccaactcattcccagtggtctgacacacatggaagggattaccaggcttctactgaaacacggagctgatgcgcggcgatgtgacgaggctggacgaaatattctgcaaaaattatgcagccttgcttggctggagccaatcagctcgacctttatagaccaattactccagcaacttggtgtcaacgagaaggatgactgtggctgtacagctcttcactatctcgtaaagaacttcgatcaagccgatgctatccgacactttttgagtcacggtacagatgtgaatgcagttgacaaggaagggagtacccccctgcacgaagtgatgaagggtacaatggttcggaaacgggatgaccctactagtcttgagcaacttcctatgcgcctcaagaatgcacaggataagatcattcaaatgctattgacttccgggcatctgaaggaattgtcaacggaaatggagaaacaccgagacaagtacagaagagggttttagaagaacgcgctcaccgattggcggcgcagaaagtcgcctgcggaaggggtcgaggaagagcagttcggtagataggatcgtgtttagtgcaataggctaccagtatgttctcattcacatcagtagtatcaaaattaaatgttccaacacccactttgatgcttgacctacaacgttaatcacaatctaggcgtactaatgtcatcgtttctatctgtgacaggaaccaagcattctttccgatcttccattacctacctcggaataggggtatgagtaatattccgcaatgtcctctggaatactctaggacatacaaacgtagaaatgaaagggttgacgctggaggtgtcatgctgtgtaaacctccatggctgtgcttgccaatcttactattcaattctgtcaagtctgtctctttttcttcttccctttcctcaatatcgcacccttggctttgacatgatgctttcacaatcttcattccctgacatgcctgtacaacccatcattatgaacacacctgattcaatgcaatccacgaccctcatatcactccctggaagaagaagcgaactcgacctgttcgcaaagccaagagttggatcgcggtacaaacgccaagaagtcaatcattctcgacgagttgggcgacgcattgattgaccaattctatatcgccagtctaggggatcgtttggagacacccaatgtatccgttgtcgagcatttgcgcaccagccttcatacagcaccgatttccgatgtcagctcagccagcagcagccacgccttgactgtcgtcgaaagccacgtcgaaattacacctgcaacaagtctagacgaggatgatacgtccctgggatcgcgctttccgcatcctctgccgtgatcgacctttctgaacaaaacggaacagccccccgccaacaagaacgatactgggtaaacgactgcattgggatagggctagcgtggtgcattttattaaggtaagctgctgacttggttaactagttaactagctgctctccaacttttgctcaggcaagcccttaaacttatgtaatactcaggcgcgtgatcagttttagttactcagtgagcaaaaagcggctaggggtaaacaggtcagcactaaagcggaaagggaaagccatgtcgcgcggcctcaaatccggtgtgtacaacatatgttttggatcgatgtcaggtccacctgcatgccttgatcacctacgcatatactagtagtacatagacacacaggtcactgagtcccgccatatatccgatcaaataaatatcacatatattgaatggctgctagtgacatcttaatgcatcttaataaaaatcttgactctccagggctagattgcatccatggattgattacagtcagcaatgatttggaataatgttatgtactgcataaatgtactgcttttgaaccaatcaggtgactcacgaacataaatcaggagacaacccaatcaacaatcggctcggacgacttcctattccgtcggctccttggataccccgtggccagcccagggccaattggtaagaaattgaaccaaccgaggtcaattcattatcaggagaatacaagaagaaagtcatgttcgcgtgttcgcaaatgtctactctatcacattctgccaagtctctccggtcaactttatcaacgacgtcatcccatttatccccgcggacactccagagacacttccctgttaccttccctattttccgtcaaatagcaaccatgtcgtctgctacatcgttcttcgactttgagcctcttgatagtacgtacaattcacgtggtgtaactgccaatattcttccctcatcataccccaaatataagctgcgaagaacctaatcgctaaccaaaccccgcatacgaacagaaaagggcgcaccctttcctctttcctccctgaatggcaaggtcgtgctagttgtcaacacagcctcgaaatgcggattcacgccccagtttgaaggcttggagaaactttaccaggacctgaaggcccagtaccccgatgacttcaccgtcctcggattcccgtgcaaccagttcggcagccaggatcccggctcggacgatgagatccagtctttctgtcagctcaactacggcgttaccttccccgtgcttggaaaactggacgtgaacggcgccaacgctgcacccgtgtggactttcctgaaggagcagcagcctgggatcatgggcatgaagcgcgtcaagtggaactttgagaagttccttgtctccgccgatggaaaggttgtgcaccgctgggcttcccttaccaagcccgagggacttcaagatacaattgttaaggagattgagaaggcaaaaaaggagggcactcttgcttcgttgaagaagagtgaggctggtgctgagcaggctaagctgtcgtaaggctgtgcttgaggtgttattttctgaattattgtggtgataccttcatctgtttcattgtatctatattctggtgcttctgcttgtgacatactccttttcggtttacgatttcggtctccgatggaaatcaaaccgagcagtaatagtaattcatatcccagtttcaaagctcttggacacctgttttgtaaaattcaccagatcagttcattggatctatatccaattctccttaacatgaggcccgacttggtggtatgcccgatggcccatgatgccctaaattaagcagaggaaccacccttgggaatcagatttcgtagcgacagatcgtagaccacatcctcgaccttcttgacctgtattgccacacaaattagaaatttaaacggcgaaatagacgctgtcatgttttgaacgtacgctgtacttgataccgtcgctgcgcttgcgcaagatatcgttcttcaagtttaggagctggaacccagcgaaaacttccttgacgaagatgccaatctgcatgggacgggtgtaatcacccagagtgactgagttgacagccaagcgagcctggaacaaattagctgtgaacagacagaaaagctctgagatttgggaaacgaaccagttcctcaaccatggcaatcagtgccagtaggtaatcctcaatcgtcaggtggaaggcatcctgctcctttaagttgacaggaactgatcaaagaaatgctagttagtattattgtaattaatgtatacatacagcacccgtggtgctcatcatagaaagagataaacaaaacgtactgtccaggaatttgcccacatcatcgatagtcatgaaagatgttgagctaggtcccttgtgctcttgcagtcctcccagccatgcgcaaagctcaatagaggcgacctgatagattggatcagcatcagtcttccgacattgaatttcagaacacaaaccaggttttgcagctcacgggtccatagcccgttgtacttgtagaagggatgttgatctgccacggccttcagacgagcaatctcttccttttgggcaaggatttccttagtgacatcgtcaagcacgggcttcactattgtagaagtcagcaagacggttcacgaagaatagaggattagtgtggaattctgcctatgggaaaagtgtgggaatttgaacgttgtacggtgaagaaaagagaagcagttgatccaaaggatgataccccaatcctctcatcagaccacagatagataatggatacttacactgatcagcgggcgtagaatgggcccgtgacaggatagcctgtgtggaacgccctgtagcattcaatatcagtcctcatgttcagcttcaatcccgtgggtgccgtccggacaggggcaggcatctggaaagtcacgcattgtagagcatacctcttctggcgagtgtgcggacaatctcatttagttcctatccaatattgttagctacctgtcggtgttcctagctcaagggtcttgttccggtgtaggcttggcgcgcgaagaattcaccgaagtcaggacgcgctttggtacttacatcccggacagtgctctcctcgtcgatcttcgcctggagattctcgaaaatgcgttgatcaatcattttgtcacttggttgtgattgtagatagatatttgaaaaagttgaaggaaggtgtggtgttagaagtgcgctacgtcaaaatccacgttgaaaaagaggatagcgtgcacaaaacaacgcaattatttgcttacatcgaaaatgatatgatgagatttgatattgcttttttaaatatattttactgtcggaggacacttcctccagagtaaagtgatctgaggcacttttcttttaccatgatttacgacgcagcctacagctaccacccacgaaacgataataaagctttggaggattttcagcttcttgttagagatttggatcccacaaagaatgaggcttgcctgtgacttgtgtctacccccgatcaaaacgattgcaaaagagactcctccgcagaaacaaaaaagaacgccagaaccatgaccatatttgcatattttattgttgccagatcaagtctagtgttcgtcgtaaatgtcgtaaggaagcgatacatacactggccggtgccagggtaatcacgcagcgatggaggcaatgcttagtatcggtatctggtcgaataatctgcgaaaagtcggttgttagtgaaaggtgtttctattctaggatggatattgaatgtacctttggggctgaccaccagaccacggcccttcttggcgcccttgtatatcgtctcgatgatgtcgatcaactcctgcttgtcctccagcacccagttcaacttgttgttatttcctgtgccgaaatcgcacatcatgtgcttgttgcggtaaaagaacatgatcgtcatccggtcataaagctcgtacatttggttgaagtccgagacttggtcaaggtcgcataggtaaatgacagcgaagtctggggtaggctggttagctgctgttcggtttactgttggggtatctcggtcactcactctttacccgctcggcgattttgtagaggagctcatcttggcggatacctgggagaatgggttagccagggacggtggcaatatacgtagatagcactcacagtcgggatcatgatctcgcccgaatcggatcaccaccaggcgttcttcctcagagagtatagcctggtccacatgccaggctgtttgcaggtgagggaggacaattgaacccataacgatggctggttttgtgtcgataagagttcgcgcgatgggagaaatgaaaggcttatcgattgggccccgcgatcgaagctgttgtgtcatgtgaccactttggctgttctggacaatgttgtataactggggtgttgcctagactgttctgtttatttctcagtgcgctatgttagaaatatcacggtgattattctaaggttaggctgtgtatgacctcatccaggcgcctcacctaggcatcttgggctaagtactacactgtaggacgcattctatgaactacaacatatatcacagctggagatatacaaggtaaccccttgtctagactgtttagtctgttgtgcagttggtgtagatgtgcatgggtctaatccaagcgcctcggtatccgattaggcaagtacagtgtaggacgccttctaccgatgacagctaacagttagcgtctattcaaccaagagaaaaacaagagcatcgcagtttgagatatttcaataccccagggtctactccgtagtaaccgatcaatctaaaagtcaaagaagctaatgatgcggaaggcagctggccgagaaagtctcctaggttgattctttttggttgtattttctgatactactttaggagacaaattttacaagacaagagcccaatctatgacttcttctccaagtgcccggactagccgagcagttgatgaaaaagagttcgcgtcgatcgggggtagtgtaagcccaatgacactgtgcaacgaggcatgcgcaagcacaggggccaagtcgcgggatccaaaaataggaataatcaaagtgtttcctggacggaaactttcagagattaaactgaaaagaacagatactacacttgatctaagccaataggcaaagagagctgaagaagaaagaaaagaagaggaacatctgggggcagggacaccttcttatacacaaatcgatgtgggtctaccaccagcgaaattaagcgatccaatcggggataatgatcccgagactccggggatgtacctgctcaggctaagcgatagttatgctgactcacccagctgactcattgatccttgccctaccctatatcccaattgagcctagcgcaacacacctctggccgtgaatttttgctaaccaacattggctccaccgcgaaatttaggaagttgtcttgaccactctctcgccggcgcaggatattcacctctttgcgacctttcccaattccccaaaattcatctccccccaatccattaacaatggctcccgctgctgtacgttgaagtccaaatcgctttgctgttccccccaccggagtctctgcgggctcgtcttcgacaacactgtgaaactcggtattgaaaaatctatcgagtctcccatgttgtcgcaaccgaatctgcgagactaccaccggggatcgacattatggagcagtaggctaatttgattccatgtggtataggctcgtggtcgcaaggcccagaaggttacccagaagttcgttatcaacgcttcccagcctgctagcgacaagatcttcgatgtctctgccttcgagaagttcctccacgaccgcatcaaggtcgagggccgcgtcggcaacctcggtgaaaacgtcgtgatctcccagattggcgagggcagaatcgaggttgttgcccacatccccttctccggccgctacctgaagtacctgtgagtttatctatttcccgggatgcctcccgataggttggaatataattttgctgaccatttccttttcttcaattcagcaccaagaagtacctgaagaagcagcagctccgtgactggctccgtgtcgtctccacctccaagggtgtctacgagctccgcttctacaacgtcgtcaacgacgaggctgaggatgatgaggaataagcgtgtcgctcctgtcatgtattgtttctttatcccgttcatcgatcggttctagtctgtgtgtcgcgcttggaacgtctgtatggattgaaagcgagagccatgggggggataagattggtctatgaggccacgaataaaactaaaaaagtttataccctcattctcttcctaacataacgcgcatgatcatgtagattgtccttgtggtatcttatacaagacagtaaaaaataaaaaaccaacaaaatacgtgaattgaggacgagaaagagaaatacatatccaagatcacctgctgggctttctcttctgaaccgttgtccatgaagatgtcaaggctgatccttggccatccggacagaccaacttgcccccctcgattttctgtcccttcttcttcagctctttccatttctcgcccaccttcactctcacgagatcgcccgtagcaactgaatcttcctttgagtcgtgcccattgtctccgacctgaatgtcgcggccaaggtgcctttgaacaagggccttgagacttatccgaatggggagacccttggggtgggggtacaagaggacggtgtcaatcaccgtagggtgaatgatacggcaagcgttgaggtcgttgtcgattgcatgaccgataagaggtgtctcgggctggaggagcttcagaagtagattgcgcgcctctgcgggtgactgaacaagttgcaagggtgggtggattttatttttctcgtctcctaaggatgaatgtatgttggacatcggagtaccatatggacttgcggaagcatagtgttgtggtgtgacaccggaaaagcgtgtgttgagatctaatacttcgcccataggccgaaccagcacatcaagaagatcatcgcctttaggccagctgactgcagtgagacgaatcagttcgagacctaatgtcgtgtagcccatctcgcaatcaatagagaccggctcaagtggtcctttttccggctgaggtggggttgtctgaaattggaggacggatgcaagtcgcttggtctccgagactttgaacacatgtgttttggctctggtacacccggtagacgttcccagtgcttcgctgcagcagggaaagtagggctgggagggaccggtgacatggtctgttttcttgcgctgagggtaaacaggccgtcctggatgatagtcacagtagccaccgctggccagggtaccatcttcacgacgacccggaaatacctgaaatcgttgaccgcatctatcacatttctcccagcccttggactcatcaacgcctctcttggcagtttctatatctgcatccgtgggctgctttgtgacatatccgtgttcttcaagaccagtgaggggtgtgactagctgggatacaactgcaatttcttctgcgggggtgaggcctgtgttgatgggtctgggaatcgctcgcggcttttgaacggggtttatcttatagtatcgcgcgttcagatgggacatcacctctttggcccattcatcgatacccatctttgtaactctcacgattcgaagtttgacaacattgccgtaaacgcttggactgtccctcgcaaatttctcttcctcatcaagggccattgtgatgagttcgtcgggggttaggacaaaacatctattcgagctatgcttgtcttttcgtagcttctcattgagagcagtcatggcagagtgcaacttctggagaatggcagtccgactgccatgagttgccggtgcatgggcaagcatgcgaggattcaaagattcttttggggctttgcgagggggaagttcagatgaagatccagcagatgaggtattagtgcgcttcacaggctcgttccccaaaggctttggtgtgccatggtttgaggtaggctgggcggtttcttgagctcctggggtttcttgtgtattttgattttgctcggaggcgactgatttcgatgaccgccgtcccatttcgagcgatgattctttcaagctgtgagatggaatgagggaccccagcaactgtgagttttccactttggcccgtttagaaggagggccatcgtcacctgacactggaatcttcgaacgccgagcctcggctggggttgggttattatcatgagagaatatgcatttcaaaagagtgcaatccctgcctcgcgggcatggaattgccccaaaaaggccgagcggcgtgaacatgatgaatggtcaccagatgagaagataggttaagatgtagaaatccaggtctcgaatgcaagagctagtaggccgatcacaatttttagaagtacctaacgaatatgtatagctatcgctgcccagcgatccttttgtgtttgttttgtgcactgaatagaccgaaacgaatagctattgcaggtagttaatgggatcgcattattcggcacttgcttagccaaagtgcattatatcaaacatagcaaccgggagatttgaaggtattgagaggtcagattgatatcacttgaggacaacgttggagctgttcagcgaagtggtaagtcaaggatgcaaagaagacaaacactcacgtaatgcctgatatttcaggcagaaacgagtggcatccagttcatctttatttcctgttgactcaaggtttgtctcgatgctagagagtataattctcatttcaattgagcctaaaactcctgcaacaatgagcacacagatctatgttgtacttgaggacttcgccggccatcgaagtcccttatcgccgatagctccaggctgacacggatgcggccttcgggtgaatagacatccggttgttgaataccaggctccttttcttccttttgcccctggaatcagttccattctcaaagacggaatcaaggaatgaaacaatggcaggtacttccaaagccgaccatctctgtgtcttagttcacgggtacgctgtattctccttctcaatgacgtactgacgagccgctaacgcaaatctccccaatagactttggggaaacccttcgcaccttgattacatcgcatccgctctaagagacagatatggcggcgaaaacctctacatcctctgcccaaaaacaaatagcggcaactatacctacgacggaatcgagttgggcggagaacgaatagtgcacgaggtcgaggagactcttgaatctctagccaagaagggacaaaagatcacgaaaatcagtgtggttggatactcgcttggtggtctgctcgcgcgctatgcgatcggcctgctcaatgcacggggttggctggataagctggaacctatgaatttcacgacctttgccacaccacacgttggagtgagagctccactgaaaggatacaaggatcagattttcaatgttttagggccgaggacgatctcggcatctggccgccaaatgtggctggtcgattccttccgggataccgggcggccgcttctctctgttttggctgatcccgagagcatcttcataactggattgaagaagttccggcaccgcagtgtctatgcgaatatcgtcaatgatcgctcagttctcttctatacatctggtctctctaaagtggacccattccgggatctggaagacgtgaatatcaactacgtcaagggttatgaagatgtcattatcgatcctgacatgcatgtgcttccaccggtggaaagaaaccccgaaaccgcagcagcgcgattctggaagaagataaaatcgttgactctttgggtacctctgtcactcttgatcattgttctctcgcctctggcttgtacactcttcctggtaaatgccgggatccagacgtttcgcagttcaaagcgaattcgtatgcatgaaattggcgaaaacggcgagcgctttggaagatacagagtaccggttttggtccaagatgttcagcatgtcgtggagcaggcctttgataacgtcaatgctatacaagaacccgcttacctgtccaacagcgatactgaggtgtctgatgcggcgcctgagaagcccgctagatcgtctgtctcgaagtccgcgcaaagcgatgacactgagtctgcgtcggctagacgttcatcaacgacggaggtttcggtgcattgtcctcagcttgcattgactcccgaacaatttggcatcattgattccctcaacgccgtgggaattcggaaatatcccgtccacatacagaagcaccaccacagccacgcagctatcatcgtccgggttgagaaggatgggttccgagagggtaagattgtgatgaagcattggctagacaatgagttcgcgttgtaattttaattagacatatagccgccctcgagcgttagagcatgcatgtatttatagtctcgacatttcatcaactgattatcgaatattactttatataactatagaatcatcctagcaatattcaaaattatgctcaattcccgaagagacacccggccaattcccttttgccgacttattttacggataacaacaacccaagcaagctcgtcctcgcaatataagtaccaccacagggattgtgatcgagcccagctatactcgcaatcctggtactaccctcttcagcactatcccgtggtcaatatccgtagtgcggcatcagcaaggtacactgtccctattctggggacctaggttggcatattagtgatggtatatcgggttaaagctggaaagttagtacccttataggtagttacctactgctaccctcctggatatatgtacttacttttcagtgaggaattatgttttgtctgtttagttttcagatcattcatttggaaagtttctttatcattgatcgttctggaatccatttcaggcttccggtagtactatgtagggaaaacatctaacccatgttgtaatttatctgcaaaaagaaccgtgccatgaattgcgacacaatgcagaagttcaagagaacaaggaacaaggaatcatatcagaacaggtcggggaaaaaacggaggaacggactcgattgagaccacgaaaccggttgtcgagaaaacgcagtcatgagtgaaagaagatcacatcataccgacttatttgggaggtgcttcgctgatgtcatagtcgagctcggaaacagttattcctttggaagtctttcgatgctcgcgctcgatagcaaacttgacggcatcaaaaacattatcgcatatctttctgggtggatagcgtgggacagcaccatcctggtagactccagtcttaaccagaatggagaaccagtcattttccgtagtctcgttaaattcatttgtgccacggatgtcggattccggagtatcgccaatgaagtacacggtagacggagacttgtcgatgccacacgagtcctttcgccacttttgcaaaagccgggtggcaaatccataggttccgagctgcggcttaccgaaagcagtagtgttgaggtctttgcctgtgatagccgcgtaaacagcctcgagggaagcgcgcagcgctcccatcccaagacgtgaatgttcatgcgatgttgaccaaaccacatcggtgtgcgagaagaagacaggtgggccttcagtgaagatctccgaccgtttattcaaccagccgtctttgctcatgaggcagtccaaaatgatttgctggtcaccagcccagtcgcgactatctgcaaagacgaagatcgcttcgatgcggaccttgtctaaatcgagcagccgggaattttggtgctcctcatccgtcagcgttcggaatggcgtagtatcgtgtctcgtcttaatgatatctccgggtgtgatgacatccttgaatccatatccttcagccacgacccggcatttttcaccctcgccaccaaccaccaggacggtgttgtatcgctctgccatttcgcgcatgggcgtgtggccacagataaactggccagggtcgacttccaggtcgagttgtttgctgaggtccaggcatcgctctttctctgtcttcccgccgccgttggtcaagaaaatataaggactataatgttgccgttagattcaaattccttttccgtcttttctttttttgctcgcaactgtttcccctcgccctgtcctgggtgaggaaccatggaaataacaccagggcaaatacttacactttgactccgtaggggttttcgccgttgatatacttcatagcatcaacggcttcgggaataggctcgccgcccttgatcagaacgccatcgatatcgaaggctagggcgaaatcatcgctagtaaccttaggagggttcgtcataggggtgttgattggagattcctcagatgatacttgatcctgcttggccatatttgagttgaagatattgtcaggagtgaaaatcatcgaatgcttaaagacgacgttaggcccatggagatcggtcaccctttgagttcctgatctatctgtggccatggaagatgaagggtgtggggcggcgggtacaatgacgctggcgctgccttgtgatgaagcgttataattacttcgcgtcaaatctcttacaaatgggtgccagctattgagctagctattccgatatgtgcgctgggtatgcgcttgaggtgtaggttgcaggatacaagcagatagagttgtatgttactgtatagagtagtggggggggaggccaagggtcattaatatagcccaaggccctaaagaaagaggttttacatcatcgacccttttaccccaaaaaaatggggcgttcaggttcagaccttgttctgcaggtttttctgggctaaaacaaaaccggaaaaaaagtgactatcgatccaaaacggcaggctacgagtcgggtcgatgacgctgatttggtaagaaaagaagcgcaacttcggatttaccaagtgcgcgggttgagggcagtggaggattgacaggtgtcgcaaatcaggaccaatcacgagggtaggatttgacaagatcagcccgcttcaagcctttttgcttgctttacacctggtcgctgctgcatatccttaggaagcgcctcttgcattcttcggatgtatcgcgtattttgaatttgacacaaaggccccgcggctgcacccacaggacatatcaggccattgacgtcatgaaactgggtcccaggaacggaaataaaaaccagcaaattaacacccatggatctacgacttataccgtatgaagttcttagtgaggagtagggcctagactgggtatgttggcgccgccacatgctggccgatactactgtacctcggaccaacatttagcatttgggctaaggaatgcaagccatagccaaaggtcacggtttggataaagatgaaatgtatttctgaacgcacataaaatataggaataagttggcgccaagagcagtccgagtcttactattttgaatgttcggcgcaatgaacactttgatgccctaaactcggtctaatgaactcgtgatatgcgggatacctgccagactgagtcagagcgccaatacatgcatatctgagctaataatgagaaaggaaaccatgggttgtattgtgtctgtcactaagagagagagaagaaggaagatcaaacaaggtggggagcaagtcctattaacctaaaagcagaaacagtctcaacaactaattatagcaccatacggactgcaagctttcgagtctcttcagctgatggaggattcagccgtggtcaagggatgtagggtgcaaccgggagtattctatggcgccatatgcggctgtcaacaacagctccgagtaggtagtctgtgcggttaaggagaggaagggtcacgatcacctatacaagcaagtgttgttgggttaagatgagtccggacctaggttagaagaatgttacgctggaatttaatatggatatttccgtgaggcatatcacaatcgaatcatgagatgcatcggaccggtagttatattatgtaaagtcctcaggccgagatgtcagatccagactcctccgcaaggtcatccataatagcgtcaaggtccatttcatgatcaatatcggcccagtcgtcaaagaatacatcttcctctccatattcgttctcctcccacggaagtgccagtggtttgctcggatggtagaacatgcgatggtagaagggcagacattcgcaagaacacacgtcgtatttgggcatatcaagaggataaggaacggagaccattgacatctccacgtttagttccgcgaacttgcttttccaggtgttgccctcctgacatatctcggtgacgggggggttgaatttggattcattgattgatgggagatgctctatgatttccggtacctcgcaggtaaagcgacgcagctttggaagttttccgtccttcaccatctcgtaaataaccgacgggagccaggccttcacttcatcgtatcttatcgtaagactttcgaggtttggcggtagaatatcatctaatggatccagttctatgcattccctccctgcaagtgtggcgagggttgttgtgagatgcttgaggtggactagttcaccgaagtctgtctcctcatcacctccccagtaaagatcgtaatctatgtattccagggaactgtcgtgtatgagggccgattgaatgtaacaatacggttctccgtcggggtctatcaattcatgtgatctaggtcctctgaaagtaaatcgcttcaaggctgttaggtattccagtgctgtttggaggtcaaatggatttataacgcagttcagaagagtcagttcctctaggggcgatgtagatgatgctggaggtgcaaggtcggcttgggacaatcggaaagtagcgccagtgatacagagctttcgtaaacctggatgacagaaaagtgcttcattgaaaatcggtaaacatctgccgttcatcttaggattgtgctcattatgatcatagtcgcttccgatgtgacctggtaacattagattttttttattcagtagagatagtcaattacaagactcacaaacacgcaaagcgggcagccccgatggggtttgaagagaagcgtgccagaacaaggtttcagccgctcgctcgtaagtaatctcgtgatctggaggactgaacgacgattcttctgaaggcccataccccaactctcgatactctttcacgcttcctgatccagaggcaatctttttcacccattgtaacagcgcgtcatctctggcatgggtactggcccaccgagtagaatcaaagggcctgggattccttctcaaactcaagttctctagattcggcaaagtcacagccatcttgtagaacttgagatgacggtaggaccagacttctgacccagcatcctgcttgtgtcgaatctgacgaatgagtggtgctaactctggacgcttctctatcgtgagagcaagacgagcaccactttcagaattgaacaggcgtacgcatttgtagagctgagggtcaattctggaataaagtgcggggcatgtttgagcaagtcggctcagatgttgggcggattcttcatcttgtaggtattcaatgatgatatcccacagctccagaggaaagacgggtagtaatgtagatctctgggcgaacgttcgttccgttggagtggccattgaggatgaatcaataggactaatgatatattgaattccgtacacacttcggaagatgatgagaaagatgtggagtccacgggtgatgggttttctactcttttttggcgggacccagcttcttatctaagccccgccttctgacctgtacgcttgacgcgttttcgcgtttcctgtcctgttttcttgaaaacagatctgaagatatacaagattagaaatataaaaaggaagctattaatacgaggaagccaagccgatattcaatgctattcttatgcgatacaaacgaaattcaaaaaattcaaaaattcaaagctctccccccttataaaagaacatagtaatatacaacaaatgcaaactctcatgatggcataaattccgggtgacatagccccatcaaagaaaataaatctattcatcaacgcgaagaatcaaatcatcgcccctcctcgacggcgtcaaattccgactgttcggagaaacccgtttcgacacagcgccggccttccttttcggactatcaggataatgcacatctccaggatgcatatctgaaggatacggcagttccccagacggttctcgggacttcggcggcgcgaggccgcgtccacgctccagccataagtcatctgggcagtatggcgcgacgacttcgctgggtggtcgtggactgttgcggatctggacgcgtttgatatcgtttccacgtacgatccgcggcctggatactatctctgagcctggagggagggttgatgatgatagggtggggcaggattgaggcgcctgtcgtcctggtgacaagctgcgattctggggttgagcttgcgtggtcttgatgggagcggcagggagaatgtttgggtttgagcaagagtatgaggtttgtgaaacttgatagggtgtagcgctactgtctgttgacgaggttttgtaagctgggttggcgttggaagggattgctaaagctttcggggacccggatcttcgtttgaaattgtctgttgagaatccctctttgaatgcacgcggattggctggcagtcctgcgagttttggttggatacctggcctagggggcttgttttgcgtcatttctgctgtcgctgccgccgctgcttgttgactttcgtcctcttcaaatagagtctccccactaggtggccgatgactccacttcagcggcttcgggtatagtccagctataggatctgggagtagtcgtgctatgctgtgctgtgacgattgtgtccgaggcgaagtttcccagtccgagtcagagctgatggcaaaccctattcgttcttggtctgtgggctctttgctctggcccaagtggtggaccttggcatattgcggtgagtatcgtggtggttgaacgcttgccattgaatggaaagtacgtggccgctgtgccattgtctcgcggtcactcgttgggctgtatgaagactctaaacccaagccgttcgttgggagccgtggcatgggttttgaaaagtctggaggctcagacatggcgcctccgatctcgaaaatgtgtggtgctgtctgttcccgctgttttcgtcgccatctcttgcagcagaaaaatacagcaacaccgatgatgaaaaaccctgccacgcctgatgctactgacattccaatgatcgccgctggagtgataccatggtcacctttcttattcgtatcttcagaagagtcactggaaatttgtccggtagaggatgttggttcaacttgagaccctgaagatgaagaagcagcatagaatgtgatttcagacgtttgactagtagttgacgtcggtgtcgatgttgatgttgctatagatgtacccatagaggcctcggaggtgtgttcagttgtcgaagtagaaatagttggtgttgtctctctactagtttttgcatcactcgtcttcgtcgtacttgtgtcagaaaataccgtcgcggtaatcgtctggtgtgttttcggaagagcttcagataccgagtcgcatatgtgataagcctttgactttgcgatgactgtctgtgagcatacagacagaacacagctcaaagccgcttcccccaatgtcaagctactggttgtcttggtacgacacagacacttgatattagacggtgacgtgcattcaatgaaggtgtattcggacatgatgaagctatcgacgcaatccttcgcacagtccgggaccatgtcatatagagctgagtttgctgcatcgctggaggcattttcggcggcagagcagagtgtggataagaggaggatcgcgatgagtatcctgtggataggaaggaggagcatgctgtggtagccctatacatgtttatcatgagcgacgatctgtcatgtacatttctcccatcaactgaccttggaaattcctacatgggaacgattacccgtgaaagcttgtacatgcggttaccatagttggtagatgtgtctgcgaattgagtagcatatgtgaaggtagtgaaattccagaaagagggactccaatctagttaaacaccaagtcagagcgcgacatcatcagaggcgcgaggcaaaactttccatgacgcccatcgactgttgcgtccaagtatctgcatttcgacatcattctgaaacacagtgcttgaggctgtgtatgtataggcgctagagtgaaaccgcataagattcgagatggtaagacccgcccacccacatccccacttcaggagacgaatcgttgtaatggtatagcgccctatcaggatggtgggcctagtaggcgtctccgatacgcgccgggccatcgaaagcgcttagactgcagaacgaggggtggatggcgccggactcggtttcagatttctcaaacttggtggacgagtaactggattgttgttttgggcaatccaaccctgtaacgctgtacagggtcagagtacatacagcgttacggcgttgtggttagtttcgcttgagttgtaggccctcgccggacaatatgttatctgaggatttctggaacagattcggaagctcgcggtgacccgagccctttttcctgtcgggttacacgtggctgagattcacaaggctcattatgttaggatcatattttgtttggtctgcctttttaccagttacgatggattactccgtatattgcatgtccgtacttaaccgcctaatctacaggcgctccctacacacagagaactcaggaggtttatagtaaaagcccattcccatgaataatgaaaactagccaacgggcattgatacgaaataacgcaaagtcagaccgtatgagctggtatcattcataacgaaaaagcaaaaaaaaaaacccgcagtatggagcaagacaaaagaaaagaagcaaaataaaagcataaccatgcgaccacacaaaatattagggaattatgaacatcatgccggactcgcgtcggacccgatgccaagtggtggaggctgcattaggctagtctcaaccggacctccacggaatcacgctgacaccgacgcccagaatatcgaatcgcaccgacccctactctcaaagcgcaaggcaaaagcaagggcttatgtgaaattgatcgcagtgcattcgcgttttcaagggacattaatcttggagagcgttggttgcgaggttgtgtgggaggtgggtatctctagtatttgaagataatgtagctataatatggtcagcggctgtcacaagatgctggcgcctcaaataaacacatacatggcgtggataacaccggggatccatcccagaatggtcaataggatgttgatcaggaaatcagcaccacatccgcgctccaggaagacacccagaggaggcaggataatggcaaagatgatcttgcaaatgtcactattggcagtattagtatactgagcataatcctactcacaggcgacagtgcgacctgaacagcgcgacctgggagggctgggagtgagggtaacaggagtgacagggtgacagggtgacagggtgacagggtgaaggctaggacttgagtagaagccacagcccatgacatagagaatggacaacttacgaagcggtgaaaggcattttgggcagatttgatggaggttttgaaatgttaacgggagaaatgggaagggaagtggagggagggaagtcttaaaaggggaggacaaggctgagagcttgggtcaattacatcatgggccgccaccttggtgtggctcgtagaagagaaaaaaaccaccaaaaccaaggaaaaacagactgcaaatgtggcttaggctatgccctgatttggcttttgacttttcttgacattttaattttaacttgtttatcactacttcgtactctgtgcgacctacggagtacaattattacattgtccagggttgccaagatactgatcatctgtgctggcggctgtcaatgtcattccccctaatgttcctcacctatcccgttcattcttttgctcgctgcctaaaagaaacttggcactagggattcacctgcacttcaatttcgaatttgtcgatcgtctgtgttctaagatttgactgtatatgttgtacagtacggggttccttgttacctgcatgtacggagtacatccaacatatgcgcccatgctgcagtttaagtttcataatggtgacgatctctacaaacaccgtcatttctaattttggcgtgaatctttacttggttaggcctgccaagtacttgccggactttgtacggtttgtagtgccaagtccccctagatcgtggttagacaggccagacagctcagccctatgatgggcccttgcccccccacctgccagggcacctggtttatgtggttggcgtttatgacatcctcgaaattaaaaagtggctggggagcattgtcagtgacacagcaacaagataagcattgaggcagtgaagggaccatgggtcacgcgtgataccgagttctaaagaggaaattaccagactgatcaaagtcgggtttacatatcgtttttcagccaacatcaactgcgtctaacaaggagttccattgcggtatgtatgtagatctggcgcaacagcaacaaactccgaccaaagctgttaactagtatgtaccagcctccttacccaatgtcagtggtcaagtccccattggcagcgagtctactccgtagtgtttcgcgagtagctacgtggttctttacttctgcaagagacccgccctgcggaccggggccccctgcggacttagatgttcagggccactgcttttgtggtgtccacagcagcatctgcatgttcttctgaaccccgtggattagtggtctagattccacttcttgctccacacgacaaggacagtcgattctactggtgcattattataaccaaacagcgcatgaatacggagtacatactccgtaactgcctcttcaatattcgcaatttacctaaagcttggaagcatacggagtaattataaggtgaataggggctactgtgtgcttttgggtagtcttttatcgatatcattctggttattccgctatcccttttatagctagaaatatgaaaatttgggtaaaatgaagaaaatatccagatgactctgcaacatatagagtacccagggaatatatatcgatggacggcggaggctcttacttgaatgaggctagcgtgccatattgagttgttcactcacaaccttcgcgctgtatcacaaccttgaacaactcaatctaaagctggtgtcaagtatgttgcgtgatagtatcgtacattgtgcatgatctctcctgagtacggtgaaaacagatgttccgctccgcgactgacccactatcctccgcaatgacttccgcattttcctgattggatcagctttaatcttgatatctcaatgtcaatgagattcaaacagatgagggtagccttcacttccggacgctggcagcttctgggatcatgcaaagcccctaaaagcctcggtcgcgccaatagatggtatgcgacacagaatttggccaaaggtggccggccctttgcgtacacatggctcacaaagacagcagaacagacagtgagcaaaaccaacccccttacacctttggaatccaagctaaatagtccaagaccccagatgatattttatccagtcttccttcagggcctgtgagcccatcagccgcgcccgcttctgtccctctcctcctcgtcaccccaagcttcgcccactggcttgattcttctagtcctttcttgtcgcaatttctcagtcgcctttacggcaactccccagggaacgatactctctatgccgttacagccgtagttgacgcaatcccgaatactacatccgaaagccgcaatttaagtgagtctgaagggctgtcgcttctgatagtagggcaatcaggcgtccaggcaaaggctgcaccaccccgtctcatcagaagctctgccagcgaggaaaccaatctcttgttttcattccaaaccgatgtgattggtcaaaccagcaagggacctgcgcatgagattgggttgcgcctagcaaacactatatttgtcaatgggagggaaaccacaatttttggtacacgttggctttgggataaaacctcaaacagatatgctttggacaattcggtcgatttcacaagctgcatgcttacagccacttcccaggctgtagattctgcattggagttgccactgtacccagtgactggacggcgaagagtcatgactagcatgggaaacattttacggcaactagcaaaatcgatggatctgacatcgacggacacaattcctgcttcgtccgagctcgagaaggagcttccgcgttatatcgcagaacataatatcgttgaccagcgtgtatccgtatgggcacttgtcgagaaacctgacttggaggtggctggttcaggcttatctacccatgatcgcttgatccaatctcttcaccgaggtgggaaattgcaccgtgtcatgagcggtggaggtggatggggaaagaagcagggccttctttcgctagatcctgaagtcagcttctctgggactgccaaccgagacgatcttgtcgcattgactcaagttttggatcctgatatcgcacagttggacacacttccttctattgataaggggattactgtagatgatctatctctactttcacaggttgctactgcaggtgattatattcagttctttgtgtcagtagaaccaactgggtcgcagatcaaagttccgagcaatcatgacttgcaggaagagcctatcagctatcactttggaatggtagctgattctatgaaacttgaaacacaccaaacggatgaggaaaacaatgggatcatttctttgcctcacacctttggcgcattgtccgagaaggcaatcgcctactcgcagcccatcaagggagaaacacggtcggagtcgtgcacgaagctggatattccaggatctcgagttgtcctcgagactgtataaacagcatgatacatgtacaataatgcatacataaccaactgaaaaaacctaccccagctgaatctagtcatacatgtcacatatgctgtagtcattacctgtccggtggatatgccaagacagtacacgtgacccagagaggccagcatgtttgccgtcgacctccaagcctctggactctttccatcctctccgaccgcatccaactgagctcgccgacctcgggtgtttttatttctttttaaaggtctaactatcccacgaaacctcgttgagtcgtctttgatcaaaatggcaactgaactttggtaagtcgtcagctagacctccctccagcccctgggtgctcaacagcttccgatcaacaccctgttatcaagcccgtcatcccccataatttatggatcagccttgctaacatttagattgacagccccgtctatgcggtgagtcttgttaaatgctagatctcgacacccgagcacaaccaagccaatcgcccgtgtctcggccctccgcgtcatccatctgctcacaatgcatccgaatgataactaatctttcttcctttagcccttttttggcgcgctgggctgcacctccgctatcgtcttcacctgcttcggtgccgcatatggaactgctaaggctggtgtcggagtttgctccatggccgtcctccgccccgacctgatcgtcaagagtacgtggatctcaacaagagctctgccgatctggcaatgagatactcctagtctcgcgcaaggatatatggcagcaattcgctaactattctccagacattgtccccattgtcatggcgggtatcattggtatctacggtcttgtcgtatcggtcctggtcgccaacgacttgacccagcagcttcctctctacactggtttcatccagctcggtgctggtctgtctgtcggtctggctggtcttgctgcggggtaagtttcctacacagcgaatcgcctattgttctaagtttgttgctaattgggattacagtttcgctattggtattgttggtgacgcgggtgttcgtggaacggctcaacagcctagactgtatgtcggaatgattctgattctcattttcgctgaagtcttgggtaagtcgtagctattcctcatacctctgtataattgcatctaaccatccctcacaggtctgtacgggttgattgttgctcttctcatgaactcgcgctcgaaagcaacctgctaaacgaaagacctcccgcagcattccgggaatgtaacgtcgaatcgcctcatggtccgcgcgcgattcctggttcattcccggatgtgcattctcaacatttccccgacgcaaaccaatgtgccctcttcggtcggggaagctgacatgataaacttggtgcgggggcaggatcggatgatatcggaaaatgttaacgatttcagcccatttgaaagtgaagattcggtgattgagtggatgtagaaccgggaaatctgttcaagaattcgtctgggactcggtggacaggtgtgggtagatattggattttttttggctttacgttgcatgacaccgcgctggactttgtactttatatgaaattcgctgatcggggacttacgtctccgtcctctcttccattatggtggtttggcaggatcttctgtaaggaatttcttgtttctttcttgtcctctgccctccctgtcgacatatgtttcttctatctcagggttgcttaattcttttgagtgatttgggcttggtagtagtagtgtgcattcagcccttacctaggtacggtgttgtgactcatagaccttggatgtaactacgtatagatcttcttaggcgtcggaatattgtgagtgagtttgtaagatatcatatttactgagataaaacaataccaaatcagccaaagtagtagcgccataacagaagccgagtaattaagatctatttgcttatccgaatgcatgggagagtcaatgcccacatcacacagcagccaaagaccgcaatcacttctgcgcaagttcagcagttcgcagctaaaacaccaagagagaagaagtatttgtgtatttgtggatatttgatcgagtatagggcgagagagaatagataagggagaatggaaaaggaataaaaaaaaatgtatgaaagcgaggatatatgccctgaactctcacaagacttgcctcgacccaaaatgcacagacgcaggcaagatgcaactgatagcaaaaagaacaaaagtaaaccaggaaacttcaagcacaagtctacttgtcgagtttccgtcttagagtacgcgttctcttcatcagcttcttgaacttgtgcttcttcatcttagccttgcgccgtctcatggtgctgatagcatgcatggtgcggttgttgcgcagccgttccatatatgtcatacccgcagcggaatcagagggagcctcgatagagatctcgtcgcgcatatcagatgggtcttccatctctccgctgcgaacgaaaggtcccgtgtgtgcctcataggtcttgcggccgtcggcatgacgagcctcgcgaatagtcaggacggtcgagtaggtttgatactcattgtcgacctgggcatcgatggtctcggcagtctcggcaatctcggcagcggatgtgttcatggcgacgggcgggggaggaggctggaatgggcggagacgacgggtgaattcctccacagacatctttgagtcggggccatcaagcatgcggagttcgccgtcctgttcgctgaagctccgaaactggtcttcagactctgacatgccttgagaaccagtttccatcgactgcacggccgatgaaagagtgaagatgacgtcttccggttcattcttcagcggacgctttgacgagaagatcgcttcgaaggcatcggtgctcgaggtggggggcacagtggtcgtcaccgagattggccggtggatggagaagaacgacgctatatgaacatctagcagcgaacaaaaagaaaagtcagcttctagtcatctatttgcgagacaaaaccatacacggggcttgctggggtttgagtactaaccatgtggctgtcggtgctgtgtcgatggaacacttgggaggttggaaaatgccgtatgttgactagactttgaagatccgtttcgggtagagctgtccttcccccgacggcggttagccttgctcttctcgctagatgagttgactccttttgccggggcagaggtgtccattcgtcgggagccatcgctgggcgggacgggcggtttggaggatgaggaggaataccggcgttggtgcagaggtcgggttgcgccgagcaagctgctggtaagattttgaccggagcgagttataccggaaagcggcatgggagtccatgcnnnnnnnnnnnnnnnnnnnnnnnnnnnnnnnnnnnnnnnnnnnnnnnnnnnnnnnnnnnnnnnnnnnnnnnnnnnnnnnnnnnnnnnnnnnnnnnnnnnnnnnnnnnnnnnnnnnnnnnnnnnnnnnnnnnnnnnnnnnnnnnnnnnnnnnnnnnnaagggggcggggcccccccgcccgcccggcgtaaggatgttgacaacatggttggtagataacccagtcactactgagagggtgaatgagtctgaatcggaggcgaaatcagtcggcccggaactcggggtcactgatcatgcggatgtttatgtaatattgatgcctaaggcgtgacaagttatagaccacgcaattgtggttccacttgatgggggaaaaccccttcttttatacatattgaccgtattgtttcttcgggctatttcaaacggccggatgatttgatagctaaacttaatctctcaaggtacatcaaggctagagtccgaaaagtgaaaaaagtgcccataaaagagcaggatgtcgagttcattcagagataagatatagtaaataaagacccagaatgattgtgataatacagagcagtcgttagtaaacacagctgcaaagacaaacaaatggtatcactatgcattaaaccaaaaaatggaggaaaatggggatggcaacgacacagtcgctaaccgaaacgtgggcattagttggcgaaatcggataggcttttggatgcaacgtgatagacccaatgatgtgagcagagagcagataacaacctctcggtacgcctcgttaaaaaataaatcaagaatgaaaaaaaaaaaagaaaatacggcaatgatcacgaaggagtgaacgaattgtagccgccctggaatgcaaccggaaaataactggtaggctgaagagcttgagaaataggaaatgaagtccaagaaaaaaaaaagaaagagaaaaatcattgtcagacagggtcatggggaatgcctcgggaatttgagggcctctgccttatagtattaaggtatgcagattcttctgaatgatcatgtcctgtactgaatccatagtcgccttgagtaatgttgtatcagttgcgttagtgtaatggatgtagatttcgcggtctgggatgcggttgataccgcggaatcggtctgcaaagtactgtgccgaggaatcatagtcggtgtccgagccggtataatctgggaagtgtttggagatagaggagatggtgagctttcctttgaagagatcaatcttgttgaggaacagaatgattggtttgcgcttgaaccattcgccgttgactaatgattcgaataacatcatggcctcgtgcatttgattctgtaagatgtgattagcggtgctggcgagagaattgggaaaatcatgcttacagcattctggtcttcgactagacattggtcatatccagataaggcgaccatgaacaatagacactggacaccctcgaagcaatgaatccatttcttccgctctgaccgctgtcctccaacatccatcatgcggaagttcatctgcccgagctcaaacaaagtttccgtaatacctgtcgtccgaagtcgagcctgcaacatgtcctgattatcaggaagccagcccggggcgaatatgcgatcgagagatccatagaaactgaatttcatcagtccaagcccatgtaatatatcaccaactcaacttactagtgcaagttgtcatggagagcaaattcatgccctcgtgcaacagcgttctgcacaccttcatccttccacatggccctcatcgcatcgcgaacctcgagattggagaaggcttcgttggatcctacatctgggtccgtattgtctaataggtcggcaaatggctttcaaccctcgttagctgatgtcgggctcttgagaaaaaggctggttagtaccttggtcttttcctcgttctcaaaatcaatatcctcggcattcatgatatccaacaagaccttgaacgcaatgacgatgttcgagtagattacggcacgggtttgatgacgctcttcctcggggaagccccggctgtgaatgattcgcatctgcttgattatggtggacttgccggactctcccgctcctgaatattctattagtaactcgatcctgaagcaatccgacaatcagcgaccgagaatcacccacctaatagcagaatcttgatggtccggtccagcgtcttcttgtcattcttgatggtccggtcaatgcgcgcattgcgctggaaagcatccttatcaacctcctcgggctttgaaaccaagcaacccatggtttatgtccggtaacggcaaactacctagcgcgatggtggttagcaacggtttattacaagctgaactagtttgacaaggcactcgacggatcaacgcgttttcaatccgagtcagggatgcgattggattgcgccacacgggagtccggtcgaagctcagagacaaaagactcgactagactccaccagactcgacaggtgactagactctctccgcgcaaggtgatagatgtgcataccttgaaaaagaacaaaatcctcctctctattatgcctaagtccaactccgacccaacgtcgaatgactggcgtgcaacgtgataggcagaagcttgaaaggttcgatgggtgcttccgttattccccacacgtatcgaccacgttccgttgcgaattgagcggtcgtgttttcaattggactaggttatcctccgagacaggcgccaaacgtgagcgacacaacgtcagcctgccgaaggccgaataggaagcttgaaggggaaggacgttggcggtgacgggggggggagccgagatcgcgttccaaagttcaaaatatggacatttcccgagttctgaggacaaaaggacgtttcggaggctgagagccgagttctccggaggggagagggggcgagaaatggaagaaatggaatggcgcattcaggtcgtacgtctctcccgtcccacgagcgagtccacaagcggggaggaggtgatcacctgtcagatattctggtattttgtatactgatttcggtatctttgacttgagcttttgtcaatgttcggtatttggagtatttggagtattctcaggtattttcgcgtgttcttcaggaaaatacgtatgtcctcgttatcatttccgttaatttcttttcccttgacgatctcctctttgtattggaaatactacaaaggctttacttttacggactccatccaaatcttcactcccagggggccgctaaaccgatccactatggggtgggcgcttgaccccctgtctgcagcatctacgagttgcggacctatcaattgtaaacagatactgcagctcggttgttctattgttcgattgccttttaccgacactatatcttttacagtctgacaggagacatagagggatgaggaaaacttagggatccatcaaatggaactattggaaccgcttcgggtactccgtccacacccacacgttgatccaatcagcagaaattctgtgacaatcgaattgtttttcaattttccttattttgtcttacttttgcaaatctccttccttaaagaaaagaagaaatcggcatggaaatatgtacaacacccgatgtacgcaatatcaaaggaataatgtacgaagtacagagtactccgtacgaaatggtgcattcgccaagccaattcggaatgcaaagctccagcgatcgacacgaagctgctgaaacccgcatggatgtgccactggccaatgcaagggccatcctgaaacgttggcggattcctgtcccgggtttaacactaagggtatgcttggatcactatgggcatttgctcttcttcttctttacttccaaccgagatgttgagttcgtctactggagcttatgaaattcggattccccaagagaaccgtatgaatacatctacgaccacagttctaccgaggttctgacggaaataaggctagcaccggagtacagcgcttaaggggttccgcacaaaccaatcagagagtagagttcaaacccaacattcgacattctgaagggctccatcaagagaaacagatgttcggtacgaagtattccgtgggtggaccgtgactatcgtttctcttcgcccccaagcacacaatttctgccgtgcttgagccgcagatgttgtatagagtatcttgaatttgactgtgacgaggattgcgagatgaccaactgtgctcaacgattcatttctgcatatatgcaaccccgcaatactcagtactccaggcccgtcaagaggggggacaaagactgattgccccgttctaccggcagttggcagtccccattttcaagatatgattctcattaattgcgggcaatatcaccacaccatcgtgctagtaaggcaggggtgatccttctgggactggtcaaattcacctgtggggatcgattaggctcctaaaagccatgtcacatttagccggaatcctaagaatagaccatacaacgttcaagtttgtatgggatgatccggatcaacctggaccaacctagttcgcatcaccgaacaaaaattctccttgactcgacatggtataggaatcgccatgccggagatgcgatcgagattatactttaggagtatgaaatatgtactccgtacataagtacggagtacccggagggtcgatctaggttgccccagctgcttactagttgctactactagctgcttactgatgtaaaagagcagcccacgggtctcatgctcaaagcctgagattgggttattccccacatgcaactttcgaggaatttcccacgtgtggcatgtctttttctctggcaggtttttatattatccaatcccctggcattctatttctgttgtatgcataatgggtgttccgctggtatcaagaagtttcaaataaaatcgggagctcacaacacaaatacctcacacagtacggagtatattgtatgtatatgtgttccgtactccgtacatacctaacagatccctcttaagaaacgggtacctaccatcttgctagggattttgacactaaggcggtgtgaagggcggtaattcgaagcctggcaaatggtcgaattagaaatcggaatccccttaattaattcccttcccggagatagtcaatagggtttagaactttaggttcgtcaaagctagacgccacacataaataaatctatctatgaaactatacagtactactccgtacgcatgtcaggaactctgtggccggtatcaaggttaacggtaaacctaccaacggccaaactagtactcaggggcgttgaatgactcgagcaatttaaacgttgtcgatcggcatttgactggtccaatctcttggttttcaacgtccgagcgtgagtcgttcgggaatagctccggagctgatatacctagtccagcatagcactcgtttagatagcgagacctcattgggtttctttttcgagtgtaatataactgcttcgcttcgctccgcaatgagaataatttactcctcttctacggagtatatatatattcatccttatctctccgacgcacccgtcctttatataaacgttagctatcgcttcatacaagtctaactagaagacaacgtagaaacttgaccgagtctaattcctaacccagggtagggttttcatcctagaggctaagtcaattattataaacctactcatctagttattatcggccttagatacgcccttagttttagactacccctcttaaacctctatacatcgggaggactttaagactcacaaaagaaagacataagtatcgctcatcgtggcaaacggcccaagtcattcaatattggcttctgattttccgttccttgcagttcaacttgaacgggtcttcacctggcctcggtgatttcgtcattttaaactgtattgctgtgtgaactcaaaactgatagacaatgtacggagatcagactgctaatatcggtgcttccatctttcgttaggaggggatcagcgccatcgaaatctcgcagaagtttctcgataagttcagcacggccacggccacggcccactagcatggagaatgttaccgatagttgcagggacagctagaaaccccgggtttggatctctaagaaggggatccttattcaaaaggtgatgaaatttgccgtctggtagttatgtcatctgatgaactcacaggctggtagccctgtaaagtgatttagggatacttgacgttcgacaaaggtggagagttctgatatgacggatggacttaagtttcgcaggtccgacaatgtagtttgtacaagtcaaacaaataacagaagagaaaattttgaacttggatggaaaggtattttggacctttgttcgggaacgagaccacgggggaaggaagttataggcttcaagtggagaagagagaagtagtagagtggggcaaagaaagtggggctagccgtcctagtcatgtgacaattcgtgaagaagcgaagatacggcacaactccgtatattgtggtttattttatttttttggttgactagtccccatgctaagagatggggaatactccgtaccgatacttgtctgtcgatccttttctataaggggatgaaattaactgatagcgtggcaggtttccactaaatagaattcttgcacggagtactagattctccgtagttagtagttactccgtaactagttaatcaattaaataataatgattagcaaattttcacttcgataggaatcccgaggtccactggtactcttcgccagtgcccagagtgcagattgaacaacagatgtgaagcctttgtggatgcctcggagacaaattgttggtgacgtcactgaataattacagaaagagaccacatctcacagaaccgagtcttatattctctatactcttcaggtctacaatggaccacataaagaaaagagcgctagtggttgtcttccccatgttcaacatccttgatgtgagcggtccagtttcagtactcttcaacaccacggacttctccgtgagctatgccgcgaaggatgagctcacaacgtctcaagagaacacaacaattaagagagacatatccctcgctgaagccaaacttcatctgtccgactatgacatattgatcgtccctggttcacgaccaaacaatatcctaccgcttgtggaaaccgatcaggggccgttatcggaacttgtcgaatttatcacctgttttgcatccgacatggaccaagatagcatgcggcaacgtactattctggccgtctgcatgggatcctacttcctagcctttgcaggtgtccttgatggcctcacggcaaccactcaccgtcttgctgtccccgggctccgagacgtaacccaacgttatgtggatcgaacccctgctgcgaaagggactcgagtcgtccccgaagatccctcggatctggtttcctacctggatgctggccagaatcaggccggagtcagaatcatcacgacgggcgctatggccaatggcatcgatgccacattgcattttgttggcctttgttcgggtcggtcacttgcgattgaggtggcggagctcattggatatcggtggaaggagatctaggtgtgaagctagtggtacaaggaaagccatggggcagggttgtcttggcagacctggctgttttcatacattcgcaagcagtgcggaatacgaaatcaccgcatagagtctaaggtctggtgttatatgcctgtttgacgcaaacaaccacgagcgcttctcttgattgcacgatttgcccttatcaatatgtcatactcaaagaccatgccctcaatttgcccatttgtctacctggcctttttgtttgttttctaaaagcgaaagtccataatcggagttaagcatatgctagcaattgtaatattcaatgtcacccatatgcctgtagtataatgcggaccttcatcagacttaaacgtaacacgaatgatgggacgcccctaaggcctccaccaatcagataggttgtagatgcgactccacgcttcgagtgggaagtacatattgcttggaatgtaatcacaccggaaatacagaactgcaggccttgagtcaggttaaaatgctttaatctattgcccctctccccaaagagaagactatatcccagtaggtgttccaatttctagaaccttgacaagttgctataattcgaggaacacgcggtaaagctatagtacagacagagtaagctccccacatttacccctcacgttgactgcagctatcaagaggtctctcaaaatttcccgttacctcttgtttgcaatggcaaataccatattatcaatagctgaccttgaggaggcggcttccaactctctacccgtctctgcgagaggtatttattggttccccttgttgttatctccgatatctatctttaacacagataaacagacttcttcaactccggtgcaacgaacgaagtcacactccacgaaaattatgctgcgtataggaagtaccgtctcttaccaagagttctgagaaatgtgtcacttgtcgacactggaatctccctctttgaccgagatatcacatttccgctttgtgtctcacccaccggaatccaggctatggctcacccagaaggagagctggccacaagccgagcctgtgccaaaatgggcgtcaacatgggtatctcctcttatgccaatcactcggttgaagagatcaccgccgctggaaaagaagtagggtcaattcatcatgtgatgcagctttacgcgatgaacgacaaagccaaacaagaacgaatcatccgtcgggctgaggctgcggggtgcaaggctttatttctgacagcggatagtcccgtactcggggtgcgctggaatgaatggcggaatggatttatgcctccagttggcttagggtatccgatgtatgaaagaacatctgccgagattcagcagcaatctcacgatgatgggtttagctcgacaaactcggattcccattcctgggccacggagataccgtggttgcgcagcgtcacgaagatggagatttggattaagggcattctcactccggaagatgtcgagactgctattgaatatggctgcgagggtatcataattagcaaccatggcggtcgtcagttggatgagacaccggccacaattgatgcgcttcctgcctgtgctaaagttgcacgaggacggatcaaaatccatattgatggtggaattcgatctggggtggacattttcaaagccttggctcttggtgctgaatgctgctgggttggtcgtcctgcactttggggacttgcggtaagtgctccttgtttattcaagaatcctgataggcggttatacttacttttttggtagtataacggtcaacagggagtcgagctgatgctcaggatcctgttcgatgacttcaagcgatgcatgcagctcacaggctatagatcgatatctgagatcagccccgcaagtttagcagttgtcaatgcatatgggcctttgtctagactgtgatcactgttgtgattacatctggtgcccaaagccttatttccatacatgcttagctgttgccactttttgatcccggtataataataaggttctaagcaaacggagccacctgcccagaattgggggccacttcgtggaccttgcccggttcctagtcccagaggtgaggcttgtagttgtcatggcttgcatatatttaatctgcatctccgtataaagcctaggcctaaaacaccactattagaaaaatactgttgatagaacttgactatgactctttggagggggcaaaggtgtgaaagtaaatgacgttcaccacctgattttcaaccacctgccttacaactagcatttcaaccaccaacgttgcaacctgctcttcggttcgtaaagttggtagttgaaatgcaggttgtaaaaaaggtggctgagacgtaggttgaccaggggcaatcgtgagtctagaaatcaattgtcgattgcccgataacccttaactctatcgaggaattgatctgcgctgattgataataatagcccattcccagggcttaggtgtggcttaacttattgtaagttgaaagtgtatcgtcccgaggtcatctgcgggggcaaaccgctgagtcatcattggtctcgggacagctggagccgctaagctagccccgagtgtgacgccattatcccgatcccagcttctcctcattgcctaaggagtagtaatatgcaccgagactcattcagtccatgatcctcgggtaagtatcatcttctcgaaacagtttatcatttttaagcaaggctccatcatcattcaggtatgtcttcatgtccggcagctatgaggaggtgctaatagctcctctgggaccatagcaaacgtgactccaacgacctcgttgcccaatatgcagtccgagaagggtccgcttctggatgtgaacgaagtctacgactccgaagacaatgactttgtttccagccacaccctcgacaataagctacaaagaactcacccctgctgggcgagggccctgagaaaagggctctgcgtctttgtgatcaccggtcttattacctactatctaggcttatcgcatggtatgagccccctctcgctattataatgcgtcactaacatgatcgtccttatgactaggctctccgtctactgagaagaatccgtccccacactcggaagccccccagctttgccagtcacaagaatgcattcatgctgcttccgaaatcctctacaatttggatgccaactacgagaacatagacccctgcactgattttgaccaatatgtctgcggtggatggagagaacaccatgacatgcggcccgatcagggatcgatatttgcgggcacaatcatggaagagaatgcccagactaaacttcgccatatcttggagcgcacagaaccgccgcagtcttctgatgctgataatttcaagaaactcaaagctgcatacgatgcttgcttggacgagggtacagtcatcaaacgtggcagcaagcctttgactaatattctggatgaactgaaaactatctatcccgcaaaggcagagggtcttgtgaaaggatcacatgatcaactcaccagcgctttgttatatctggctaatgctggtgtcgaggctctggcttcttccggtgtcactgtaagtctatgcgacctatactttatgggcgccactaatgacccctttagcccgatgatcgagaccctgataatgttgttatcatgatctcaccgcctcgtgaaatcggacttccggcaagagagtactataataacacaaagaccgtggctgattacacgaccgttttgaagcaagttgttcggggacttgctggagatggattcgataaaattgcggaggatgttgtagcctttgaaaagaagctcgcggatgtgaccccggacacccaaacccaggaagatgtcaccaaatactacaacccccttagtatcaaggaaacggaggcgctggtacctgagatttcttttactgatattatttcatctttggcgccccgtgactacaaaactgatcgcctaattgttggatcgccttcctatatgaaggcgttgtccgttctcttgaaaaacacacccagagagactgttctgctcttcttgcagtggaagctcatccaagcctttgcggatgttatcgaggatgcctccattgaacctcttcggcgattcgagaatgaactcgctggcaaagagcctcaggctaaggaggagcgatggcgtaaatgccttgggcgtctggatgaagggcttgaatggagtctcagccgtttctatgtgcttgatgcgttctctgaggactcgaaaaagcttggcgatcagatcgtttccgatatcaaggagcgatttatcttcacactggaccagactagctggatgtccccagatgtgcgaagattgggcattgagaaggttggaaacatcatccagaagatcggatttcctacaaagagtcccaatgttttagaccctgaggatgtgaataaattctatcgggagctggaattgtccaaggacacattctttgagaatgaggtggctgtggcgaagtttcaacttcgcggcgaatggtctaagctcggaaagcccaccaaccgcgacgaatgggatatgagtgcaccgactgttaacgcttattacaacccgccaggtaatgagatcgttttccctgccggcattatgcagccgccagcgttctatggaccttcggctccgctgtatctggcatatggtgcatttggtgctgtgagcggccacgaactttcacatggtatgttcagttgtctgcaaacctactgccattttcccactgaccaacgtgatatagctttcgattctaccggtcgacactacgacgagagtggaaattacaccaactggtgggacgacaagacagttgaagcatttgaagagcgtgctcaatgctttgtcgaccagtattccaagtttacagtcattggtcccgagggcaaggtcctccacgtgaatggacgactgacactgggcgagaacatcgccgacgctggaggattggcagcatcataccatgcgtggaagaagcacgatgaggcaaagcctgatctccacctcccgggattggatgcatttaccaaagagcagctgttctttatatcttatggcaattggtggtgtggaaagactactcaggaggcggctgagcgggcggtctataacgacccccatgcgcccaaatcggcacgaattatcgtgagtttcgtcgatgcattcctttctttgtgttctatcactgaccgctgtcacaggaaactatggccaactctagggagttcaagaatgcctttagttgcccagacaggaagccagcttgcaagctctggtagttttgagtagtgcacttctgtcaatggcattcacttttatgagtttttaatcaattcgaggattctgacttcgtcacgactgaagtatctagctgcgcatcccatttcatccttgcccggtacttgaatggatattgatgtagctcgctcgtttttctcaacctttcaattttttaccgctgggccggaagcgttgcaagctaaaattttaaacttttagcgagaccgaagtacttgacatatattactcatcatttaaatcagcaaagcaactcgttggcaccaacgatgtctgatacatcactgacccaatatatggatgctaacgatgtcggagaggaggacctcctgctcggccaagatgccgaagcccttaagctgctgatctccacagcgatcgctgcccgaaacaagtgggaataggcggaccaggcagaggaaaagaggttatgtagttagttacagagcacggaatgaagagtcggccagtggatttagttacctagatcagcaaggacctagccccctcacttcttcagatttagatgattctaggtcccgtttttttcccaatgtcgacatgtcaaatcttatggaccagtgtcagtttgatcgacagctgacatgtgatgtctcacccgtatgcttggaggccagatcgacattgagcactccgtatattgtgctccgtacagagtcgacgagataaaggatcatatgaagctaaccagaaatagtgataattacctgacctcctgaaattttaatcatacgatcgtgggacctcagatcctcggtcatgtgagagagtccggcattagcgctagatctattaagtagggcagccaatggtcccagttagggcgttgctgcacggtagttggtttgcaatgagagaggtcacacagcctgcaatcgtatagagacttcgatgtactccgtccgaagtaaaacatctgaattgatcgacccagatccgggatatgtcagacagccggtagctccgtcaatttccagtttcgcgtcactccattacggacgattcaaccaaccagaacccctgcactgccaattttacctacgaagtgcggtactttggaggtggttttcgcttttcaccggccttccggaacgtagtgacctatcagctctggcgtgattcgtagaaagaaatgagggatgaatagtaagatattattcaagtacatgtatataccccgtactccgactcctccggaggaagagtcaggtatgtatagaaaataaagtaagtaaaaggggctggacagttctatggaagaacacgacccagcgttcccacttgtgttcttccgccgcgtcgggtcatctccacaaaaacaagagtcggatttcttccctttttttcctttctaaatttccttcgacctcataagtcatgtattactttgtatgattttgccctgaccgattccagtggtacaaaccctggccccgtcgccacgggagcattttgcgccgttctcatagctctcgcgccatggagccctttcctccacccgtcgacccgtcggagttcaaggatgcctttctgggcccgcaagtccaaatcaatgaactgccagcctcaaatcaaatgtctagtggagggccccagaatccaatcccgaatcttcgccgtgccaatactgtagctcagaccggcaatgtcaagcggaatctagagttgaaggcagctcgcgagagaacagcaactgggataagcgccaaggatagccatgagcctatacgacagaacaaattacaacggtctcaaacacatcgtggccccctagaggcgcgttcacctgggaggaaggccggccatttcaccgtaagaagtgtcggccaaaatggcaaaatatttctcaggtacaccaatcaatccataattcctcgtgctcggtcatatactgtgcagcctgctgatagtaggactatttcaataatttaggccgattgccaatccgccccagacaagcccacagcttgcatccttctctccggttgatacctcgaaatccagtccccttcagccgcagtgtcatgcacatacccgcgaggacgcaaatcctttcaggtggtcgagctcccaactatccgagttacgcccgcgccaacagcccgaagatcccgaccccgtcctcgctgtgtctcctcccgagctctcgaacctgcaccgcacgagaccggtctcattttcgacgatatcggaccagcaatcgatagccggtgctgggaagcgtggggagctgcggattgtcatcgatagatccgaagaccgccccaagtctgcaggtgagaattcgacaccagcattggaggttcctattccgcgttatcggcttgggtcgccgcgattcaacaccgaaggcagtgcaataatgcagagttctgtctacacgcgaacctcgatgtcggataactttccagattcgacactgcttgggggtagagccgaccctctactgggactccatagtccatatccccgagactctttctcgcggcatcggccgtcttttgccatttcgatgttctcaggaaccgcggcggctatggacatgaaccgagctgagccagtcccgaggaattctatggtctatgaactggaagagccggtggagccatccatttacgaaacgctggtctatgatatggatgatgggtcggttgtccgatacattcctgggaccaaggatatcagtgctgccacacctgcccgaatcgttgcacaaatctcctccgagtcattcatggactatgagctagtatcggacttcttccttacctttcgttcatacctatctacaacacaccttttggctcttctccttgcgcgcttaaagtgggcaatcaaccggctacaagatgatggacgcattattaggattcgcacatttgcggctttgcgacattggattctcaattactttgtcgatgactttgttacgaattacgagcttcggacccacttctgcgagaccattaacaagctatattcagaggtcagatctcgacaacatggcggcacgagtgatcgaaagattcttattgacctgaagcgttgctggaatggcaaatgttcggtttattggtcttcccccgacttgtctcgtgcctataacgacccagaaatatcaatcgtgcctggagatgctcagattgagttgcctaaagttgaggaactgcagaaaaacgtccctattcatggaacgacgccccgtgcaaacaccacatttcgggaaagtcttgctttccccatacagcatgatcgaaatgattctgcagcaacttcacaaagcattccattctctgacaaaagcgaacagagcttgatggcactctcgtgttcattaccacctaaatctcccaggcgcttttccatgtctgcctcgaaaggcaaggcaccccgccctgtggtattgggtctcacaaagtccaagtctccgtctaggactcatgaaccacctaggtcacctgtatcttccatggtctcccggcacccatacaccagtcatagccataaaagaagcggaagcttctcagactcggtgcgagatggtcgactgccaatttttgcgatggagcctgaaacgggacccgcaccacaggagatgctcgatccggttagtttaatacgtggagagatgtaccctcctgcagagtcgtatatgacaatgatggcaccggagtcgccgcctcttcctccgccgttgaagaacctaaatcccgatcgtcggagtacaccgggtgtgcctaagtcgtcacctaactcgggtatgagaacaatcattggctcaatcaaacgagcgctgcacacgaggaacggtgggcagagcgtctctgctcgcattgcgaatgcccacgaggctatttcatcgccttcccgaggaaagacgtcggcgatgccaattggactggctttcggctctgaattctaccgggagagaaagatggctgccactcctaaatacccaggtcgaattgatctactatgtgacgaggtcctcaagcaataccgcttggccatgaaccaggaaggaacgaaagagaaaacccagccaccagctgcttctgactttcatcaagtgaccccacaggagcctgctgccaacacttctaatcttgtaccgacgcaaacccccaattccgactccaaactcaggagcggtatcaccatgggcagcgaatcaatcattatagttgatgataccggtttcgaaatgccctttatgtcaggggcagcacaggaaccaatgccaattgttaatgacaatacttgtgaaacgccggaactcgaaatgcccgataacgcctcaacgcaatcgatacccgtcgaaggagaacatctccggccggtctgctacaatgccgaaaaatcagtttcagctgctcagtcgaatatgttctacccccttcgccctcttacgccacagagatcgtcatcggccgaacgcggatcgatgcccacaagaaagaaaaacaattctctatctctccgactcagaaagtacgcgtcctttcaaagcgggatctcgaaacagcggttttcgatgggcagcgagacggctcaatccactattgactccttggcgatgcaagatcagaacaacaaacagtcagggccagttcttcgcaggcgtcgaggtggaaacctccgtcaaatgcagagtggagatgaggccgagcctccttcctgtcgtgactcgtttgcgtcttgggatgattcagccgtggatgaaatgggtagctctgatggcggtgtctcaagtcctccttcgacattgatacctccaaaaccccaatactcacttatccagccgcgcagttctcggcaaattaggcgttcctttgagtcggtcattgcgaagtttgcacagattcctgatgatggcgacggtggtatcgagtcaacgctgttgaagctggagggaaaatgggatggaccatccagcgccaatcgagacgattcgtctgcaccagcagaggtgcctcactctcaccgtgagcactttttgattccgcattgcgtcgaaacttccaagcctgagtgggatgttctctctcgtaggcgacagacggaccattccgcgtattccacggttgggggtcgattggcaccacctagaccttattctgattctgttaccgaatccgaagagtctttcaactctattccgcttcttgaaagaggattgaccgacgagtccatgaaatggcagcctacaagccagccactccaacatgactcgcacggtgccccgctcaccctcgtatcgagctatgaaacttccgaacttgcctcatcacacccctcaattcaaattgtgcacgaaacggacagcatgcgtcgcattcctcgtggcgcaaccattccggcctcggccactcatgatgctggccaggttactccgaagcgcctctcagctctgtcttctgagatgtcggtcgacttgattgatccgcgtgaagctataggtgcaaggatttcgacagacacccgtagtctcagttcgtcgactgttgagatcccctctcatcctctagcgcaacctccctccccgccgatgaccatccaacatccgggatcttttacttcctatccttcaccgttgaacacagtcttgtttcaggcccagccccttacgcccgacacatccccgcgacgcaaagaagtgggcatctcttcttcgcgccctctagacatacagcaggtttcgagtgatgtgttatttaattcagaaaacaatcgttctgaccagaaccccatcatcaacactttacctgaccatgtccccttcatcttagcatgtgaatcccaggtcctcgcacaccaactgacattaatcgaaatggctgccctgagtgaagttgactggcgagatctggtcgagatgaggtggagcagtgcctgcccattagtcacaaactgggtccagttcctgacatacgaagaacgcaagggtattgatttggtcgtcggccgcttcaaccttatggtcaaatggatcctgtccgagattgtcttgacccgtgacatcaatgagcgggctcgcacaattatcaagttcatccatacagctgcgcatgcacgccgcatctgtaattacgccacgatgctccagatcgccattgctttgtcttcgtctgattgctcccggttgcagagtacgtggcagttgatttcaattgaggataagcggctgttcaaggatatggagtgcttaattcagccggtgcgcaatttcaatgatttacgcgtcgagatggagacggccaacctgcaagaaggctgtattccattcattggtgagttgcaagctcgtttgcttgaatagcgcgctagatcttgttcgctaatttttcttcttctttccaggcctatacgtccacgacctcacttataatgctcagaaacccgcacaagtgaacaacactaacggcggtctacttgtcaactttgagcgctatcgcactgctgcaagaatcgttaagagcctcctccgtctcatcgacgccagtacaaagtataggtttcaacccgtgcagggcatcatcgaacggtgcttgtggattgcttgtctccccgaagacgaaatccaatcccgcagcaaagcccttgaataatctctcatttttttttttccttacctttatccttttgattgcattcctatatccatttttgttctacaatcttgacctccgtgactggatagtttataccccctttccagaggctgctttgtccctctgccattttgtaccgatacttatatctggttaatgcctctttctttggaattccttttttgtacatacctcggctatcccggcgcatttgaccttgtcagcgctcagacatttcgggaatgcccgctgtcatattggtttaggactcgctctccaaggccccttattaatttcatgtatattttgttgtctgggtttattgtctcatgattacaggccttatacgttgggatttgggtgcttctttctgcaatatagcgtgggcttggatattatatgcctcctctatggagaacgatatatttggagcgattctgcagatgaatctcgtattggtcattcgttatcaaaccctggaaaggtgttccttcttttcacatttgccatatttatttattatgtctttcccttggctgaagctatcaacttaaggtataacatcataatatattctacattcatataatgttattatatagagggatatctgattcgacaggagacatttttgcaggttaatatgggttccttacctacgatctaaatattagctagaaatgaaattctcaaccaaaacataaagcgagaaaaacctaccaggttagttgccttcattggcttcatatcctaatattatacacctcgacattcaatatcacgaaggcatgtattacaaagctgcgtcatatctcccgaggtattcggggccgcatcgcgggagctggtccaggaacggaacaccaaatccaccgcccgctcatcaccacgacctccctccaacaaccaatttctgcgcgtggagggtaccctccttacataacatatccccagagagggccacccgatctcgtcccgaactcaacccttttgatgtcccgccacaactctatcggacagccagcccgccacgatggtggacatgaccgaatcgcggcgcggggcctcagaggaccccatcgactccaatgactacagcgaccatagccccgcctcattccacgaagctaaacaggaactcccagatgatttacccagatcactggatgatcgccgctccgttccggtcttccaaccggagactgagatgtacgatgcttggcaaggtgagtgctcttgtgtccgcggaactatttccccgtttccccgacgcgggcgaccaaactatttttccttgagcagttacatcttggaaactttactggctatttgggagttcaagcattaaggtctaatcgttcaacagggcaatcacaatacctgaccgcgccagtcgccgcaaaacccttatccttcagcctagcgctcgacgatcactcgcacgacaatgagcacgaactgcgggctcaatatgggcgcgatattgaagataacgacgcccgactgatggagatgcttgctgctcaagctgcccatcgggaagtggattcgcttactgcagatgaagagacaattgccgccgacgagaaattgtccgatgacgagaagcgcgatatactccagaaaagcttgaacatggcggccagtaatggcgatgtggatcgcgtgcggaaactggtacagggcgaggccaggacttacgtggatgtcaataagcccgacgaggagggaactgtaccgttgatctatgctagttgtttcgtgggttgctcctaggtgcaaaatatcgatgcgaggctgacaagttctaacagggtcatcaagatgttgttgctgcgctcattgccgccggtgccctcgtcgacaggcaggatcgtaaccagtggagcgctttgatgtgggctatgactaacagacacaagacgatagcgaagattctcctcgataatggagcatcaccggatatcaagtcatcatccggtggtagggcttttgatttcgctcagcccggtagtgagatttctgaatatttgcatgagaatggttacaattttggctctggtaatatcgacgatgacttctatgacgctggcttggcgcatggccgtttcgaagaagaactagcagagagcgagatgaagcgacgaatgatgatggaagagagcgcaatcaatctggaggtcgatctgtctagtctagggcttgacgagaaattcgaggtcagtttatgtcgtgaaaataaggtttctcccttgactgatttgagttcttttattacatagccgtttgatgaggatgagctcgaggaagatcagcaggaatttgtctgggataagtgcctgaatgatcaaatgtttgtctttcaggaccatgagctagagcgcattttggatattatcatcaccaacatgactccccagcggtctccatcccaaaagccagtgcctgcaaatcttctcttcctcagcgcccgttacgcgcattatcatgccagccccgagctgctcgcaacgctactatcgtctgcaatggaaaagatcaatgacgttgtagaacgttaccagtgggatatgacaatgcaagccttttggttgtcaaatgccacgcttctacttcattacctgaagaaggatgggggcttagcggaatctaccgtcgagttccagctccatctggcggagttgatcaacgagatattcgttcttatcattcgtgacgccgagcgtcgaatgaacaaagtcctggatgcggcaatgctggaccatgagaccatccctggactggaagatgttgccttccaaaacgagtggaagctgttccgcaaaaataaaagcaaaaaccccgagcctgacgagaagcgattccggcctccatcgccgcggcgacgagcacaaatctcgcctcgaaatatcacatctttactatcatcgaccctctttgtacttgatctctacgatgttcactcggtgatcacgacccaggtcctctctcaacttctctactggctcagtgctgagatatttaaccggatcatgagcacgaaacgttacttggcgcgcacgaaggcgatgcagattcgcatgaacgtttcgtcattagaggattgggcgcgcacgaacaaccgcgtgccagagcattacgaaaatggttctacaaacagcactggagagtccacaattgacgccgctcgtcgacatttagccccggtcatccaactcctccaatggctgcaatgcttctcatcgctcggcgatgaccacgaatctctcgtaacaaccctgctccaactccaacaactcacccccgcccagcttttgcacgcagtcaagtcataccgcccagaagtaggcgagaaaggcctgaccaagcaagcaatgaagttccttctcgacatgcaaaatgaccccgaagttctgtatcgcgagcagcaggaaattcaagaagacaaggcaagggtagcagctgggctagggcctcaagcagcagcagatgcccgtccaaatacaccaccaaagaatcagccctccgcagcacccacatctcctgacactagactatccccaggccccgctgctgaatcatcgcgacctacaagcatggtcgccactaggaatgaggagcgcccaggcagcggcaatagtgtcttcgtcgaccccacccttttccttcccttctcccttccaactagtacagatatgctggtcagctacggcgctggctttggtggtacaaaccgcgaaagagcccgcaaatacattcccacagtcccgcctgaggtcctgagtcgattcgatcgtggcgatgtataaaataagacagccataaggactgctttttcttcatttccccccagcttggattattgatggcactgttcaggtgcctaaagtgcgggcacggtgggataaggatggctaataaagcgataggataccctttgaaccctttcttttgcttgaggatattctggctgtggcttccgtgtaagcatctgccgatgcgtcgagtatatattctaaatgaatctgttccatgcatacatagcattgtgtgcggtcactgtggcttctatatgcataccaacataggctatggctctttgcctagagtagaataatatacgtgatatgaactccatttggacagactgctgctcgtagtgaagaggaaggagaggggagaaagaaggggggggggtttcactcgtaggtgggggacattgctccttccagaaagatgataagaccggaaaacagacacttggtcggaaagaaccaagagcaggtactcgtaaacatgaataattagagctcgctcacagcctggaaccaaagaaaagacaccgagtagacacaaaagatatcagagagggttacgtgctaaatgcgcaagagtatgttgtttcctatttgggattccatcctcccgcccaagaaagccaagaaactcttgtaacttcctgacaactgtggtttttctgaagtcagagcgttgctgcccagctggcaacatgaagcccacctccgagcccccgaagcgtacgaacgggaataatgacctccacgaggctaccaaaacaaagagccagtgtctcccatcatatcttatccctcgaccatccatagaggaccaaccgacaaaccccaatcacgctatgagctcacgtcgatacctggtcttaccaccggagatcaatcgcctacctccacagccaatgacgacttccctaaacccacagccagctggatgggaggacaggaagatgtggctgcacgcaaaaatcgaagaagagcggcgcagacaggaagaagaaaaaacacaccgggctaaagttgtactcgaacagcggcgcatcgaacagtcaatactgtcagatgctctggatgctggtgtcccacccaacatggtcccactaatctttaacggcatctataccactggtgccaatcttcaattagcggctgaactgcagaggcagtggtctgcaccttctgcgatgccccaaccgcaaaataacccgggcccagcgtcatctgcaaggcttccagttgcgccccagccgcctcagcagggccctagacagcctcctcgagcacaagctagtgagctaccaccgacggtctcaaaccatctgcgggaaacacgccatacttggtggtcggaggccatgtcgaattcacatcgagcgcgagtgataaactctgaacgagagcagctgaggcgcaagctgatagctcagaacgtagagttcgctgacaaggacctgttggatacagcctttgaacacactttcccagttacgagctccatggtccaggcccatccctctcgatactgggctagtccttccgataagacatctaggtcgcaagaaaaacgacagcaagccccccagaaagctcatcccatggtttcccaagaatctggccggctgcagctaataaacactgccagtgtcacaaatgtcccatctcacgttcacccggagcaaacaaatccacttagcccgaagcgaaaggatcagagatcgcatgagaaagtccctccacctaaacatcgtcaaaatgagacattatgctgtgaacaagatttatctgatgctgtccatgtatcgagtcccgtggaagacacaattgtaagcatcaagttggagtgatgcctaacagtgcgccactccattttcttttcttggctctaatcaattattctttcggatgttgcgtgttggtcggctttcaatgttcggtggatcagcccattggggcaaatatgtctttgtgggcgttgagggtgacgttcgagctgattgcatgcttggacctcaccttgaagagcttttgtcaatttcagagataccaaatgttgttattgttactttgatactgtggattggtcggtctgtattgttattctcacttgttcttgactgctgaatcctgcatgccaggagttactagcagcagtggaaatacttgaatggattgaatttcagctttacaaccatctctctgtactgtgaggtatagttgaaaattattagaagcgaagatgccactcggagggggcgtctttcctattcgggcaatcccttttgggtgtctgtttatgctcgctctagtagggagcttaagtaacgaaacatgtagttagaagtaaaagaatggataatcatccatgtcacatttctctggaataatcaaggttgatataaagttgtcaaaactcttggcgtgtccagtatgacattcatgaacgtcatcgctaaatgaaacctgatttttttcgtgggggacttgtatatataggaagtcaattccgcttgttaccttaactcatcttcaacctctccccaccttcaacaataacaataaatcctaccaacctccaaaatgacgaccttaatgcgcctgaagactgcattccaggcccgatccccagttacagctctctccatagcgcacactcaaacacctcgcgcctccatatgccgaggctacgcgaccaaatcctcgaatgaccccgagcaagccacaaccgatacaggctcgcccaaccgcccaatcccttccaataaagcaaaacccaccctcaacgagggagagaaatcgcctcttgtagaccgagaggggaatccgaaaaaagatattcccgaggatgtgaagaagcacaatcaggatatggagcagcggtatgataagccgtataacggtactgctgatgatggcacggtcaaacctgctttcaagggctagcttcctcggctggtatcctgctctgctggtgatccgtcccctatgatatgctaggttgtgagatggtgctggtccatcaattttcttttgggcttctgggttcaggcgcctgctttggagcgatgtatgaatggcttttcttatcactagatgtttttgcattaatcatgggttttgtattttgggttctctgggcttgtttatcaatatatacgtgtactcagatggacgagtgaaattccgaaaacacgtcgagtcgcttttagtactccgtagcagaacacagctcttcagatcttactctgcctactaatgaaaagtggacattagcttacatctatgttcatcggattcataggaagatcattgattgtcggtcaatctagctatccatgatgatgtacaaatcaaggcagttctcaggcttgtcccaaagccaatatccaccaaagataaaatcctaagcacattgcagcgaagtaatctgatgacacttcaaagacatctatgtgtctcgagaaagcataagttgaatttttttttggtctttttcgatagatttttgtgcatagacaggcagcttggccacgtccccacgtcgccatgtcgctctttcgtgaatatcatcaatgtgtccggaaagcaaatattacgttccaatgtactcctcagctcacaggcagcttggccatatcacccttaccgcccttgatccattcagggtcaaccagacgctcgcgctccgcgtacaattgtttgtaagcaccacgaatggttccatcactgacatgcgcaacctgggaaatctccttggcagacttgccatggcccataaggaatgaagccatgtagatgcaagccgcaacaatagacaggggagaacgtccggccaagtcacccatggcggtaacgcggtcggaaagggagacggaaacactggtgacctggtaaggaaggtcgagaaggttgcagaaacgattgcaaagatcgcttggcttggtagaggtagtcgcgttgtaatcgccagcaaaatcgtgagtttcgccattttccaaagcagcattatggcgctcgacattctgggtggtgaaaaacttctctagagccttatagatgcgaccaatctcctttcgggtgaccttggtcacagcgaagatctcggtgaaggtacgaggaaccttgcactgacgacatgcgatgaagatgcaaccggcaataatgacttcctgcgacttgcccttgaaggccttggcgtcgtcgaccatcttgaagagatacttggcggtatcagcgacagtcttctggatgttgaaaccgtcgcacagagcaccgatttccttgtaagctgctaggagggccttgttcgccttttcgccggactgcttgttttgcgcgcggtacaagtcgcgggcacggccagatcctccacttgcgatagaagtctccagttgggcgccgttgagcagagggttcgaggcgtctccgacacgggagggatcgtcattattttgatcgtcgttggagaaggtacgccattcagagtgcaaatcgatctcacggtccgcaagtacaagcccacaggaaccgcaaactgtctcgtgggagtcggggaattccaggttcgggggatcctctttgcattcggggcaaacgagatgggcggacaggtttttcttccaaggagccgcggcctcgggttttgtaagagaagtagccatattttcggttttcagataacttgagtatcgattgcggcaacgtcttgcaagtacttttggcgctatacggggtagatggtatttccgattataatagcgaaggagaagtggcgaatacagcttggcggctgtagtgaggaaaacgaaagcgggccagctgcagagaatccctcagcaagggaaaaggtcgaaaacgcaaaaaacgagctcaaggccactgttttgcgcaatcatgttagctcagcccaaaggaaatccattgtctcccgtatcgctaatttgtctgctccttaacctccaacaatgtcatgccaagatatactctaacaaaagaattttcattacctttcacaggccagagccctcggaaatctaaggagtcacccccagtcgtagaaaacccttcaccagtctgcgctttcttgggttgaaagtggaacagaaatctcgcctcagcttgtccagccgtgttgaaccagtcaaggtctccgcaagaagtctctcacgaaaatggggacaggctgaggaggagagaaagaagatgccaaggactgggggaggatgagggagggcaacgatgggatgaggtgaggcttcaataggcggcaccgagaaagggtccagatcgagcttagtaaataggtcacgtggtatatgatgtctccaaggtttgattggttcgaggaagtataggatactttttatatcaaacaaaccttctttgttcgcgtttgctgctctagataaacgaaatctaacgaggacaatgagacttcaactttggatcttggcagataagtgaaagccaacaataaagtcaagaaatttaaacattcctatacgggtggtctcgggaatttgtgtagactgatcggttcagagaagtgtggcctctcctcgtcttgataacataatgtcaacgcttgaatatagccttagccaactttcacttttcatcgataaattgaattaccgtcgactatttgttttgatactaaaatggagtgtggaagccctggaaagattcgggaacaacatggcccggctgagtcatctgccaagaaacctttccgaacagaagtcgtttgaacctccaacttcacggaaagacggatcagacctattctgttgagaaccacccctcattcctcatctacaccctcagccaagatgatgtctcaatctctccgggcctcggtgagtgctgcttgatctatagcaatcaatttcgaccctcgactaacgcgaaaagcagcgcaccctgttctcccgtgcctctcgggcacaggtctcggtcgctcgccgcaccttcctgacctccgctgtccgccagggtacgtaatttacctggggactatcttcaatataatcaagatgtcccctgctatatcgatcggtcgcattctcgctaacccgcaacccgccgcagccgaccccgtccaggacctgtacctccgcgagctcaaggcctacaagcccacccccatcaaggctggtgacgccgacgagcacgtccaaaagttctccgctcccgcgcctcccaagtctcctgaggaggccaaccttgccagcgaattgtccgcctacgagagccaggaggtcgaggtcgagggccaagccgccgccggcgaggccgcccccgtcgaggagagctggttcgaggaggaagaggaggcacccgctgcccactaaattcctctttctatttcatttagcaaggtctggggagatgcggggggaaggccggatttaaatgcctgcgccgcagctaatgtggccgcctctcgaggtcctgaagcttgtaaattagaccacatttttgaacgttgagacttctatttcccttgtttttcacctattctgcttttatgcagggtaggatttaaaaatccagggctacgccggggggttgttactaaagacaagtatttggtgagtgcagcagactcccggctagggtcatccgcttcaacttttcggtcaaagagcggggtttgtagtattcaaatgaagtacttcaagaaccatgataccacatagaagtcatctagatggtttgactgtgtggtggacaggtagcatgggcaaaatatgccatggaaccgctggtttacacaatgtgcattgtatggcttaagtaggcttattgccatgctcatgcaacaatcttccggtactgagtacccggtcaggcctcggaagtatatgcgtatggatattcatatgagggaactattggtactgactattaattattgggatctactgctgcaaccaatactccgtagatcaacatgtaacgaacagaccagaagttcatggcattgcaattgattctgatatatcaaattcatggctggcaaagctaaagctaccccgtaaagtttagaaaatcccggagcaaagaaaaggacgattcaagggggcgcaatgaaaacattggtcaccaagggtttgtacaatgtgattcatggtcgtacccgggaactcttggatacatccagagagaaaaacatcaccatttatagggctatctgtactccgtccctaactagtagctagggaaagtgatttactttggaagcgtcctaactatggatccaacccctgcaggggagattataggtagtggaaatagctccatactttggaaattgagttgactctaatcgaggcgtgtggaaagcgctgtttcttataagaaaacatcgccaaaaaaaatagagaattagggttgatgatgccattggatcatagcgaggcgatattctaacattccgtggccaagaatgagatacgagagatctgtgccggtgtacagctgtccagctgtcaaagcccactcggtgaattctgcctagtattatgttccggagaggatgcgattggtcctatcgcctgtaaagaccttgcgattggggctgaacagagagagcccaatgggctttccgaatcagacttgctgcatggcgcagagaacatggactcgagctgataccgtgagacagagcagtattacgcgatcatgatgtctacagagagaagaagaggaagaagtggagtcaaatagggatgtctcagctgaaaggaagcatctgattttaataataaaatgaagtatgattactcgtatggaataggttagaataataagttaaaaatgtctcgagttaattaaccaaggtaactaaatagtactttggagactttgcagacttgggggactatttggatttctccaacttcttccttcttcttctcttcttcttcttctctccctcacttcctcttgacattattcccccccacacacgcacccttctgccttttgcccggaccgcccttgggggagatatttcccgccgatcacttgctgaatcagagtggcgcccttgtaagcggctgcatagacgatctatccaccccgaaactccgtaattccagggctggatattattgttttgtccctctctacctctttctggctcgctgattccctcctaaagtcggcatttcagcattgcgattgtgcctcgtttgcccttcccagatgccgcgcgcctgaccactttgaaccggaacctcctggtgcacagaggagctggtctcttctacgctcggaatcttgggatttaaggggaaatgaccaataattcctatcaataaccaatctgccctccctttatcctctagacaatgtcttcgccttcactggagacgaatgatgaccagaagccccagctctctcgtgccgccagctataccgatcttcccagtcaaaccgcaacggaatccagtttaagacgtactttctccgattatgctgtgccgactttggcagaatcacccacaaaggaaaccgtggctgcagggaaagacattcttcgccgcacctctcttcgctccaaggacaggtcgaagccaaccactatctcacgtttcacattatcgtcggaggatttgaaggatgccgatttgaaggatgctgattcacatgtgccggaaaccagggcaccagagcccgctgcgaggccatccaagagccggtcaatgtctggaaggatcgtcagccttgcgaggaaaccatggggctcttcctcccgatctccgtcaccgtcagcgaaaaggtccaaacagcaggattctcagtccccaactagtttcagcggtcgaaaaacagaagatgatcagacacaaccttcccgcaagcgaacgatcctctataaacgcccacgccggccaatgctagctgttatagccaagggccccgaagacagtcccggctctccaaacagtccatctggcaattcgctacggcaccggtcctcattcgaaaaattcacagcatcactttctgtttcgaccccgctcttaccacctatgcccaagggagctgcggaaactgctgcggcgtatgcgaattccggcaccgaatctgcacggaaaaaggacgagctttggggcgtctttcgtggcttggaggcggatttccaaaagtatgcgcaattacattaacccttcatattacaattgctgaccagataataggttccaagccaaatctagctcgctgaaagctaacgtcatccgtacctcgctcctcccttttctcagccgccatcacctccatggctcatgcaagaacctcagaccggaagacctggatcgccgagtcaatattcttaataaatggtggattggaatgttggagatgctcaatggcaagcataaccagtcgatatcgggaaccgacagaccggtgttcctggaagctatcgtgggagtcatggctcgaccggaatggcgcatacccttccccatggcccagaatggagatgggcctacggaatcattgaaatatgcgtcaacttcagtgtcggaaacatcggatgggtcaggctcctcgggttcggatttcctggttgaatcgattcatcacaacatccgaaacatcttcattcaaaacctcctttctcaaatgggattcgtggtcgaacgaatgtctatgagacatgcgccagctagcctggttgctttttgtggcaaggtttgcgcatatgcctttttcttctgtcccggggtgcccgagatcctggtccgcctgtggagcacgcctcctaatatgttccgacgcatcttgtcagaatcagccgggtcgcgcactggaaatatgcgtgcatacacgcaagaactcgctctgtgctttccgccggctctccgtcccctagcgtttcactcacaatcccctctgttgcgatatctacgccagaaacccgaactacccttgaataccactcatattaactggaaccgcccgtggattgcacgatgggctgggcgtgacacggacctcttttttgtcttcgtcaaatacattcatattctgtacgctgagtatttgcctccggggactgaaaaggcaaaacggatattggcacctgggctgctgatagttcacgcgcaacttctgctcgttctggaggacacgatctacaaacaatcggcacaacaggggtccgaaaatccccacacagctgctgcaatcacctttgatgattttatcgagtcgccggatgcttctgcctccactcagcatcttcgaagcggcagcaacactcatcggttgatggcagagaatcgtttgattatccttctccgagacttactgtctgcatcgtcggtggaaccaaatcgagctcgattactatttgccgaatcattttgtggcataatcaaagccgcagcgcagaaaacgtctctctttgatcataatgcatgctttttgttgtgtgacttcctcgaggaggtcattccaatcatcacacgttacgcccagtcgattgaaactgaattgtttgattggggcttttggctcgatgtttgtcgtcaaatgatgcagagccacaattcgctcacggaggtacgggtattttctttcctcttctgcatctggggtacctggactgcgacagaagaaagaaaagcatctatctgtctagacttcttgttgcatgagccggtattctatcactacttcaatcactggagtccgatggtgcgagcctattttcatcgtttgttgtgttggagggtcggtcggttccatactgatccctcatcacttgactccaatgtctatgagattctttcagatcgactcctacgagtctgggagtattacatcgggttccaatctaaggctgaacaaggcatggcagctcctttatcctctgctccctgtacacccgctccaggacgaagaatcatcattatccgatgcgagaaccaattgtctcctgtcaatcttttcgtcagctttgaccgagtcgttccacccgttccctcgaatcaactgacgtcacacaatagaaccggatcgtccgactccagtggttcagatggtcaaccagctaaacgacggtgggggatactcaaggctatgtttggcagctcttccaacccacgttccggcgatggagtcagcagcagcagttctgatgactccgagaatcccgtaccagatccaccaatgactgtggatagcaaatgtatggatgaacacgaacaaactgcgacccacagtatggacgacgagatcatccgccccaaagctctccaccagccattctttttcaaattctctctggaatggatggatcgcccgcaatggcccacgaaaaacaaacgtcttttcaccccatgtctccctgtcgcatcccaattgcacgtcgagcatcgacgttctcccgagaagtcggagtatgatacagcatcagagaacccgggccagtccgacctcgagaacgatgaaccagaaccagacatcatcaccaccgaccaagatactcccacgcagcctacctcagatacccggccgcgaacacctacaaccaagaactcccctctacctgaacttccttcccagccttcttacgatcatcttgtgtccagcaaatatgcaggccgtgccctggcggaatgggcacacattgtctccgaatgtgatagctttttcgcccgtcgtcgtgacgagggcgtccctactgatcaaatggtggaaaccccaaccctaggggttgataacttccgcaaataaccaaaatccaacatgagaaaggagcccttctcatcaacacggatcaattatagactccccgtgacatgttcaagcagatgtctgttttgagatgtttcggttcattcctcttttttgtttcttctaatttcacaacactgtgtgcatggcggatctggagcatagggaatcggcgtttacttagcctgattttgttcttccaaggatttctcatttcgtgtactaggagcgagacacgcaataatcatagtaaaacatcattcgacttgatcgtccaaagaaactgtagtagagcatagtcaactagttatatataacatttctttatgtaacaagtgatctctctctcattctaaatctaactctgctgctctgcctcccccttctcctgagcaagttgcttgttcagtaaatgcagcaaaactccctgcacatcctccctatgcataaagacttcaacaagcctcaccccagatccattctgaatctgctcgctagccaacacatccttcaactcgccacaggtcctcgccgtaaaactattattcgccgcatgctcttgatcagctccgaaatagttcagcgcctgcgcgtgtctccagaaaggcacatcattgtacacctgcttgcgtccgtggatcacccgctcaatggtatagccttcgttattgatgatgaaaataataatgttcaacttctcacggatcatcacactgatctcctgcgctgtcatctgcagacttccatcgccgatgaacaaaatagtctgactcttgctttctgtgaccttgttgtgctcacgctgcgctagcgctgtgcctagtgttgccgggagcatgaatccaatcgagagccaagtgaccgcgccgaagatgcggcatttcggaggcagtttgaagttccggccgccatgcgaggcggtgcccgtctcggtgaggattatgtcgccttcgcgcaagagcgggtttaccaggcggtagaagttgtcttgcgcgagggggtctgtgtttttgatgttggccaatgtgatttcttgtttcgggggtccggtggccttgactaggcgggtggagtcgaggctttggagtatgtttgatagaatgttgcgggcggacaggtcgcgataagtatcattgtcgatttgaacggtactgcctgaaaaggcgattgacactgcgggcttggggattgtcgtaaagtaataggtgttggagtcgctattgtgcagtccgaatgccagaatcaaatctgcctcgtcgaagtactcctgcgctgacttgtcgccaaaggctcctgcgtacaatccgtacacatttggcagctgctcgttgactaggcctttgccgtacacggttgtccatgtgggccagttggttgctttgatcagagcatcgatctgctcgacgataccaagacctgtgctttctccgtccacgaagatgagcggacgcttggcactgtacactttctccaagatgcgagccagcacttcgggctcttgtgtagagcttggtggttgaggaatgctgatctttgtttccaaatttttagccgacaccagcacgtcgggcatatcatcgggcaattcaaggtagaccggacggctgtggaccaacgcctggcgcaggacatagtcgatccgttccggcgctgtggcagcgtcttccagcctcacttgagctgcagtgacatgcttcgacatgttcgcaaagcgacggtagtcgccatctgagaaagtgtggtgcataaacgtgcgcgcgctctgaagtgggcgcggtggagttccgacaatgtgtaacacaggtgtattctcggcataggcgcctgcaatgccgttgatagcggacagctcgccaacgccatatgtagtgatcagtgcagacaggcctttgatgcgaccatatccgtccgctgcataggcggcattgagttcattgcagttgcccacccagtggagaccggcgggagtgacgaaatctaatagacgaaggttgtagtcaccagggacgccgaacatggagtcgacgcccagctggcgcaaccgggtaaacaggtactctgcgagttttatatcttgagtcataatgaatgtgatattgaagttaagagagggacgcaaaacgagtatttatagatggatggaatggatccccgcatcttatcggcgacacgccgattctccgactctccgatctcgccattgttagccgacttcacccttttgtctccactggcgggacaaactccgcgagaccagccatgtcacgcctggctgcttgtgaagcctgcagaaaggctaaactggcatgcgaccatcagctgcccatttgcacgcgttgtagtgctagcaaggggatttgcatctataggactacgcccttcaagcggagaagagtcgagaagcaaaggtcagtttcatacttgcctggattgtatccgaattggctaataatatatttgcagcgtgaatccaccagataaatcgccattatttaatccaaggcgtaatccatacccaaaccctgggtatctaggatcatctagccatgcagctatattcaagcacatcactccggacggagaccatggccccggtagtcatcaagtcgcaccagaggatctgcactcggatttctttggggacaaccatcttgtcctacagggtgcagatatcctcaaacatctcttgacaacatataagttgtccgccatgaaagacctcgtcatgttctggctagctaaaggagccaatctggccctggcagagccctttgttgaccaatgtgcccagagcgtgagccaattgttcacatatcatgacgacaactggcatctagtctatgcaagacgtctcgtgcagaactcggccctaccgctacacttcaatgatacctctgacctggctagtttctcggctcaatttttggatcacaattctcgctgggaaacgttggggatattctttgccgctgttagtcgtgcgacagttgacatcgcgttctttccgtctctatatactactgagcaagagcagtacacactccgaagattgtgtactaaactttgtgattttgcattggagatatctctctctttagattgcttgaatgatctacaattgatcatgcaatacgagaactttatcgtccattcctacgtggatggagatcagagtaggttgcaagccgcaattgttacctccacttagccatatgttaatttctcaaaggctaccattcctggcgcaaactgggcgatgcaatatcttccacatttgcccttggctaccacgagaacatcgaaattaaagcaggaatcccgccattcctcaaagaattgcgcaaaacagccttcgcgcgtatatactccgcagacaagaatatagcaatattcctcggccgcccaccacgaatgaacaaacgcttctgtcactttcaaatcccatcctgcaagaatgcaaaagaaggctcagccgactggaccccagacgcggaacccgggtaccgggctgacacgcggtggtctgcactgtgcgcatcactaaaggaggagatatgggagcttcttcaagacaagcatgatccatcatgtgcgcagcgagcaaggtattcaaaagcaacgcaatgccacaccgaatatctcaaagtaaacaatagctaatcaagaaatggcacagtgtgatacagtgccaagcagagacgcagtggcaacaactgccatcccacttccgactcgagagcagcctaaagaattgtacacaaggatccttcgagcgagacttcgtcgccggtgtacgactgcaccacttgcatgtgctattcttgcttcgtcttttgcttcttaaatcaccgactgagcccgatctaccgatcatcgagacggcgggtcagatgctcacgctcgttgtggagattattctgctgcgggatcagctcactaattctgggacgggtcttatttggaaggtatgtatggaattgacttgatgttcaaattaacatactctgtctacaaaccccccaacttgcaagcagtaaactgaaattcatactaactaggtcgcatactacggtctccccgctgcggggataatgcttctggccatgttgaaacagcatatgccacgagcgcaccgtacacggtcgttacaagatctcagtgtgtttgtggcggaggttcagatcggcacgattgtaaaagcaggggacccaaattacccattgctttctaaggctacgcggactatacagcgttttttggactcaacacattcggacccagcgcagcctttgcctgaaatgaccgaggttgaggggaatgatgagtgggcggcgttattgagtcaggatttgtgggattttgaggctgggttttggcagagtttggcggatcatccgtctttgatggcgattgagccttctttgccgtctgtctagtttatgatacctatgagtaaaatatgagttgggctggaagaaggctcttcatctcttcatttgatgtcatatactcatactgacttttgacttagttttgactgtctttgtctaataactagcattgacttacatggtagtaggtcatagccaacatccacattgttataagagtgctctttcccgctccagtccacccggtcagtaggaccctttccacatacaataaccatggaaaatcatataagaagactctgaaaatgtgactcttacataatgaaatatttccatttggaaaatgaagtactaccctaagggtggagcacttggagcgagcaagcaaaccatgtggactggcagggttggaaccctttagaagctagatgatatatcccaatatgaacgccggtgcctggggcaaggagaagctagatacattcaagaaaagatgaggatgaggcgaccaatggaaccaacagaaggacaatctgctaaggcccgtatgagctcaagacatgcgtggtatatgatgggcgtaaaaagaagttcccaaaatgcaggtatagaggtattccgacaaccaagtgacaggtgtcgggctgtacagtgctcgtttagaacatgataatagaatcaatccgataagagcggatgaagtatggcggagaagaacgacaaataggaaaagggtagatagatagaatacattaatggagcagcttgtcgctggcgtggtggatggtgttagcgacccggtcgatccaatattgggtcaatgtccaattccccgtgttgatgctgtcgcggatagcagggaagatcgagggatcgtagccggaccacagctctggcccaaagataacgtgtcggaattgtgtgcggttggggatctgtacaaatcatcagttagggccgaggaatgaatcaagcagaacgtcaacttacacctccgccttcttccaagtcaagtagattggtatcaaaagcagccattcgagcattatggttcacccgctggactgccataacattgctttcataaccacccatgccccatacagtatcgtgccagattttgttccaggactggaatgtaacagcattggctctcatctcggtcgcagccctgaacatgggctgcatgtctacctcggcgttctttgatttggcaaatttgtccaagtctttgacccatccgacaatggagtcgccgtagacttctaggtcaaatggcagcatgggattctccgaaaggtctagaaggagaagcccccagaattgagccaggattttgtggtattggaaatcggggtctgcgttattaaccatccagtcatatgtttcgtagcagctgtggtatggatagggctcgccctcaaatccgaagtcaatgctcgaagtgccagcgatatcctggaacgcaacataatcacttccagcgccaagtggagtaatctttgagccctttttatcccaaatgtctttcagtgttgcgttcgcataggggtcagagatacgacccagaacctgtagcacggtgcgctcaaaaacaggcgacgcagacacacggaaatcggggcccgcaacgcccacgtcgacattcaggtaggcaaaggcatttgcacggagatcatcgatctccttctcgacatgttcggttgagccgatcaaattgtactcctctccgtcccaactgacaaattcaatggtgcgaagtggtcgccatccgtaggtgagcaactcgccgaaggctcgtacaacctctaggaaagtagcagtgccacttccagggtcaacacttcccatgcaccacgaatctcggtggttgccaacaatgatcttcttgtcacgctcgtccattccggttattatgccgtggatgttgtagataggttgccgctctatttcatcttgcaggttcatcagatgaacgatcggggagtcctggtcacctgtccaccactctggtacgtcaggaacaccgcccacccattcctttggtactttggagccatggcctttgaggccctgcaaaagtatctgtgcatcgcgccaagcaagtgggagactgggaatcttgggtagaccggggctgtcctcgggggacagacgatggttttctcccggcgtagatgcccatccagggctgagaacatcgccaattacctgcgacatcatactgacaccgcccctttgcacgccatcgcttggcatgtatcgcccttcggggaaggccgggcctttgacaaatccgtcctgagcgggatcggagtagatgatacagccggcagccccggctaattcagcagccttgattttcaatgcgcgatctgattcagtaccatagtatcggaccaaggcaattgagccatcgagtgaaattcctttatttgcgagcagctcgaaatcttcccgggatccgaagttagcatacaccagatgcccagtgacattgccggatttcgaatggccatggaagatcaggtccttggcgttgtcctcttcgagtttcgcctcccaagctagactaggtggatcgatgatggcgactctcctcccatccttgcgtgggtagttgaggtagacctggaattcctcccgcgacacttcatcaaaccctgcattctggaactcttgttcaatcaattttgatagcgcaaagctgccttccgtgccagctacgtgggtgtagtttgtgactcgtcgcaaattatcggcgatattggtctcgttgatgtggccttgaatgaagttctcgacggaggcggcgctataggactgacccatggccatgcgactgttgatattgaagacatctgcgatgaagaacacatacactaaggtgaccaccagtaaaagagcgaatactcggagaagcatgatgcacccctgatcttttaagcgtgccctagcgtcactaaggttgatcgtgaagcggaaagtaggcatatatcgttggaagggtcgttgtatagcggacagggtacgacccagactcgatagctgcttggaaaaacgatgtcgtagaggggtgtgtctgccggttaaggaggccgatgccgaatcatccacgtccatctggtctagctcccgccgtagttcttccaccgactctcggtctgagtgtgaggccaatgattccaggtcatccaggctagagcgcgccgattcgacggttggtgggtggtagccgcgggttgcggcatgatcgcgaccgagtagcccctgtcgttcaacatctgttccatcgccaaggtcggatcgagatgaggagggttgaccggtagcttcggcgtaagaagggatggggacggcctgatagtcaaacttctcgtcgcccattgtgggagatacggggctccggagagctgtaactagggtgtaacgcgggtgcggagatctggaggatcatgatctgtaggaaaaaggaaaatgagcgacgtccgacatcctatgccgatgaatgagtatgtccagaatccgatggagttgtataggagagagacaggagataggcaaacgcccccggagtgagagtgacccacgcttggcaactcggtactgcattacgcatcatttagagattgggcattctttaatgctatgacaacatattagtagattagaatattttttattagtccaaaccggtttgggagtcatttcttttttatatatgtatcagacctcggacgtgcagtgtcgtgcagatgttctccattatgctacggagtacataccccatccacgccagaagatgaagatccgagggcagtatcagaataatacaacacagcaaaggcagactgaactccgtacagcatagtagacggtataagtgaccacctgagaagagtctcaaagacttcattatagagaagcaagtttcgggctaattagctaaaacatccgaagtgatgccactgagccatcttgaggtacgaccgggaggtccattgctccactaagcaatgattcgaggatgagaaggaaccttccactattcaagatattaaaagatctcaaagagggaaagctgagcctggaagatgaccggagtggagacaagagagatcgataagatggcagactcagttttacaccgtagcttggatgttgagggttttaattttcaaagccacgtagcggattctaacacagagatgtaactatgtaactgtttattacctaactatgtgctagctagttacttactgtcaaagttgatgttgaagtggtaagttagcggggagtgttgtatacactgcatcacggggtccacgagtcacgagtatagcttcacgtccaaatctccccgtataaccacttcttatatatctcctggggaattatccggcccaaaggaactgcaagagaagtagcaaaagagggcagatctccccactcgaagaaaaaaagaaaacgcgaaaaaaaaagaaaaataataagtggtgacagatcgtacacggtagaaccgagtacacagactccttttcattcttatatcagtcgccttctcttcagacttctccctcttctcttgatcttaacctcaacctccttcatatacttcatctcagtcatcttccttcaccctcaccttctattcctcttataacacaaagttacccctctataccccccaccatggctactcgtccccaaaacatcggcatcaaggccattgaggtctatttccctactcaggtaagggttccacgtctatcgtatcccctgggatcgatgctgatttgtcaattgtagtgtgtcgaccaggtcgagctcgagaagtacgatggtgtctccgccgggaaatataccatcggtctcggacagaccaagatgagcttctgtgatgaccgcgagggtatgtgcacgggcatattccaaaggggatcaagaccaatcagctaacctttctcggcagacatctactccatgaccctcaccgttctctcctccctcatgaaaaaatacaacgtcgaccccaagtccgttggaagactcgaggttggcaccgagacccttttggacaagtccaagtccgtgaagtctgttctcatgcagcttttcgctccccacggaaacaccaacatcgagggtgtcgataacgtcaacgcctgctacggtggcaccaacgctgtcttcaacagcatcaactgggtcgagtcctccgcctgggatggccgtgatgccatcgtggtttgcggtgatattgctctgtatgccgctggtgctgcccgtcccactggtggagctggctgcgttgctatggtcatcggccccgatgcccctatcgtcttcgagcccggtctccgtgcctcctacctcacccacgcctacgatttctacaagcccgacctcaccagcgaataccccgttgtcgatggtcactactcccttcggtgctacaccgaggctgtcgatgcctgctacaaggcctacgacgcccgtgagaagaccctgaaggcccaggccaacggtgccaatggtgctaacggtgccatcgacgagtccctgacccctctggatcgtttcgactatattctgttccacgcccctacctgcaagctcgtccagaagtcctacgctcgtatgctctacaacgacttcctggccaacccctctcaccccgctttcgccgaggttgcccccgagctccgcgacctggattacgagaagtctcttaccgataaggtcgttgagaagaccttcatgggtctgaccaagaagcgtttcgccgagcgtgtcaaccccggtctccaggtcgccacccagtgcggtaacatgtacactgccaccgtttacggcggcttggccagtctgctcagcaacgtcgctttcgaccctaaggagcccaagcgcatcggtctgttcagctacggttccggacttgccagctccctgttcagcgccaagattgtcggcgatgtgtccaacatggttgagaagcttgacctccagaaccgcctcaatgcccgcactatcctcgagcctgctgcatatgatgccatgtgcaagctccgcgagcacgcccaccttaagaagaactttaagcccactggtaacatcgagactattggatccgatgtctactacttgactgaggtggatgacatgttccgccgcaagtacgagatcaaggcttaaagtttctttgatgttctgcgattgcctttaccgttcaatgtgttgtttagacggttcaaagagattcccccgagcgttttgagtgtttcgtcaaggtgcatagaagaccttttttcgttttccttttttactctttcggttaggtcatttcgacccacatgaaatgaatgtcatgaaataattaaaagacaaattaatgagatacaattctaaaataactcggtactaaaaggtcgatattaactacacacaatgtgcactaacagcagtgaaacaccgggggtcaatgcacggttatgggttgaccaccccgatttaaccacctcgatttgatctcaacctctttctaggtgtctcctgcatgaactcctcatcaactgcattaatcgttgctaattatgggacattgcttagtttcaaggatcaaactatccaatcactggatatgacgccaggtgcccggcgcgtacatcaaactcatcaccacacatgtagccgccgacgtcgatatcacattcggccactggtgcatctagagcagctactctcccttcaaagggtctttttaccctgctcagaccatggaaccacacatttcataaccccgatggctatttttatccgtttgctttcttggaacccttaaccgctgaccccgcgagtcctgaagcagaaaaagtcaccaacaagtctgctaattaccctgcaatgtgacctaattgttgccgtttttagaacgcctcgagaatcttgcagcaggctaaccatttgaggcaatctgaagaacgatgttggagaaaatgcaaaatatagtaacatcttaacgcgcgacagtccgatgaaaccgcactataccggactagacccccttcgaggggtagtttcaagggcttgttgctcaacatgcctgtcttcaggcacaatgtcggcagtttcgtgtttcatcgagtgggtatgcctctgatcggagactaggatcccaaaaaaagattctcaaggcgttacaatggggctcttctccatgtttcatcttttctagatcgactagggttcgtccgtcaatctttttatatacaccatgcttggctgtttgagactctgtcgatgttcatttaacatccagacatcctccttctgaatcatgtctctgtgaacgacttggtcagacatcagatccttattcgtttgttactcttatgatatattgtttcggtgatatacctagtcaacaacttcactatcatgtctgctgtcgattccgctcgctttcggctaacgacgccgccgcgtctttctcttgaggagtacatcggctctggacatagtcgtcatgtctccaactcttccgtctattcaagcgagtcttctccctggtcgactatgactggaaataccagtcctaccacctcgccaactagacattatcatggcccgaagctattgccaaagatcaggcctcaagacgtcgtgattgagccagtgtctgctggcgggcctcttcgtaaccgtcgcgttctctctaatacacggaacccgcctcctggattcatcccttacccactggtgcggccatctgtcaaccgcacacaagatgtcgcggaccgcttgacattggcctctcccatctcgccggccccaatgactacgcagggctgcttccctgccttgtcatcgcccgtgactatcaccccttcgtacaagcgcaaggcaggcgggagccactcacgctcagtatcggcatctgtcatcgatgccgccactttgacccgatttgggtatcccacctaccgggagctgccaaaatatgcgcctcaaatgcaggcccagacgaccccgaccaccccagttacgccaattaccccaaacatcatgccctatccatcatattctcaaagactgggggtgcagaatgctcctgcaactccactgacagtgccgacacctcaatataactaccgccacgcatcggctgctcagcattcaccggtctcgctcagtccccaggagaacctaaccccaaggtccactactctactgtcatacctgaccttaccaatccaaccaatcaatctagtccgcaacgttagcgtaattcctactcgcggtctacacgattacttctggtgggacatccgtaacctgcgcagctggagctccttctcactggcggcattcgactccctggatagccgactaattcagctcctgaagaccgaaatcccagcagagctcacaccgcacgtggcggtatccccggcaagcctagcgccagaatcagaacacgacctagtgagcctaatccgcgacctctacgcaccgcccgtaaacgccgccctagccgtctcccaaggcgaagaccacctccaactctacgctgccccagacgtgcgcaacacaggccaaaaaaaccacggccatccgcacttcctagcaaactatgcctcagacactgagcaaacaagcgccggtctcccgcgcggccgactagttggcatcgtgaaaagcttcgaccgctggaacaccggcatgcgcaacgaagccccccacaggcgcgtaaagtacctgaacggactcgcccacctgcagcggtgcatgcgcgatcactcctgccgctacggttttataatcaccgagatcgagctcgtctgcgttcgagcaggctgtgacaccggcgacgacatcccctactttgggtacctagagatcgcggcatcaatccccctcaagacagcagctacaaggagcgggcgtgcacacgcgcgcgatgcacctctcacaacacccatcagcgcgcgctctttctcgtcgtcattcccctcgcatcatgactcctcggacccggacccggttgaggatgcgttaccggctatgacggcgggtctaggcttgtactttttgttgatgctttcaaagtcggtgccgcttccgcatcagccttctgctcatctcaacgttggcggacctggtgcgatgactcgtcagaggattttggaggagccgaaggataagtggattcctgagccgcaggttggagagaaaagggatgctaaaagagtgagaggctgggtttggccttcggatccttggcatcggagagaagggggtgcgtctaggcggaaggctggcacgaaggctggcgcgaagacaaagaaatggcataaatgactctattttctgtaggcacaagtttggcttttatgatggatgtttgggatttaagtatattttgtttcgtttctcttgttgcttttcttttttggtggtttttggtgcctgttattcccccctgcaaatctttcctttcatagtaatttaatttcttttcttcttctcgtcttgtctcatattgaccaatcaaattgggcttcatggatccgtcatgaatatatattggaaggtcccagggtttcaattgaattcaatttcttaccttgtttcatctccgctccagggctcttatggatgtacacagtggccgttatagagctgttaatgcttgccgtaccatgtctaatgtggcttaattgggtggaggttcgaacaagaggccaagcgaaatcagcaacattaaggatttgtatcggatttggtgcatttttttctctggatggaattcatggccattgatgcttatattcacattgctagatatggcttgtgtatgtatgtccaacactacatggaaatgcttaagtataaaggccaaaatgattcaagtcatccctaaggtcctcaaagattgactccaatgtgatcaaatccgtgatgttaattgtggagtatgaagctgtcactatatgttgtcatccctcaaggaccttggggacaagtacctcgatagtcagctcacgaggacattgtagaaatatagtcatgcccgtagaatataggctataaagaatagtatttctcctatgatcgtacgttcctgcaaatttactattttgttgtactactataatcactacatttttctcatacaccataactctagccctacctcgcctttctaacatgtcggtatcccaagaattaccagaagacgatgagatccgcgatgtaatcatcatcggtgcaggaccatgtggcctcgccgtcgccgcacgcctaagcgaagaaacaccatcagcagtcttcacagacgaagaacaccagcgctatcactggataaagaagcacagcgggcggatgaatctggtccaaggacgacacggtaagattaagggcgtacgagccgcaaaatgggatagcgaacgccgatgtcctcgtcaagaagacccgagacgtacctctgaccctgcgtctcctgtaccatcactatcttccgcatcgtcgacgtcgtcaacatcctcgacatcatctatctcaactcttgtgctggatggctctggggataaatggatgcagcggtggcacaatgcattccgcacgctggagatcaaacagctccgcagcccgatgttcttccatgttgatcccggagatcgggatggtatgctggcttatacacaggagagtggacgggacgcagatctttgggagatttctgggtgcgttgggaaggagatgagtaaacataagaagaagaagagaagacagggtgggcaaactcagtaagtggtgtccagtgcgaatgtggttgaaacaaagctctaaccatgggatccttgtaagcagaacaattggagctgaaatagacgaacgtgatcggaaagattacttctcgccttccacagaccttttttcggattattgttcgtcgattatccagcggtatgctctggatgagcccggtaaaatcttgcagcgtgaggccacggatctctcgtatgattatctctccgatagttcaacctcaaagctgttcactgtcaccacatctaccggagagaagttttatagtcggtctgttgtcctggccatcggccctggcggagcaggtgtatcgaagatttatccgtggaaaccctcgacggaacaagagggtgctgcagcatgttgtcacagtacggagatcaaatcatttcccagccccaatgtacagaacaagatccagcggcgacaggaaaccaatgttgttgtcgttggaggcgggctgtcgtcagcacagattgtggacatggcggttcgcaagggtgtgacgaaagtgtggttcttgttgcggtccggcatgaagggtatgtataacatccccggtaatcgttgaattttggacaatgtctcatttgaataatagttaaacacttcgacattactctgtcatggatgggcaagtacaaaaactgggagaaagcagccttctggtctgctgataccgatgaaggtatttgttaaaaaagccctaaaccaatctaaagactgacactaatatatttctcagagcgccttgagatgcttcaaaccgcccgaaatggcggcagcattacaccacgctacacaaagattgtaaagcagcacgcagctaaaaaccgcgcctccatccacccttgcacagtaataaaaacccacgactacaatccagtaaccaagacctggaccttaacaaccgacccaccaatccccgacctccctgcgatagactacatctatttcgcaactggagtacgggcggacgtgcgcgagatgccgctgctccgcgaaatgaacgataaatacccgatcgaggtcaagtcaggactcccatgtctaacgaatgatctatcgtggcgggatgacgtcccattattcatgacaggccgcctggcatctctccggcttgggcctggggcgccgaatctcgaaggcgcgagggtgggcgcggaacgtgttgcgtggggcatggaggaggttctgcataaggggcgggatgttggtgggcagtgtgagggcttctgtgggcttggtaatcggtatgcttcgctgcttggggagtgtgatgaataaactttttctcacatcgttgtgaaggatggtatcataatgcacaatatacttgttcttttggactgcagatcatacttttttggatctgtgacgaggtgattggagatagtacgacatttatgctggatatgtacattgcctgctacattcctccctgcattccgtgaatttacgtttcagtcgccagagttatccttgactacccgaggatactacggggaaggctggaaatttattgggtcagaagaatgctgttgatctcttgttctccaaggctgtatactttcaatataagatagctggtatagcaacatggggttgagttgagtctatacggttcgacttcactttttctaggaagcccaatatttgctagagcatataacatggcgacaaaggcagatacattggagaaggagccccctatggagatattcaagctcctaccgaacaacacaaatcctaattggatcaaagatagggggctccgtaaattgaatttggctattgtgttcatgttctccagtgcttcttcggctgggtacaccgcaagtcttgtgaacagcttgtttgttctacctgagtgtaaagtctccatcccgatattgtgatatttatgctaataatgacatagttggtgctatcattggcggactagaccccaatatagttggtttgataattgctgccacttcacttggggcgttagtctccttcgcaccggcctcttatattgctgatgcattcggacgaaagacgtgtattttcattggggccagcattgtgatcgtgggagctatcatccaaaccgcagtcaaaagccactgggccttttttggcaccagagtcttgtccggtatagggatgggcatcgcccagactgcatccccactcctggccactgaaatcgcacacccacggcagcgacagacggccacggccctgtacaatgcatcctggagttttggcgttattagtgcggcggcggttacgtatgcaaccataggaatagcaaatagttggtcgtggagacttccttgtctgctgcaaatatcgttcccgttgttttcgatcctagggttgatcatgtttgtgcccgaaagcccgagatggcttgtgtccaaaggcaggaaagacgaagctctgagtattttggggaagtaccacgcgaatggagacacagacgacgagctggttcagtatgagtaccgtttgatatgcagcacgatcacagccgagatcaccaataccacggattggagctccttcttctcatcgagaggcgatatgcaccgattaaccatctgcgtattagtcggacttatgcaagaatgggttggaaatggtatgtacaacgccctaaaagagacttagtcactaacggcatcgcaggcctcttatcctattacctcgcaccgattctcgcatcagtgggaatcacgaaggcagccgaccaagctgctgtgaacgtcagcctcaatgtctggaacttcctccttgcggtagctggtgcatttgcatcggaacgatacggccgccgcattctatggcttatttccacgggagccatgatcgttttcctgtccatgtccacactggccgctggtctatttgccgaaaagcatcttcctgctgctgggatagcggctgttccgctcctgtttctcttctttggtgcatacgatatcgcttatgcgcctctcttcatatcgtatccagctgagatcctgcccttccaactgcgtgccaaaggcattgctgtcaccctttcggtggacgctgtggcgtgttttttcaaccaatatgtcaacccagtggcgtttacggcgattgcatggaagtattattgtgtctttcttggctgtctgatagtgttcctgggtcttatatacttactcttccccgagacgaaagggcggtctttagaagaggttgctatgattttcgacaaggaaaacaaatcagagggtgacagagaagaccgacaagatacagatataatatagatagtggccatggtggccaatcaaagcctggctgatgttgctgatgtttcccccgcagttgcaacgcgcagttacagttacagcgcgtgtaaattgcaacctctcgcgctgaacatttgttggttatatataactatctctactctttgtttagccctaacaggataaatagaccttgtcagagtcgaaaatcccctcaattattcgtcatattgtcatgttctagatccaaaagctccaaagctatcccaatatttcaaccaaacctcaaatcaacatgaaagaaccaataccacctcccacggcgagtactcccagctactccttctcaccatcgaagcaactgcgattccttgtcatcggcgccggctctcgtggaaacgcctacgcccgtgcagtcacaaccgtaacaccgggtgtaatccacgcaattgccgagccccacgcattcaaacggcgcgagttcggacgaaaatatatatggggcctatccaaatcccatccagagcctcaagagggccaggaattcacagattggcgcgaatgggtgcagtgggaactggagcgacggaagcgggcgactcaaaacaatgaggataacacagcagacataagcccaactcccgtgggggtagacggcgtcttcgtctgcacactagacgaaacacacgtcgagatcctacaagcccttgctccgctccaactacacattctctgcgagaagccacttgccctctcgctggacgactgtctaacagtataccgaactctccaaccaccagaaggcccaaacaacaccccccaagccccaaagaagatattctcaatcggccacgtcctccgctacagtccgcacaacatcctccttcgcaaactcctcctgacagaccgcgcaatcggcgacatagtctccctagaacactgcgagccggtcggctggtggcacttctcgcacagctacgtccggggcaattggcgacgcgcaacagcagcgggcgacggttccctcctcacaaaatcctgccacgacattgacttcatcctctggctcctctgctccccaccctcacccgaaacagcatccaaacaaggccacaagccgcacttcccgcgctcgatctcgtccgctggcacgatgacgcagttccgccaaaagcgcaagcccgtttccgcaggcaacgctacaaactgtctctcctgccccgctgaaagtgactgtaactacagcgcggttaaaatctataatgaccaccatctcgcgacgggtcatacggcttggcctgttgacatcgtctgtccggatatcgaagatgtgttccgtgcccaaggcggcaaggctgccgagtcgctgctcctatcctgtcttgccgaggactatgaccgggatacagtgtcggactcggatatcgctgtgcgaccttggtacgggcggtgcgtctacgaagcagataacaatgtctgcgatgatcaggttgtgacgtttgcctgggatgatgaggagacggtgccgcatcggcttgctaaaacggcgagtttccatatgattgcgccaacggagaaacagtgtgagcgtcggggccgggtgtatggtactactggcgaggtttcttatgatagtacaactattactgtttatgattttgctacggcgaagacttctgtttttgatgtgccgaagccaccaccggggcaggtcgaatcgcatggtggcggagacttcgggcttgcgaagcagtttgttagcgctgttgaggcagttgagggggggttggatgttgaaactgcacaagcaaggtttgttgggtgttcactcgaggaggcggtgcggagtcatgctgtcgtttttgcggcggaggaggcaaggagggaggagagagttgttaagtgggagagctggtggggagagaagttgagggtttctgctgctgcgtggaaggcataattacatagatgggtttgatgatttacaattctacgatgctacgattctatgatacttttgtttgatatctggtatagtataggggacaataatgcatatgcttcattagcttcatagacctggaggtaagccaagacaaactcggattataataaagatgcagttcatctcatgccaacgtatactcttctaatctgatcctgcttttcgatcatcattcttctcgcgtccagatataactgcaaaacaattataaggtgattcccatccagcaggttccacattgaccctaacaacctaactaaacttaggtcttaacgtcaggctcctcgcggccaacatactccttgaacttgagcagagaaagcgccagagagatgttatcagccaggtactcctgagcagtgagaccgaacttggacttgtcggcctcgtagcgctcaacgtacagacggatagtagcaccgctgctgccggtgccggacagacgaacgacaatgcggctgccatcatcaaacttggcgtacagaccttggttgctggagacgctgccgtcaaggtcggtgtatgagaagttgccagcgtcaacgaccttgcgaccggcgatttccgagccaacgaaagtgtcgcggttggcaaccaggtcggacagagtgccaacgaccttgttggcgccctcgctgtcaacgttctcgtagtcgtagcgggtgaagaaggtgcgaccgtatgtctgccagaactcgttctggatggagccaatgctaggggtctcgttgggcttttgcttggcgacaccggcaacgatgttcaaccaggccacgatggcccacaggccgtccttctcgcggatgtggttgctgcccgtgccgaagctctcttcaccgcagatcgatatcttcttgtggtcgaacaggttgcagaagaacttccagccggtgggcacctcgtagctctgcagaccttgagccttagccacgcgatctacggcaccggaagtgggcattgagcgggccaagccgtatacaccctgcttctggaagtacgggatgagcttggcatggtgggcgatgatggccaagctgtcaccgggggagacgaaactgttggcaccgtagatcatgttacggtcaccgtcgccatcactggcggcaccgaagtggacgccgttcgcatcgacggcctccacgagctcgtgggcgtacacgaggttgggatcggggtgaccgccgccaaagtccggcttcggctggcagttcattgtgctgctggcgggcagaccgagctccttgacgaagatatccacaccgtagggaccagtcacaccgtgcatgccgtcgaacaggaccttgaagtccttgtgggagctgaggaactccttgatcaaatcgaaatcgaagatctccttcatcatggtcacataatcggcggtagagtgaacgatctcaacctcgaggggaccgtagttcttggtgccaatggtggaggtatcgacatcaggaacatcgaggtatttgtaggaagtgagggccttggcagtctcgaagatcttgttggtaatgccctcgggggcgggagcgccgttggccaagttgtacttaataccaaagtcgttctcggggcctgaaagtgtttggtcagtctccagcagatctcgtaatactcccgaccatcacttaccaccggggttgtggctggcagtcaagaggatacctccagttgccttccgcacacgaatgaggttgctagcagccggggtgctcataattccatgctgtccaatcaagatcttcttaacgccataggcggcactgatctttgcgatcttggagatgacctcggggttgtagtaacggccatcgccaccaatgacgaggaaggaaccctcaacaccctcgggaatcgacaggagaacactagtaatgaaggactcagagtagttgtcctgctggaagaccttgaccttcttgcgaaggcctgagctgggagcaagttagctagcagttcaattgtggggcaacgagtaacgtacgttccaggcttctgatcagtgaagggctggatagagactgtctggacagacatgatggaataagattggaggggaagaggtacttaggagaataggagaagaggggaagaagttcgagaagttcaccgacttgttgagctccacggagaggggccaacgtttggcgtcatgtgttgatcattccgctagtactcttgtagtactttgccacaacattttaatctacttcgtatgtactctgtacagcccaaggctctgatttgttctattcagtctaatctataagttgttcgtcaagttactcttagaaattgtccatcgcaggtcattccggcgggggaagcaagagcctgcgtcttgtacaacaacattattccaaagtatattgtacactgtatggagtcttctcacattagggaaatgtagccgaaaacaatggacaagttcaacatgcagagttttaaactacttcccagacatgtctcagagtaacagagaaaagcaagccaccaaatcagccacaccatcacttaaacagcttctctttatagaaccggatctcctcaatactctcaagaatatcatccctagcgagatgaacctcccgcttaggcggtacctgctcaagcagttcatcactcccccatcttcgcgccgcctccttcaaggaactaacatctagtatgcgataatgcaggtgatccagcacctgcgagtacggcgtacaagcaaggaaagccttatcggcgtgaacactgttgcccgcgaggagggcagtgcgcgggaccgggacatgttggcggatgtaggcgaggagcgagtctgcggcggtggagggggaggtggtcgaggcccgcacggcagcggtgaggcccgtgcggccgtgtgtatcgatgcaccactgcgacatcgcgtcgagggcggagtctgggacgtggatgacggtttcaaagccggtcggttcgaggaggtttagttgggcgtctgtgatgaaacagcagatctggatgattttgtcggtttccgggttcaggcctgtcatcttgtgaatggggttagtggtgagaattttgaaatgcgctgtagcagggtttggatcggagatgggacgtttagacgtacctcgcagtcgatccagaccaaagggtctgtcgagcgttcgagtggcatcgtggatttgtagcggataggggctcttcctggctattgaagctgttagtgattcgaggttcaattggggcttggcagaatctctctgacttggtggagaaagccgggctggaccagaacaccgcggaatgcagatgcacgtagaaagatacttctgagcatggatgtgtagttgaggagtttgaaataggtagatttgtctcagctatagcctacggtttagaagcttatcggggtttaagccggtctagtaaatgcttgacaaacgcagtcagacggacaccggaaaccttttaaaatatacaatctacgatgtatacagtgacttctctcggcgtacaacgcctagttcagccttaaacccatgatcaagctgccctgatcggtgcagcaaatgtatttctccttcaacatgttccctgtattgtaagtagtggacataacggcgtaattgtagaaaagcaatatttatgaccatccagaagacccagtaaatccaacgaagatcccgcccactcgcagaatcctatctagatccataggacgcagcaaaaacgaccagtgctttccaaagcgaagagtagtagcctgtcaggcccaacggctcaagcgagatctcgacatcagatgtaacctattttcgacgatcacagaattacaactcctcatcatgttctgggggcccagcagaaagatcaggcgtaagactgaacccatcaccgaatatcttcggactggtgaaagttgattccgttggagcggaagagcctagagtttcattgattctaccggactctgcgatccggcgtctaagggcattctcatctgcggtcgagacactcccccgctgttttttcagtggactaccgaaaaggccatcttctggttcaacggctagcagagacggctcggtgaggtgcccacctgcagatccagctgcggcagcctttggcggtgtttctgagcgctgttttacaggaggcgtagatccagttccagaagccggcgtatcggcagagtcaccgacactgcctccaggtggttcggcggagtgctgacgcttgagctgtgatgtcgttagcagagaattcatagaatgttagaatgatacctactcgaatctttcgcaggctctccgccagctctccctggcgttgaatatcatcgggagagaggaaccgatcgtcatccttggcttcttcgtcgtctgccttgccaagtatggggttgtcggtgtcgtcatcatcgctgtccatatcgtcgacgctcttctttcccttccgcggcttggcttcgctgtcccggaaattaaggaatccaacagagccaccaggtttgatagggccgaggtttgcaatatcagcttgtatggacttgcgcttgctggcagcaggcgtctcttgcactttggcatctttcaagatacccatcttttgcaattgacctatgttgatgtaaaattagcaaccattcccatcaagagcgatccaggcaatacttacgctcaccacggtacataaaagtgaaaacagcgtatggtttatcagacgggtcaataccagtaacagtctgcgtactaatggtctttgggtcgagtgactttggcttcgcgaaacttgtggtatggtcaacatcggcgtctcctccaccgctgttatcttgaccaccctcctcatcgtcgtgcgcatcaaattgcggggagtactcgccccgcttgatctctcccgatgccaaaacccggaacaaagcaaccttaatctggcccgccgtctcaggaattggatcatcgtcgtcagagtcggaggagaggtcatcatctgaaacatcctcgaggggcgacttctcgtcatttccgtatcgcataatactcttggacttggcgggatggttgtcctccatttccatgacggtcgggtcctcgtcagcggcgcgctttgcacggcgcttctccatcttctgtcgcctgcgttcaatcttggctgctgcatccttcccttccaggtccagtccgttaagccagcgctccagaccgacctcgcggaacaagaactcgcgctcggcaattcccccgccttcgctatccggaacgctgacccagcgtgaattcacccaggtctcttcccctcgtcgcagtagtgtagccacctcctccttttgtcttccgtcgaagtagatgtatgcagccacggtctcgttcgccgaatttgtcaagccctggtatggtgcgaccgtcccggcgatttggcctgattcaccggccaatttccctgccacttttggtttcggccaggggcaatctgctgtcggctttggggtcgagtacgggacatcttgctcggggtttaggagggtgacggaaatggcgaaggttgattgttccgctttgccggtcccagatttggggattttgggtggaggaacggggataaaacaacctatgcgcgaggctcgagaatggcgttgaatggaatattcggggatcgggccatcgggcgtgtgaatgctcacggcaagccctttgaagcagggcatggtgggaatgggttaagtggaatatgggtgttgcactgtggggagaagactccaataaagacgcagggccagatctgccccgcaactaagacagggatacttcaggcaaaaacacgaaaaaagtgacgccaaatggaggataggcaaacttctttcttagtagtttttttctcccctccctcgtggagttgaaagaataagctataggtgggaggcggtcaaggtagtgggtttccacttacccagcagcccacagcagttccttgagctccactgcagctgctggtatgtttgtttctgggtttcaaaatggagggtcacgatgacgggggggtcataaatatcctgaggagtggtttgaacacacgacaatatggcttccgggctcaaataagcacataagacgtcgaaatgcgaacagaggaatggaagtaagaaaagtagaagtgagctctctcaaggacaaaggtgaggggcggaagtggaccaaaacatgagcgttgccatccccgaactcccacgtgataatacctatcaagcctatagtagcctacagcatgcctacttctctagtcatcgatagtcgttgatggtctatcccatgactctacctggtgaaataccacgattcgcacctatttatctaccaaaaccatcccagtcatcgcaattataccaacattcaacttgtccaggtcatatctccacatcagctgatctcccagcaaccatggattctgcgaaaccgtgtggagcacattttcccttctttggggttatcccgccgatgggagtatataccctgcgaaatcttttatcttttctaatatctagagagggtcaagtctttaacaaatctcatttgcattgtttctcaattgaatattcaaagatcgggagctagatgcaacccggggaacaaaaaccgcaatcggaatcaatccgagtcatgttgaccagaccgatttacgactttccgtggtcagagaaaacactctgcctccgcgacaagataacatcctcgttagcactcgcaagatggtcaaacttgtagagaggttccagctcaacattttgacggaaaatgtagcgtctgaaccaatacggcagcgccttggtgacttgatacttcatgtggacccgagtagggactgcgaagatataatccagttcttcaagagtgcgctgcttggtttcgggaacccagaggaaaatcatgaccatggcagttacgttcagaccactgaattctaccgttagatatttggtgagaaacttgcaatatgggtagaaagacttacgcatagaaggcgaatgccccagtggcagtcattgcactcaacattttggggaacgtgattgagagcacggcagcccaacctaggcaggttgccacggcccaggacatgccaacctctgataccaatgttagttccagaaacaatattaagggaaaaggggaaccaaaagtgagaaacataccacgatgggaaagagggaatacctccgccgaataagtgaacggcacgggtccttcaccaggcgagtaaaatgcggcgaataggaagacaaagaaggcgatcgaagcgagatgacctgtaccctcgggggtccagaaacagaaagcagcgccaagcaaagtccatgccatctgcgggaaagtgaacaacaatagagtccgacggccatatgtatcgatggtccagatagcagggaaggcgaacacaaagttaaccaagccgaatccccaggaagcaaacaaagcctgtgtatcatttgcgccggcgttcttgaagacagtcgacgagtaaaaggcaacgatgttaataccgcacatctgctgagcgatcatgacaacaaacgaagcaagagtggcacggcgcacacgaggaatagtgaagagctcgacgaagcgggtaacatagttactattgccgattaggtccatctcgatcttgatctgggtatggatgtagtaaagatcacgggcggcctgcaaaggtgtgttacggagacggcatagggaccggtaggccttgtccatctcgccacgtcgaatgtaccagcgaggcgactctgggcagaagtaaacaccgaataggagagggatggctgggatgaaggccgatccgagctgcagacgccaggagattttacctgtatccttgacagcaaggttggcactaaatccgaggaaaataccaaaggcggtccagagctgccaggacatgaccaaaccaccgcggatgacagcaggagtattctcggcgcagaagattggaattgtcgaggccttcagacccattccaatacccaggaggagacggaccacaaacaactgtatccagttctgggtcaccgcagagccaatgggagtaaggacacagaagatagacgcgatgaagattgtaccgcgacggcctaggatccgattgcaggggtcggagagccagcatccaagacaagcactagcgatgtatggagcagcattgacgataccaacgagccacaagttccgattggcgtgagcactcttctggggatcttctgaaataccaaaagcatcggggaatgacaggttagcaccattggagccagtctggtcccaacctctgtatttctgttagggatgtacctagtgtgtgtactgggggaatcacatactgcacggctgcaccaatagagcacagaacaatggtgaagtagagtgatctaggctggcgccatttgtgagccacttcgtcacgtagggcagtgagctctagctcagtcaagtctgccactgtctcgaactcggcagggtcacgcgcaacaagcgctccttttttcaactcaggtaggatgtttgtgacgttgtactcctcagcaaactcttccacgttgcggagtacctgagtcttggtcaagtcggccaaggggttcttgatcctggttgatgttggtacactgagagggaaaagagatatatgacaggagaatgaaatgagtgaactttacctagcggtaacattgttctgaaggtcaacttgctcaatgtatcccttctcggcgctgttttgatcattgctggaactattggaactgagatgagcattgcaaagaacataaggaagatccaaatcttaccgctggccagaatcgacctgagtgatgacctcttgaaccattttgacgattgcctggtcaagctgttgatagaaactaagaaagaaaccagagactgtggctgagctggctcttttgatggaaaaggggaacagatgaaggctgatagaggagggtgatggagaaaggatggtagaagggtgatggagaaagggtaatagaggaagggtgatagagagaaagagttggaaacccaaccaacgatttcagttaccagactagttcgtttgatagtgaatcaggctccagagacaaacaaaatcgtgaatggtgactattttattgaccttgggggaggggcaccttttatatccattgaatcttttctcagaccagtccatttgaaaaggtgcacaatatcattggctagaataaaagatgtcaaagcctcacgagtgaagctccaaggaacgactttctacttcccgaaacggaatgaatctggggatccgcatcggattgcccacggggaaactctaaagtctaagaaaaatggagacaaagccaataccccagacttggtctcggcaaaatactacattgaaagtgctctgctaccttggtgaacaaggctctcggcccaagcacaactacatgcagccaatgatcctccaggatttgtcgcttccgatcgggatttctgtccagaccggttcaaagtcgaaaattaaagtaagccttctaccgttaagccccaggtatattctctttcaattatgcggtacttgtctccatgttatgcaatcagatcttacaagcccatccataattcctgtcggatacagatatgaaaagtaattctcgcgaggtatcagggtcgccgctctcgatattggcgtctcagggcgagcgccacattcgcctctagacaggggccagaattgtgattggcgaaaaggatttaggcatatggctgagagccagtcattttttggcgctaaattaggcttaaaccacgttcgggcctgtttccggcgacttcacagggctaagatgttcacgtggtcggcatatttgcctttgagcccgcatcgagacccaagtcccctcggttataacgactataaaaaatgacgaacatttgaaattgagacattttccgaatccagtagagagagggagagggaaaaagtggaaatccggggcaatgcgggggatatactctaagggcagtctatcacctcggggatgaatttccctctcggagcccaaccacggtatgagggaaatatcggaaatggtactagggtttcatttaatcccgatccctagtcaagttatcccggtccccttcaagccgtgtgccccataagcgttagttactggcattaaaacaagtagccccagacacggcaattattccaacccgataagttagtcccggaacatggcgcgctgatcctaaagcggcacattgaaagatcatcgccatcatcactcaatttactgtgaccgcccccggcgatatctcgaggttcgagcgggccgcgtctagggttgcatcgtcaaggtgctcgtggctggccatgtggagatcaacgtgttttatctggggaaatattttgatatgcttcggtaacctctcaacgccccatgcgagtcatgacatcgatttgtggcaaaagaatactggctacatcctttcttgtccattttcggcttgtcctgcaccgttcaaagtattttgtgtttgacatgtcagatgcagaatgccccttggcatattagttaattctatgagccaaatcctaaactagctcttgatgggaagaatagcatggttacattgccgatcaggcgtccaagcgtagtatatgtaccatgtgccatgctagatcctgggccatgctatcccgtatagaagggcatctgtccttccaggaagggatcgcccttgcgggtgcctgcacaccctaccatgtaataaactgtcgaattgcatggccaatgcatccttaggagagcgtctgtgtgccctgctgcaaggagcaaagcaaatacagaaataagtctccaaaatttcaccatcccattgttctcatctacaatactcgcaggtgggatgttatacccactttgcttcgtgcggaaaacagcttcaaaaagtcgaaaaatgtaagttaagagtaaagtaacaaggccaacataccacttttataaccgcccaaggtaggtcgatgcagtttttaaatgtgaaatcgtagtgtttgaaaagaaccgcttattcttcgacatcgaatcgggataagctagtaaccaaattgctttttcctgatggaagtgttgccttgagccaaacaaagaaaatgacagtaacattttcctccatgtaaatcgttggttcctgtacatgaataaaagcctagtcaacgagagctcaaaatgaattatctcaacaatgttgcttttgcagttcctcttggattgaatagcgcgaatctcgacatggtcagatgtatgttaccttagcaagattgcatatgttatatatatctgattatatctggcgatcgaacttttccttttccgatttactgcttctcgttgagtgagaaatgagctaggatttgtctctatcttccgataggccagttagaactcgcagcgattcgaaatgtctcgaggatggcctcgagctgatccgcgagagaaaagatggcaattgtgctgccgtgcatgcgtacaagcgcttggtaatcgaagcaagggtctaccatctttagtctcctcgcggagggagtttcaataatcgtaacagtcgtctctggagaagtgatctgaaatagacctacggccatctggcagattagatagaacttcccattcccctcaaagatccccctcccacatgtggatcaccatactttggtagcacagcatatttgaggttcatctactttgatacataatgaccagaactacatagaggtgtaatagattgaagccaaataaatatttaatgagacacagttgaatacttcgatattcagtcaaccagtgtgatatgacgtcatcttatctccgaggtcatccatgattgtggagagctgacaaattagaatctatgagcttcttataactacataagtactacttacttgcttccttaattattccagatgttctctcgttcactgaaagacttacctcgattatctcacttcgcgtccagatttcacccatattctactatgtcttcaaacattaccctatatacctggcccacgccgaatggcatcaaagcttccatcaccctcgaggagcttggtctagcttataaaactgaaggccttgatatctcctccaattcgaatccccaaaaggaagagtacaactacctctactacacaatacgacatgtcacataagctgatgaaagcccttgaacagatggttcctgaagatcaaccccaacggccgcatccccgccctactcgatggctcgcagcgcgtcttcgagagcggagcaatcatgacatatctagtcgacaagtatgacaccgaccgcaagatcagttacgcccctggtacctcggagcacgtcgaacaaacatcctggttaatgttccagatgggtgggctcgggcctatgcaaggtgcgttcaaaatctcttgtacgtgtgtttcaggttctctctcacacccaataggacaagcgaaccatttccgtctcttcgccaatacgcgttccgattacgctatcaaccgttatatcaacgagacgaagcgcctcttctcggtcctcgaatcgcgtctgaaggaaagcccttacctcgcgggtgagaagtatactattgccgatattgcgagtttctcttgggttcgtggtgctcctgtttccttggagattgatctatctgaattccccgctttgaaaaagtgggtcgaggagattgataagcgtgctgctgttcaaaagggagtcgatgttcctcattcgactaggactcctgagcagagagctgaatttttccggaattgccgggccaagattgatgccatgaccacttctgatcagcattgattgatggtagtatattgggtttctggtcacagtgccgaaaaacaatagtacaaaggaacaagtcaagctcgttgcaacaatatcataacattccttgcatctaggagtgatcctatgtcaaaggtctgaattatacatcaattcctcgagtaaccaaattctgaacaataaacaaagaggcaatagcaattttgaatagtcaaagctccccgggcctgtagcttctccaggtcttgaacccaacctgctcataccacccgtcgagcgcaacccagtctacaaagacaccttcaatgcctcgctgcttcatgttttcaatagcatgacagatcaatgccagtccaatgccatgcttgcggtgtgattcatcaattcctacggcaccaataagccctgtgtttggaccacaggtttgggggaatgcccaagacttgttcaaagcatatgatggaccgagcattagtgtccaaccaacctgctggccgtgagagtcgaatgctatcatcacactgtcgggatacttgtcgggatgtaaagcgacgtatgcctccacccagctcttgataaaattttagtatgaattccaacaaagtacaagtggagagaaacacaggagtcttacactgtccttagagaagttttttctttggccaaccaaacaggcctcgtaatcttcgggttttaatggcgcgaagcggaagcctcgctcccgggcacgagtgatatacttctctggcgactggaagttccgaatatcttggtacaaatcaaccgaccgggcactgggagggctgagtcggaaaccacggtgagtgaagaaatgttgcactgtttctggaaggtcctggggtatcccgggccaaaagcgggggaatgagctgcccagcttcacattattgaagccaaaggttgcccggaagtatgctcttgtttcgtctagcaaggcaattccaatgccttgatgttggtactttggcgacacggcaagaactgcgatatacacggtgtttggtgcactatgggcatttgtataagcaagacagaagcctactagctgcgatccaaaacgcgcgatgaaatggtgaccatgcgggcgtactatcagagaccgcaaactttcagcgggaataaggtaggtcgggagagcagcggcccagacttcgaccacctcatccagatctctttgcgcatcaaatggcattactaccgcagaggtctttgtcgaagcattaatccccagcggaagagcacctgttgggactaatgctccaaacatgatatcggcagccacagaaaatgcctcgatggtcggctcgtatgtggtaatataggtcttcacactaggagcatcaaggaagtcgtaagggttgcaaacagcaatatgcaccaatgcatgaacacgttcagcgagttccaagcctaatgactcctggtatggcgactctcttgcattgaatgaagtgaaaatcaccacatcagcgacttcaagggttcgccattgctccgaagtcaaaccggtcgctccgtatctgagctccgcaatggaattgttgtgttgccgcaagacatcaagatatctgttagactgatataatcctggcctccccgttccttcgccgtcaaccgcaccaccgactgggatattatctccagggaagaggaagatgatgattgaagtctttgatagggggagaatgccatttttgtcacgaacgagtgtggtcgatcgagaatatatatccatagtcgtctcggcaattctattgttgagcgagttcaagtctgcgagattagatttttgaagagcgacatcccagttcaaaaacttgtccttcaccgtagcaacatggcgacaagcgtccgccagtcgtgactgctcgattctgccggactttattgcttcacaaactgtcttgatcgatgctacctgcacatcaaaggtatgacagatcatgatgctatcgctgccagcgcgcaacgctaggaccgagccttcttctgtaccgtatgtagagcggattccatccatctccaggcagtctgtgatgatcatactatcataggccatgtccttgcgcaaaatccccataacatccggagaaagtgttgcaggccgcgtgagatcgatacagggcagcgagatatgagcagtcatgacggtctcgatgccttcagcgacagcccgcctaaatggaatcaattcgcaacgctccagctgatcccttgttttgggaatcaccggtagtccataatgcgagtccacagctgtgtctccatgacctggaaaatgcttcacactagggacgatgttttgctcccgcaaaccccgcgcggccgcactcgcaaaccggcccacaaattcagggtcatcaccaaagctgcgtacaccaacaactgggtttaagggctccgagttgatatcgcacaccggtgcatagttcatgttaatcccgaagaaactcaaagtttcccccgtggctttccccgcactgtaggcgcactccgggtcatgcgtggcgccgagtgccatggcgcctggtacttgagcagcgattggcggagatatgcgagtgaccaacccattctcctgatcgattccgatcaataatggtcgctcatgtccagccaatctggcttcattctgtaaagctagtgtcaaggcctgaagaagattagtcacgcgtcaagatacttggaacctcggatatcgcacctggagctgttctgaattctcaaaattgcgcgagaagagaacgatacctccaacgtggtagtcatgaatcaaaatcttgatttcgggacttggggtgcagccatagaaccccaccgcgaagagctgcgatcgtcagtgagattcacaaaacaggggtttcagagctcatatacctggccaacctgctttttaagatctgaagaaaccattctgggtttgttgattttatttggatggtctcatggattgcagatggtttaaacgggagtgacgttgaaaaggatcggagttgactcggtgtccacccgtgaacttgatgcaacattgcacctacacttgcgcttgaggatatttcagcttaacctcttagagtctagcgaaagccaattgcgattggaacatttgaatgtaacaacatctgatataaaagataaggcaagttcgatggatgcggggtaggtaacctccagggcttgataggagatatatatcttgcaagtgatatctcgtccaacttgaactaacacttgcacttccaaaatggctgaaattcatgaaaatggtaaaaaccccacgtcggttcaggtggccgcctcacagccacattctaccttggaggagtatgaacagctctttggcgtcgacgaggacgcgtatgagcagccaaccaccactaggaaagaactatggtcctattatctctattacaatggcgataacggtgtcggtccgggatcgtacagtcaagctctgtatgtacaaatggcaacgctggaatttttcgactaatcccatgaagcttccagtgggccttgaacggtgccggacatcaacctggctcgaatccacctaaagcctgcaccgattcatcggcatgtgtagtgccgtgggcgggaggcacgagatcagtatcttccgtggttcttattgccaatggcctttgcttcactttcatgacagtgatattcgtctggctgggaagtgctgcagactacggaacattcggccgatggcttcttctggcattgacagtggtctgctgggcactgcagtatggtatgatgtccatccgacatccaagccagtggccaacggcgatggcattgtacgttgtttcatacattgcctacggcgcgacgctagtattctatgctgctgtatttccccgtctggcacggtatacgccgcatgtgcgcaaagcgagagaagaggatctcagagagggtaagatcaaccaggaagaatacgatacggttgaatcactggagagaaatcatatcaggtgagttgggaaactttgagctcctggccaagatgtcgctgacgatagtagcaacatttcaactgcacacagtaacattgggtacctattcacgctcgtgcttaatcttagcgtcctgcttccactccaaaacaacactttctcgaataacctggccctctgtcttaccaactcatgtaagctttctgagcagtcaatctagtgtgggatttatctaacgttctacagattgggtcgttcttggcatctggtggtttattttccagcaaaaaaggccaggtccaaagataccaaaagggtcaagctacaccaccattggcttcaagcagatctggctggccattcgggaaattcggtctctcccacagacatttctgtactttttcgcctatttccttcttgccgatggcctaaacactactggtgggttcattccttctttgcttgctgcaacgagactctatagccccatgtggacaagggaattcactaatatgaattattaggtaccctcgtcagcatcatccaaaacgactccgtctcgttttctttcttgcagattacatatctcggcattacccaagcggcctgctcgatcacctcaacattcggcttttggtatatacaacagtacttcaaatttaagacgaagactatgttcttgttcacaaatttctttaccgttttgatccccttttggggcatgctaggactatggaccgatcgcatcgggtatcacaacagggtatgtatcaggccccaactgagagtctgcagctaacagccatggagtgggagttttacttctacaatgtcatctttgggcttttccaggctccatactatgcggtaggtggaactttgaatggtcttcaacacaattcctgctcccatagcttctaatatcgtgccagtacgctcaaacgatgatcagcgaattgatgccacgcggctacgataatatgtttttcgcactttttggaataaccaatcgcgctgtaagtcggatgtcttgaatgttatatttccttcgaatcactaaccttctagtcttcaataatcggtcccaatgtcatccaagccatcataaacaatacccacaacaactggatgggcttcccatttttgtttgcaatctgcgctggggcaatgatcgctatctgctttgtagacatcaaaaagggtcgtgaggactgtcgagaattcaccgaaaagcgcaagatagatcgtgtcgtggcggagagtggtctagatcccgcttatatcgcaaaggggaagcaatcagctcgtaacgaagatgtccccgaagtgcaaaacgagctcgcaagcacttcggtgagggagtgagcgtgtgtattttgcgaacatttgagttgttattcttcagctctcttttagtctctgttttgatatgtcacatgctatcattaagtcttacatagatgtcatgtctccaacgagatattctaaatcgactcttcatgtctcagccttttttgtttcctgctgtatctccttggtgctctcctcgaccttacgctggtccctcttttcgaccttgtcccgccattgatcgccgaaaacagtcgtgagccatacaccgaccccggatacaatcaaaaatagggcgctgatggtactaaaccaccccactcccatgctctctatcgccggaagaacaagtccagaccccagagcaccgaacacgtaccgtgataggtagctaccggcaacgacttcagcactccggccgcttgactgcataacatccaggctgtaggtattgagactagggaagcagaacagctgcgccactccctggaagaacatcgcaagcacggggactggaattccaccaacagccttatcgaccgtccagccgtagatcaaaatacagccggggatgacgacacccaagaatatcagacaagatttaagtctgtcttcggggactcggacaccaccgcgcttgcgaatccatttcttcacagtgtggtctgcccaccttccacccatgagtgtgccaacaagataaccacagcctggagcgatgtaaaacagtcccgtctcgatagggctagtgaggtggaagcgtgggttgagtacatatcgaatcggagtcaacagagagtactggttccaaacgagagcgccggcagcgagacccgtgcagaagaggttggggtatttgaatagcatgatagcaacttggaggggagagatccggtgccaaaggtatttggctttttgccacgtcgtcttgtcggctatgtcgcctttagtcaaattcgggtaggtttcagggaaaaagaagaagacaagaagcgtgccgcagcctccaagagcagcctggagccagaagatcgctcgccatgagcgaaaggtgacaatcacgccctatattagtagatcagcggattgtctcggcgccggggttataagatagacatacgccaatgaatggtccaaaggctggcccaaccagggttcctgacaaaaaccaccccaacgctgttgcccgcgctcgaggttcgtatacatcacctaacgccgagctcccaactaccaagaaagatgttccttggaatgcagtcaagacgcggaaaatataatacgctgggaggttgggtgctagtgccgtgccgatgctaaacgcgaaaaataagaatgcgctcacaaggaaaacctagtcccaattagcatgttacttcaacatgaacatatgctcgttactcaccggacgtcgcccccaaacctgactaaagggcccccaaaagggagccgcaatgcccatgaatgccatatataacgcattgctcgcgtttatcacacttcctgtggtgttataggtcttggcaacttcaggtataccagctaagatagaggtagaagagataggtgccaggaaagagcagaaggaaaggatcccaacgataatgaccttgcgtgctggtgaaaagcgtagatattgctctgcgttgacctcctggaagtcatcgttgacaaccatatcatgatgtgaaacatggctttgtacgtgatcaagactattcacagctccttctcgctgtgagcgtcgggattgggatctctgaatttcggtttcattcgcccaggattgagaccgcctgtcctcgctggaagctttcgaggtagttggagacatggcaggaaccttttagcaagagcaagtgcgtgctagcttgtggtaaatcagatccgagtctatcgcagtgcagatgcaagatatgaaaaagaaatatttgcaatcgttcttaaattcggcttctttccgagatcatgctcgtcgggtagatccgtgaacgcagaacgtcttcaattgaaatagtaaaaagtgaagagatgaaagtgaatgaattgagtctaagcaagtcaacagcaacgagatatatcgcagacttaaagcgtgagtcagagaaatttgaatggctcttttccctatcatctggaaggatcggcgggttgcttccgatgtagcatttctagaggccagcggcccccgaacagagggcttgctatcatctctgggggtccattcttcccagtttagaggcgatagacgaatgtgattcggggagaagaccggcgggtttgttgagtagggcagaggggcggaaaagaatccgggggctacgggtgccggagatacggttaatccgtacggagtactagttgggcatggaagacgaagaaaaacacctaactatactataatgtatgttgtaaatcttttggggatcttataagctaatagatatttactagcttttttcaaattcaggctctcattcctcattcattttgttacctagtactgacccactacggctagtgagatgggagtctttcacatgtcgaacagatgctagtatataactacctacacgtaactaactacgtaattataaaataagtagttaactagttgactatttagttagttaactattgatcatttaataaaaaaactctttcaaaaggagtatctggaagaatgcctattctggtgttgtggctgttcagcccctgcccatgacgttatccccttctgaccgccaatgaccgactttgtccctctacctacctcccccacgctttttgcttttgtcctggagatttcgagcccaatttaatagcttgcgaattcattcttattccaaaatatgtctcctcagagtcaggtccctgctaatagcaagggctcatggacaagtttcctaaaggtatacaggctcattttgttcgagtatacctttgctaacaaatttccagtcgattgcctcctttaatggcgatctatcctcgctgaccgctcctcccttcatcctgtctactacctctctcaccgagtattccgcctactgggccgaacaccccgccctcttcgtggcaccagctaaggaggccgatcccgcgaagcgtgctctgctggttctcaagtggttcctcagcacactgcgccagcaatactgcagccgtagtgagaagctcggtagtgagaagaagcctttgaacccgttcctgggagagctgtttatcggcaaatgggtgggtgacgcggaagtaggggagactaccttgatcagtgaacaagtcaggtacgcgagaccacttttgtataaaactacaacccactgattgaatactagccaccatcctccggccacagcctacgctatctgcaacgaggcaaacggtgtcgaggtgagtggataaagattgtaccaagtcattgagatgttaataactgacagtacaaccacagctgcaaggatataacgcgcagaaggcctctttttctagtaccatcctcgtgaagcagattggccatgcgctgtacactctcaccaagcccggatccgacgataaggagcaatacctgatcacactacccaacctacacatcgaatcgctgatctacggctcgcccttcgtcgaattggagaagtcaaccaagattgtcagcagcactggctatgtcgctaagatcgactattctggtaagggctggctgagcggcaagaagaataccttcagcgcaagcttgttcaaggaaagcgagggcgagaagaagcctctttacactgtagagggccagtggtcggataagttcattatcaaggacgcccacaccaaagacgtcgtcgacacctggagttccaaggaggaccccgtcactccgctcaccctggctcccctcgagcatcaagatctgtacgagagccgacgtgcctggagcgaggtggccgccaacatccagaagggcgacatggatgccgtatctgggaacaagtcgcgcattgagaccgctcagcgcgaacagcgccgcctcgagaaggaggcaggccgcgagtgggagcgccgtttcttcagccgtattgaggagagtgccgaggacccccaaatccagcatcttgctaaagccatcgatcttcctttcgaggccgacaagactggcggtatctggcgcttcgatgctcagaaggctgctggcgctcagccgccataccacaagattggcggcgagggtctcggtctcaccgagtagactattgctgggattggacaattctctgtcgccctctgaatttttcttgggacctagcttgcacaacatagatttgacgtttttggattcctattctgcaccgtgtcattttgcatttcgattgtatatagttcccggtccaggttgaagttgaagccgcgcacttgcttataagcttggacggctcaacttttccatataatgatatggtatcttgaaataattgatagtttacatctttgaacttggtgaaagttcatgtcgaggctgaatgctgcgtcaatgacgaacaactagtacctccgtgactacgagaaagctacaatgtacaatactagaacagtctctatatataggcgccacactggacagtacaggacatacataattcatgacacttttagcccagaacgcaactgggcattggatctacctctaccagacccgttcagccatacatcataatcatcgaccgatattgcacatggtgagggacaaagacagaacaacagaagggagaagtaggttaaaaaaaaaaaaactggaaaaccgtccgcggaaacaattgacacaccgtacccgaatagacaccgactaggttatagcgagaaaacaaaaaagaaaaacagagaaacctagagaggaattggtgaatttaatacagagaccgcatcagatgggagcagtggtagcaaagaaaagcaagacggctgagaggaatggcaaggaaacgagaaagaaaacaaataaacatcaagaagacaatcccccaaagtaaagaaaaccagccaagctcccccaaaaaaagagaagtagagattacacagatgttgaggagagaaagatgaaaagaaatcgtctgagttctgtctgtccttttgacaagacattagaggtttctgtccctgtaaagtggacaaagaaccaaaccccttttcaaatcatccgcaaatgcaacgccatatgtgtttggtgggtcattatgtctccccttcgtttctttttgtctttttagtggccgtagttgccaccccagccgccacggccagagttcgcatagtagttaccgaagcctgccccgtagttgttaccatagccagaggcctggtgagtctgggtggccgcaccctggtgaccgagtccaccgagtccaccgtactgcgggtttagctgagggtagctaccgaaggactgctgaccctgctgaccctggagcgggggaagaccagtctgtgcctggggctgacctgggacgctgttggtagcagatcccggacggttctgggcgagagaggggctaggaccaccggccttgggagcctcaaagcctttggtctcgtcggtggcaacggggggctgtccggcgatgggaggatttgggccgaagctgccctgggaacggctgaaaacatccgacatcccagtaccaaaggcattggcgccagtagcagactggttatcagactgctgggcggagccagtacggccgtagacagagtcgcggctgggcatggcctggctgaagctaccggtgtttgcgggggaagacgattgctggtcataagagaaagccccgtggggttggccgtacatgccacccttaccggcatagggaccatactggctaccatagccgtattgctggttatgctgctgttgctgctgcatgtagtgatcctcataccggcgagcatcatcgtacctcgggcggttaccgccaccgtattgctgctgctgctgttgctgctgctggcccatctggttcatgtaagaagcgtagtgggggttgttgtagtagttaggatattggtagccataggcgtgctgctgcgcactttggccaggcatatgctgagcagtgggagtctgctgggttgcaccgggaatggtgggattgggagtgttgtggccgctgttagtggcgtcaacagggccgtagcggttaggaggctgcgtggtggtaatctgagcctgggcctcagcacccgagacaccaaacccagctccggcgcgaggaccggcgggggcgtcctgggtctggccgtaagagccataggaagcgtagtaggggaaacgctgctgctcagcagcgtagaaaggagagtactcgctgccggtggtggcagtaggttgagcaggagcctggttggcgaatggctctgggatctgcggctgcggctggctcacctgttgggtgaagggatcgaatggcttctgctggggctcagagtaacgagcgaagtcggtaaaagagtcggcggaagcaccctgggggaccggaggcaaaccaggggcaggacgcccaacggcaccagactccattgagtggggtgcctgagtcgcgggtggaagagaggcacggggggcaacgggggagtgctgcgggggctgagcgcgggtctcggcctcctcgcggttttcatcgatgtcaatagcgtcaccgttcagtcccatgctaccgaattgaacagcagcacggtctactgcgtgattgccgggcataaccacagcctgctgctgttccatcacacggcgttgaaggcctggggtacggccctgtttggtagcgctgggagggtatgcagacgaggggaagcgggagggagtaggggcagctgcggccacagctgcgggatcaataccactgccaatggtgcttgcggcggtggcggtaggagcgggggcggatgcatcggggatttgttcgaggttcgtctcagtcaagtcgtcctgaggagggttaacggcggcggtcggaatggcggggatcacgggatgggtgggcttggcgacgggtgtcttctgtgaggtagcgggcgcagacacaggtgcgggagcgggggcggggggagatggctcggcgacaggctcggtgggcttctcggtgacgggaacaggaggagcggcttcgggcttcttttgcaccggaggagcgggtggtttggcaaaaagactcgcccaccccttctttgtgccctcagggatcacactgctcttaggctcgggcaagtccaattcgccttcagttgtgggctctgcataagtctcctctgccttaggcgtatcccactcggatgtgatagcaataatagcagaaggcgccggagtctctacagcagtggatactgcgcgagatccatttgtagtcgctcctgcacggcctccacgaccgccacggcctcggtctgcgcgaacacgtccacgaccctctattccaccgcgaccacgggttccacgagcagaagctgcagtcgtctcggtcgaggcactgggggcctccttgggcttaggacgagtccggtctgtggtcttcttcttgacctcaccccactgagatacattacctgtaaagccagtcagtcacggtcttcgaatcacaaggttcgattgatttcgagtcggggagattggggttgacgggaactcgaccttcactgatgcgctcaattgcctccaagagctcgccgttcgagtcttccagtgcaaataccagatcttcgtccttccagtctgggaacatttccctaagagttggcagagtgtcggagtacttcttcttcatctgtccaatttcaccctcttcaaaggatgagatgtctgaattatcatttgcagatctgtttccaccacgaccacctctggagctgaagccgccacggccaccacgggcggatactctaccccgcgaggcggaggaccggttctgaatatcggacatgttgattgatgaagatgtgtgagatggagaagtattgaggaaggaggtcacgattcgcagggaaaggctattgaaatggagcaccctcgcagaagaggaacagcaccagaaccacaggcacaagggccagaagagacaaaagaaagaggtaaaatcaaagagattaattgggggagagggagaatgcgttaggagatgacaagattgaagaaaggatcaaaagctaacgggatctgagttgcttcccttcaagtcttggcgttgcctggcttttagcgagtggcgcttattggatgctgggggggatttacagtaacaaagggatctttactggtttctttacattttgaacggaatctgattccgaataattatattggaagacatttatagatctagataattcgttgcattccattgaccgaatggaaataatttttgaaaattgtttcgtgtcagtgtggttggtttcttctactcgtcattcacctttttttcgctttgggcgacagaaggctagtttcaccgccctcgtcgatcctcctctttacctcgatgcacatcatccctcagaaccttgaaactcttaaaccatcatgaagggtacatccatttttcagttcaagtcctggcctaaaatccatcaacccttacctcgtactccacgagagtctcagcaactgttaaatgccctcacgtcttcttttcgtcgccaactagatggggcttatcccgcgtcaggcaacaaccatggccggcccctctccaaccctgaatcatcagcgcatgcaaccgatcagcatttgcagaatatcctcgacaatccgcttttccgtattactccgactaaacccatctcacgagaacccaccacattgcaaagcattgagggccagcgtcgactagccgaagagcccatggccgtatttgatcaaatggctgcagctggctcagtcactaccctcacaatcaatgattgtctgaagtctcaacttctactttccaggtccccggccgatatgaatacatctcgggttgcatcgaggatcgttgattggtattgggcatcagacggcacatcgaggcaaatgcttctgcgtttgcggtcagtcactacgtcgttgaccaagttcatggtggcagagggattacacagtactgttatgaagtggttgcagatgctcatgagccaggacctaggtagtcagaatggccggatgactgaagggctcgcgcggcagacgtttaatcatctccttgttgattttatagatgcagaattctgcttcggaaatggcttcaactcagcggtggcacattatctgagtgtatgccagatgcatttccaaagtacttcttcccataagtcaaggaagccgatgctcctggctgcaggcgcccacctgagccgtctggccatggagcataaaccatcgggggagcaggtatcaacactagtttatgatcagttcagagatacggtttctgtgctgtctcctcggtcattactgctcgcatctgtggctgtctgccacccaacagatcctgatccacgcccgttcctccaatttgtggagaacctctcaccaagcaaattccaggcctggaatgaaactaggcgtgatgctttctttgagattggttcagaggctctccgtgtcctcgttgaccgaaagaggttccgtgatatctcacggctagagcaacatatttcagaactgctaccggaacagccagcaactccagtcgctgagaagtcacacacatcgtctgaggaggaacatatcgcccgtctaaactggagctttacatgatctgctggtctcaaaacctatcgaacaatcactctactctcgcacaaagctaggtttcttgaaaaacattcaagccaccaacactcaggagacacacatatctctctatctttcaaccacaaaagaggtcaacttcagtgatgtcgtcacactgcaactcccctccgcatgtctgtgtactattacacaattgaattctttcagcatggatgtttgacgaaccttcattttccaaatcatcacgcaaaggaaatacactctcgcgactccactccgagtttgagcctcatattcttggcggtcgtacatacattgcttgccaaatcgtccgagagatttgagtcaccaggcagacttggctgaaccagtattttagaggtgtgtgatctgagatgcacctgaatactatcaattatctcaaaaatgcctcttcgttgtactaaatatacgaaatatcgaccttcctgtgatatatatataagccattgtcaatagtggctcagccggtttttagacaagctgtttgggctcaatgaagagcataacctaaacatccatacatcatctcctagctaatgataagatttacagcctttgtggtcgagtactaacctcgaacaaacccgtgctagtcacagtacgtcttgtggataacattgcgtggcaattgtaattctgcagctggtgaggctgtgcgacagaatgccgtggagagttggagggctggagcggcgaatcagccgagggctctccagtgctctaaatacgtcaccgcgcgacctcacctaacgatccccccaaattgatcgactcctctgtggttttttttctccttgtacaagctcacctgagcaagatttacagtcgcattgcttttgcgaatactctcccactcaatctttgccaacttataacccgctgtcgcggcatttgacatcaccgatctacaatggccgaaggagcccgcaatgcagattcaggtacgtggtttccatgcactactgctgaatccgaggagtaattggtctaagcagcccaattatttcctggaaatatggttgcaggacagtctttctttgtttagttaacgcccaggtgtaactatgccatatgctgactaagggatataatagatcgggacactgcccagctagtcaaagaacactcaggtgcattccagaacagagtaaacacaactcaaacggatagcccgcctattcttgaaacagcaaagcccgatatagataccgaccagttaaaggcagacgccgggctagagacacccgagcccgctccagaaactgagccatccgtgacagagcccgcaggatctgctctcggcaatattcctattgcccatgagtcgcaggttccagtaggacccacaaatgaaacagtgccgggcgaaaagcgtggcattgattcagctctggcggaagatgagcaacgaaagcctgaaccgtcggatgggcctgataccaagaaactgaagacagacgaagatcatgtcactggttctaatggtaccgccgctgctgcttccaatccagacaacaaagaacagaagaaggctggtcggtccaagaaggagaagatcaaggatgctgtgaacaagattgtcccaggcgatggcgttggtagccggactcgcagccggaccaagggtgcttgaataaaccgaggtcactatatttacagattcgcgagtgacatccatgtcatcatatttgttccgactttgaatcatgactattcatgttcggcacttcctcattggtgtcactgtacacgtgctgcaataagatgaatattctttcctgaccgaaatttgggcggggaagttttcaaattcaaaaaccacagaagttctacgcaatatcttcttgatcatgtatgacgttttaagacaagcaactgtttcactccgtagtatggttgtagacatatgcgctgccttacaacttccgccctatcacttttactctctaatttgtcccaatgtttgtcccaatgtcaaaattcttcctggagtacaagttatattttcaaataatttcgaacgtttccctaaataacgttgaatccctaaaccctcccgggggtctctttcggaggtttgagttggtggccgataatcgggactgagtcatttctcggatcggaataactaaccctttctatccccgcttattactggaggggaaagtctgtgtcattattggtgatagagcattgatatttatttgattactttttccctttcatcatattcaattctctactttcaaaatggctggacaaaagatttggctgcgtgctgagaccaagcctgctgaggcccggtctgcctgtgagtagtctcagcccacctacaatggcggggaggcaattggctaatataccatccagtgaccccaaccacctgcaaggcattgattgatgctggatatgatgtgactgtcgagcggtcaactcagcgcatctttgacggtacgtccaatttcccatgtcccccatactcccaccatcccttgctattggactcaatgactgattccgctctatagatgaggagttctccaaggtatgattcactcagtaatagctcgaactcgccctaaatatcatcaattgttataggtcggcgcgcctttggttgaggaaggatcctgggttcaggatgcgcctaaggatgccatcattctgggtctcaaggagctgccggaggatgatttccctctggagcacgtccacgtcactttcgcacattgcttcaagcagcagggtggctgggagaatgtccttagccgttggtctcgcggcaagggcacattgcttgacctggaattcttgactgatgattccggacgccgagttgctggtaagactcttgtcccaaagtgttcttgtcttgactcaattgactaactcttgtttaatagccttcgggtggtctgcaggttacgcaggtacctatacttgaactccgtttcctgatacaatcaatactaagcgtggaacaggatctgctttggctgtgaagaactgggcttggcaattgacacaccccaacgaggccttgcctggcgaggttcactatgccaaccaagaccttctggtcaagtctgttaaggaggcgctcgaggccggcaagaaggtcgctggcaaagcacctaagatccttgtcatcggagctgtgagtcttgcacagatgcacagaaagcgatacacatattaacaatgctgtagctcggacgttgtggcagcggtgccgtgcagctggccaaggatgtcggtatccccgactccaacatcattgagtgggacatggcagagactgcgcgaggtgagtcaatgactattcaacatcttgaaatctggtctaagctcacaaattaatgtccacaggtggtcctttcaaggaaatctcacatgaagcggatatcttcgtgaactgcatctacctctcggccaagattccaggtaatattttacatacatccactcttcccgactcaattggctaatatccttttttcccattagccttcgtggacttggagtctctctctgcccccaaccgaaccctgtctgttatctgcgacgtcagcgccgacacgtaagttatcaaatccgaaactatgcaagcgagcgcacagctaatcctcagaagctccaaccctttgaaccccattcctttgtacaacattacgaccactttcgataagccgacagttcccgtctccggtctggaggctggaggtctccctctcagcgttatcagcattgatcacctcccgtctctgcttccgcgtgagagctctgagatgttcagcgaggctctcctgcctagccttcttacgctcaatgaccgggccaacgctcgggtctggaagcaggctgagcagctcttccatgagaaggttgctaccctgcccaagtcgcttcaggtctaaacttgttgcgctggtaggtgtcgaataaatttacatgattgggtgcatcggatataaatacttacagataaggaatgctacaaaagttgtaagttcacacatgacagatgctgaagatattatccatcgttcattgttccgtcctataaggcagtagctctgcagtagctctatcaatgtgacaagctatggagtcaacttaaaaatggctattttaaatacttatcttattgttttccgggccaatcatctcctgcgttctcaaccgaatcgcttcgtggcggagatgacttgtctaaaagtttatatttcttctaagaggcataagccccgtatttccgatagttagagaggcattctgaaatccctgtcattccttgtcctccaggcaagacatggctttaccccagactacatggaaccgcggtcatcctcattatgtgcggggatgtgtgtaagacggatatccggagaatccgtccgtggggtctaagttctaacccacagaattgcctcattggatgaaatgagagcctcgcgcgaaaacgaagagaggaatgtcctcatgtccttcatcgttgaatcgtgacgatcgcggagtttgccccgtttgactgtggctaacctgatattggactccgggcgtggttctttctccgcataacgctccactctcaccctttctcccctcttccccgaacttattcgattctgccctcaaaattgatctgtcagcctttcaacctcggaagaccctgacccacattggaattctcttgtgatcaggtctcttaggacattcagcgctcttatctaactacatccgggctaattcgaggatggggtaatgagacgtctgcctgcttcgacacctacacgaaccgccgaacctctttccctctataccgcattgcttgatgcaagaaaagccgacaacagtcgccgcctatgcggccggggcatcgctcgctgccgttgctctgttctacgtcttcgggccgaattacacaattgacggagatgagtcaaacgacagcaatcgcaagaagagcatcgtgggcctgtctaatctggccaatgactgctttatcaattcggtgctgcaggcattagccgggctgggggacctgcgggtctacctgatccacgagttgcaccggcgccaactggacggaccggaaatataccatacactgcccagcgaggatgaggtttcgcggacgcgggcgcggtcggataagttgcgggagttgcaacagggaataaccacacgagcattgaaggagatgctggaccgattgaacgagcggccgatctataagaaaacaatctcggcccgtgatttcatccaggctctggaatacgcgttccgcacgcgcatcagccgcaatcagcaggacgcgcaagaattcttgcagatcgttcttgagcgactctgtgatgagtaccatgctggtgcacgcgcacgtcaacgagcactgggtgccattggtgcagctgcttccagcacggctggcgaagagggcagcccacaggaaagctcgtccgaggtggaggtgcgcatcgatgatggatcagccaatggactgcctgccatcatcgacacgaaactcaggaaaattgaccaggagtctgggttcccgttcgaaggcaaaatggagtcgcagatcgagtgccagttctgccattaccagtacaagccaaaccagacggctttcgtcaacctgacattacaagtgccacaaaagagctcgactacgctaaactcatgcttcgacggccttctcaagactgaatatattgaggatttccgctgcgaccgatgccgcctgcagcatgcggtggatgccaagaccaccgagctagcccgcgcccgaacacagggtgatcgagatcggttggtccaggagatttcgcgcctccgggaggctctggagatggaccctgaggctgagttggagggtatcgtattccctccctcagagaccgcccctaagcgcaggatcgcgcggcatatgcgcatcacagcgttcccaaaagttattgccatccacttgtcgcgatcgatttttgatcagagcagctcaagcaagaacgcggccaaggtctcgttcccggagcggctccccttaggaggcatattgagccagaaatggtacaaactgcttgcgattgtctgccacaaaggcagccaccatagcgggcactacgagtccttccgacggaatcatatctacccgcctttttcaacacctgaggtctttagctcctatgcacagagtcgcactgccagtcagaacccctccgcgacggccagtcctcggatagtaccacggggtagccccgatgccgacggcgacggaagcgtttcaggagcaggctcgtcaacgtcgctatctggaggatccgcgactcaactcacccctcctcaaccacggcctacaacctctggctcacgacgttctttccagagcaactcccgttcctccaaacagacgttgtccccgacctcggacagtaacagtccaacgacagatcagggtcactggagtccgtccgccccgcgtccctctcacagcataccccgctcttcccaggataaccccactggggtcagctcgcgacttcggcgccgtcgcaaaccgaatgatcgctggtggcgcatctccgacgaaaagatcaaggaatgtaagacctcggatgtgctgggcatgcagaaggaggtttacctcttgttctacgaaatggagaagcctgacgcgagcgctggcaagggactttgattgtcttcttttcttttttttagattccagtacatacatactcccatacttctgtacagatggggtggatcgaattaaaaggggatttgaatagagatatgtacagaatcagaccaagacatgtaggtagtggaaatagttagttccgataaacggcatgacctcgggatatagatgatgtcaccagactaagcttaactagttactccgtacccctctagtgttcttattctacattctacattattctaaatctcagatgaattaagaaaccagatatgttgtccaatgagattaactagaactcggaaccagattgaatcttgaaacatgattttagttagcatacacatgtacaaatagtaataggaaatggaaatgcagcgaatggcctcgaactcctcggccccgccacgaacaaaatacggattcttcgggcacttctggggatctgggtgagctattgtatagctgggatagctattgtagttgtaatagctgtagcaagggtttatgactgtggttatcaacaactttgaagcttaagcccatggatataggaacaatggcctcatcactcccgttctaagctcttgatagctcccgatccctcgacaacatcgggctatcacggggaaggtcgggaacaccagcgcaagagcccataaagtatattatatcatctgcccatctcttcttttccctctttttcctgaaatcacactgacctcactccagttccactaaatctccaccaccggtgagtctgccctgtctcccttcaccgatgacgcttgcccctccatcttttgcccctccttcttatttaactctgcccgctttcagctctcggtaagagcttggtttcactacatttaacgactttatcattggatatctgaccttctttccttctttcctccttcagatttctacgaatctttgtacaaacttcataatgggtgtccttgagcaacttaaccgcaagtccggcgtcattgtcggcgacgatgtcctccgtctcttcgagtacgctaagcagaagggcttcgccattcccgctatcgtgagtcccgaatgtgttctcctgaggaaccttgcactaattcaatctagaacgtcacctcctcctctactgttgtcgcttccctcgaggctgctcgtgacgacaaatgccctgttattctgcagatctcccagggtggtgctgcttacttcgccggtaagggtgtgagcaacgagggccagaaggcctccattgctggtgccgttgccgctgcccactacatccgtagcgtggcccccgcctacggcatccctgtcatccttcacaccgatcactgcgccaagaagctcctcccttggctcgatggcatgctcgatgccgatgaggcttacttcaagctgcacaacgagcccctcttctcctcccacatgattgatctctctgaggagcccgtcgactacaacattaacaccaccgccgcctaccttaagcgcgttgcccccatgaagcagtggctcgagatggtaagtagacttgagaaacgagggacaacattgacataatgctaaccacttttacaggagatcggtatcaccggtggtgaggaggacggtgttaacaacgaggatgttgacaacaactctctctacacccagcccgaggacatcctggccatccagaatactctcgctgccatcagcccctacttctccattgccgctggcttcggtaacgttcacggtgtctacaagcccggtaacgttaagctccaccccgagcttctctccaagcaccagaagtacgtcaaggagcagaccggttcttcctccgacaagcccgtcttcttcgtcttccacggcggctctggctcctccaaggaggagttcaaggaggccatcagctacggtgtcgtcaaggtcaacgtcgacactgacatgcagtacgcctacctgaccggtgtccgtgacttcgtcctcaagaacaaggactacctcatgtcgcaagtcggtaaccccgagggcgctgataagcccaacaagaagttcttcgatccccgcgtctgggttcgcgagggtgagaagaccatgagcaagcgtgtcaaggaggcccttgaggacttcaacactgctggccagctgtaaatgttgacctctgtgtgatgtcgcataaatgattcccttttttacctctttctattaccctcatattatcctctcttcatgcggccgaaaaagcgttgggcgtcctggggatgtgggcgtccaggttgtatgtagcgttgtattctgacacgctgtaatgaatgttcatattacggtttttatgatcgctctggaatacaaactgtaatgttctgcttgataattgtattccaagaccagccccgttgtaggtaccagccagaccgtaagtatacttcgatctatccatcatcaactccattatcgaattacacatgtaggttgttacattatatttcgtcatcagtacaataactatgtacttggtgtttttcttgtcctagttattgcattatatctcagtcctgataatccaagctctcggacacgaagtggtttactcgacgagcaaacgggcttctcacctctcatgtctgctacttgcttctgtcttattattgaagtgattgactaacaatctaattttctcatacctctcatacctcatctctcaaatgaacctccatcaatccccttctccactatgaaactcatcttgttccaccatcatcataccagcattaccatgccatctacgcaattaacccaagtgccacaatcggtacatacaaccaaatccaagcatagcccttcctactaactaagctattactgaaccaggtcctagatctcagtggagatctagaagaactggtatacaccaaagcagcaattggaatctacgaccgaaccatgctggcaatcgtcaacccgacaacaacaccgatggagctcaatctccaccacgggtcctggctacaggccaagtcgaaagtggcatcgctccaccggagcatcgtggcggatttcaatcggctgccgcgtcatatgaaacgtactttcgtgagggccaattgcttgactttgtcggagcatgggtttcggccatctgcagataacttggagatcacccgtcctggtagtaggagggctatcgctttgctttaaaatggggagctgggttacatactagcattggcatgttggtggaaagaggattggctgtcaattgttgctaactggaatgttgtgctagagattcatcagcttgcacctctattcctgcccctttctaatgctccattttgactccatacaccaaaacatttggtatggacctcagctgctacaccattcatcgccatcccatactcagttagcaacgttagatgattccacactcaacaacatactatttcccatttcagcgcacaagaatgctactagggcaagttgttctgctatagagattgtgctctggctctatgtctatggagggaggtgatagctgtccatatctcttttgatttgcgttgggatgctcgaatgctttcactgctgatggatggctcaaagatgcattcaaaagcaaattgatactcagaattaagatttcacaaacacattgcagcggttcctgtactatgtaggttcttttgattcacctatcaatgtattgtaatcctgtacaaattatctacgcgaaaagtgtgatgtagcaatagtgaggaaattgactggtagagcaatggttgatggccatatttctgctgtagtgaggatgaccgttcaaatctgtcgagatgctcgtgtatgaaagggatggtggactgaaaagacaattcactatgtaaggctaacatctatctacaggaactactgtcttcttctaacagagcagacccaaaaagggataatggataaaacactcagttgatgacatggccaagtaacacactataaatcaaagcagtgatgatcagatctagcattgatgaatttacaagaataacatgatagcgtttcagtcgtaacggtgtgagtctcagatagtgacaactcaatctatggtccggacaagattccatgcaacatcttacgcgctcagttccgagacggcagcatatatgagttcctgacataagatatctttttgaaagagcacccaacccaatcctcaaatcagagcacagcaatactatcaacaagcgtgtttacgagtccactcccgcgcaatctcctcatagcgtgaccggtcgtttttgtattgctccgcgatccgcccctcgacagcgtcgtcaggcatcggctcagatagtagctgccgggcgaattgaagaactgcggcgatcttcgagctgggtttccattcgtcggctcggagcatgcctaggcacatgcttcctttttcgtcgtttgttacgttcgggtggtatattctcgttgcgaaggagaccgtcggcggcttgaaggggtattccgtgggtagggagagcttgactaggaatttgccattctgtattgtttgccgagaggttagaaacactgtttattggacatgaactgtgaggttcgagttcggggactcttaatggagaccttggagatgatgggggtaaatggggctagactatggtttgacttacctgatatggtgagccttcaggcccttccatgatgaccttccactcgtacacgttcgactcatcggccagttcaaccctgatcccttccgggggggattcggtgagctcagtcagctcctatgaaggtagtcagcacactggtagatgagatgatcatgtggaaatataggtacttgccttggatatgcgcttgacgctgcccattatggtgttcggttgtggatttggcggggtgataaacaggagcggggaggttgaagaatgcagggaaacgcctaagcgcaagacgcgtttaaatgttgaagcaacaaataaatagagatctactaaataatatggaaaagatgctatgtgcaaaaagatgcttaaaggacaaagggggattttacggtgaagctagaagctccaagtggggtgcgcggcaaaagacgtcagtggagaagtttgatatgtcggccgctctatcgatgtccagaatagtaaacactataattgaacacccattgtctattgataactccctgccgtaacatttgatgcatttgattacattcttggcattatccaatgtatattttcgcccattactctctctgaatcatcaccatcagtcccattagtcccagcatgactgtcttgagccaggggtgctcgctaagcatgatagtaacgtatccgaccataggtacgtagccacgaacactgccgacaatatcatcggtccggtgaagataatcctggcctaaccttgtcagtaaccttcagagatggccccgaatcttgtatcgcttaccatcagcatacagctcagtatcgtctgccaaattgttatcaccctaacgatctgttagcaatttcctaggccattcgaattgtcgagtcatttaccttggtgagaagcatatgcgagttaggctttgtgtccctagaacttcgttagcataaggaagtagccacaagaaaaattgccgggcaatgatcgaggacatacactgtgatttctttcaccttctttgcgctcgcccgtccttctacctcagggaaagtgcgaacaaccctgtggacaatcggaatagactttccccgaacattataaacgagaacttctccgatctccgcccttgtgtttcggttccagagaaagagcaagtccccacgctgaaatgcgggctccattgatcctgtggaaagggaatgtgagctgtgttcagaccgccataaaaatagctttatttaccggacagaaccacaactattggagaacttgatgcggacacaactgaaaggcctttccacagcatgaaagccgtggaaagaacaagcgcaaagttcagcacttgtgcaattgattgccgagcatttgtgatgctggatgagagggaggatagcatggtgggcggttcgcggtcaacggagatgggagggttagggtaggtcgctctaatagtgactgttcttagtcagaaacggtagggagtttatttcctttgttttcctcatggtagatgaagacggtacctattgtgttcagctaactaagctggttgggtcgtgttttgatagagctagagggtgcggagatgtggcctcgtcggagatcgccttggcgcagatccactggccttccgccttgcaggtatgtataaccatcgtgtaaattgtacggagtaccacacctgagttcatacaatggatttcagctggtccagaaatagttaatattgtaccgaaatgaagcaatattgttagtaagaaatggctgcttgctatatccgtttcaggctctatctaggcaactctgtaactatatataactaatcatattcgagatatacatgtttttcgcggtctatatccttaatctcttgtccactcaaagacagtatttgttatgttaaatctaggcaatgatatacaaatcctaggctcttgcagatcatacaagaccctccggacatcctcggacatcatcggtcagtgcttgtttcattgtctgagatatggccacagctcgtttgatattccttatagaaaataatacatagcttgacatcataagcagattctttttgtctatttttctctgatttttccaagagtttcaccttttgggctgcgcgaaaagtcactatgaagaatgttgaagataggcatccctagaaatcaagtcactagactatgtctcatggctgaaattgtggtcattctccgcattatacaatggccaattacatacatggtagtgatgtttgaggtatagacttgatttcaaacatgtagcctgatctacctaccatgtcttagctaacctatcagcagatggaaatctggtagattataggtaaaattcctggagatattttaggtgattgacgcgcgcgtatctatcgccgactgatctctaaagaccccattgtgcatattgcaaggggtttcattcttcggggcaaggtttgcataaaaatgtccgagcagaagcattttcaagatgataaaagctcgaatcccacttttagattagctttcacacaggactgatgtactgcaaacaagggtgaccaagtcacacattattcattatcatttctatggtttgcttcaatatgcagtctatctcctcagaatcgactttatcgacaggcgagcccaaagcttcagccattgagctcctgcatgaccattatcttgagcttacccccgatgggaaatatgtgcgatggttgcgagatcacccaaggcatcctcgaaattggtctagcctacgaaagacttacgatattgtccttatctgtctcttggatctatttatgtatgaccagactaaatctcaatgttattttgtcaataagctaacaatactactagaacagcatccagtaccgcaggtgtgagtccataaagctatctatgacctaccttattgccgagctaaccgtaatattttctagtcagcagctgccgcagaagccaaacatgaataccatatcagcgaaacgctttcgatctttatatttgtcacaatgtgagatcagttggtcttagtctactttgcgtacctgacattaagcagatttcttctcggccaggtggtaggcaccatcttatttcccccgtggtcggagacatttgggcgcaaaaacatgtatattgtgagcagtggtctcagcgccatttgctgtatgataatcggactcgtccgttcaatgccggtcattatcatcatgcgcatcgtcgccgggcttctttccgcgatcccttataccatcatcggcggcagcatcgaggacatgttcaactcgcatgctcgaatatggaccatgtactattggacaattgcttcaaatattgggctcattcttggacccattatgagcagctatattattgcaggccttgattggtatgtagcacttaaccatggtctatgtcaatttctcacaactccccaggcgatggaacttctatatcttcgccatcattattactgcaattacgggtggtctctgctttattcgcgaatcacgaccttccttgttgctggcctccgaagtgaaacgggtcaccgatatgactgtgcaatatattccaccgccactcaaccacgaccatatcccggatctcaatacgtttttaaaagaagccctatttcgtccagcccagctgtttttccaagagcctatcattttcgtcatcgcaatgatgatctccatcgccatgtccctcatctacatcttcactgaagccctccaacccatctacgagtcaatgggatttgcaaaaaccgacgcttcactgatattcgttgctatcggcctgggaacttgcctcagcacattgacccgtgtgttagacagctacattctcaactatttccgcaggcagggacgcccaattaagccagaatataagcttgtcgggctaggacttggtggtccattcttggcgattggtctatggtggttcgcttggactattccacctgggacccaaactccatggattgtgcccacactttccctcgctctggtaggctatgcgctgacggaaatggataccgtgctgtacggctatatctccgatgcttatctgagttactcggccagtgctaccgctgctgttgcattcatgcgagcgttgctgtcgggtgtctttccgctgttcacgatgcagatgtttaaccggttggggaataatcttgctatgtctgtgcttgccgctgtggcaactgcattttgtatagtaccgcctgtgtttatcttttatggagagcggattcgtcgggcgagcaagtttgctcgatatagctgggaaattcaggaggagctgggtaaagaaaaagaagattggtaagcttgggctttagttactatctgccgcttactcctaagaatacgacttcagctctagcgaccaaaatacccgcagaaaggcctttcgacaatgtcaactgaatgatctagccgcctaaaaccgaatttgcggcccctcatttgcctagtatattctaactagtagtcagaaaatacctcgtcataactaaatgaagtatgataggacttcctaagagctctcggacattttgtgctaccaataatgtgattggtgagataaaaacagaccctaggagctcaagcaccgagcgatctttctttcggcaaaagttgatgttaagcaatgaaaaaagtaggacataagagagaaaaccgggaagaaatgagaaaaacagcaagagatacctccgcatagccctgattgatgtagtcattttgcatgagccagtcataggcagacgaagcgaggagtttaagaacaaacttgttggcacatagcttccaaggactgcacgccgatgataatatccccttcgtgttgatttcggggtctgcggaagatgctttcaaagttgagcaccaaaggtgtaccatggatttgcccatatcggtacgtaactctctgtgttggtcggaaagaggtatccatgtgatttcgggtcttatacggatttggggaaggtccttcggaccatacctccacgtctactcgccatgttggcttgcgagtagtggcgatgataactcttggagcgagagagaagtatgaagaaggttagattctctacaacgatcgagatctagctaaatagctaggtgaagcctgacaaaccagacatcggcatgtgatcggcacgtgaccaccacaacaataacgacgcacttggtgagatgttcagagttgctataccaccaatgggcgtccttgcattgctgggagtaggattctgatacgccgacttcaagggcaagggtaggtaatcccgccccccttccccccacccatcccatcaaagatatcggatggagagagccaccagtcaggctccttagccacagactttccttgagttcttggcgatgggcgggatacgaacgccccattgtcataggaaaggcccattaagaatagctggatcaatttgagagaaaacgccaatgattgaattgtgtttctcaagggaacattctacaaagcatttgagatacagactataaggaccagaccaacaaaaggtaaacatcataataacttctgaacataagtaaggagatatatcaacataaaatgcacctatgccccttcagcggtcttaatggtggtatcctctctccgagtcagactcgattcccaatacttctctttcttgcctcgactaacgatcagtccatagatatcaaatggatcgacaaaagtctggagccaatgacggggatcatcatagccagggccctcaatctcggtgacgccatcttcagcgagataaatcttgtttgatcgcggaagccagcgcatgggatgaaagacattcagcaaagtggtattgctatacatgagcacaacctcaaagatccaaaagtaccattcctgtttcaatacaggactgatattctcgaggtcagtgtaggcattcagactcgcggcagtaaagtattccactgtgcgatagatggtacgaatcgtgatgagggtacaactgcagtataacaccagtagcgcatgcttgatcttgtggttcaatacgcctcctcgggcgcagttgaagtggaatcggcccgccaaggccacaaagcctgtcattaggacgatttgcatgataagcgccgccttcagtagcgccttgcctatgttttgcgagctaacactagagtttgcacttgcgactcgggccgctccgtttgcggtaatgctctcgatggccacacctagggctatgaaggttgtgaatacgcggcccggatggattggggagtggtatgggatgtagtagagtatgcggcccaaaatgaagaagttagcaccctcatatactggtctagaataatcgaagattggttgtcagtagcgtatcccattatgggctggatactccttacggtccggcgagcagaagcacagtgcttgctatatagacgcctatatttccccattgcccgaacgctccaatagtccgcgtgataaaacctcccgtaaacagaagggcagaccatggaagaagtccggtgactttccaggacttatatttgctgggggatctggttaatttggagtttcataatgggtaggggtcacatacaaggattgatttgcatggatgccgccagagatagcgaagagaatcgcaaaggcaattgcagcgcctttgttaggtgcatagaaccacaagcttccctcctctttttttgtcagataaactatcaatcgtgattgacttgggcgactcacgataagatgaccttggttcgagcatagttgttgtagatctatatattgcttggtgcgaacgatcgatttgcgtaaaaacaccgcactgtgtagttgatgtaattgatggtaagttggagaatatgagtatgctcagactaattcaccacactatgtaggtaggggacgttagacacatatatatacaacaactgtatgggcactgttcactttaggtaagttcgtattccttcaaaagcctcatgaactttattttggctacatggctcctcaaatttcctgaatttacgaataatacggagtagtcacagccaatctatgcttgggcctaaaatgacttcgtatttgcctctgcgctatgctcctaatacgaggctcactgccacagatcttcgacttatgattcgccaactttatcacgctaatccaacctaagtaatctcgttttcgcttgcttgcagtgcatgggataggccttcagcgtcatcaatttagttcagctcctaacatatacatagtattccgtagagaggttgataaaaatgggcatgtaaaaatgggcatgtaaaaatggaatagctttgaagcaagagggccgggaagatgtcctgtcgtggaatcatatggctaccgcagtctatcaccaccagtactccactaggtttacctgtacattttgtaatatgattaaacgctgaaactgtactgatatgcgtgacgagaggccactgttgtccgattcattctttcccgcatacatagttgcacgtgatcttgctgttgtcggggtgactgatagcccaaagcggtaagcgcgatgttgatctgtggatgttctggactttccagtttgatcgcgcgacccgcacaccttcgaaggtcaacgtcacctgcgtgttgtctagatactcacgagccgcccaaaatgccgccaaaacagccccagacatcgctgttccaagtttaccttcggttacgccccccgatgaccccaaaccccaatgaatgtgaccgctttttgaacgttgaggcgccagaggcttcgcaggaggaaacagagatcgtctcgcctgcatcaacacatgttactcttcaaccaccaaatgacacgagaaagcgcgccgtcgagaggtttggtttcacaaaggtcttcgaggagaccgcctcgcaactggatgtcttccatgacactgggatggagcccatcatacgtggagtactgaaggagaaccgagatggcctagtggctaccctgggagtcacaggcagtggaaaggtctagtcccgtgtattgtaatatcgcgataaccaagctaacgggttgatcatacacagagccacaccattttaggatccaagacccaacggggaatgacccaaatggcacttgacgttatcttccgctctttagagtcgacaaataagaccgatcatggtagcattacccccgtgatgcttgcctcgctggctgtcgcggacgcttctgaagcccaattgttctccgcccaaacatttctggaagctgtatatggcgaaccaaacggacgtacatcgagagcgcaaacaccgatgagcccatctcgcgccaatacccctttgacggtacgaaacccctttacgctgaactccccccaaggatccccaaccccacgaccaagcacccctggatcgtttctcccaagaccgagatctaaatctggaagcccccacaagatggatttgtctcatattaccagtccccatgacgctgctggatctggccttggccagatctcaactgagccctctggatggatcaccccaggattttctaatcctatcccctacacccactgcaatctatttgagcccaaatcagctaaatctcgactttatgtcttcaaggaacccacgcctgccttgaactttcctcgccgtcacatacgtgaacgaccatgcgcccttcctaggctgcccgatatgagccacctaactgtagatatggactcaaatgccgactatgtcgttttggtgtcaatgtacgaagtatacaatgaccggatctttgatcttctgtctccatcaattgcctcgggtcagggtaacatgtcccgcggaaataaccaaaaggatcggcgacgtcccttgctcttcaagtctaccgagggctcaccagatcggaaactggttgccgggctacgcaaaattgcttgcagcagctatgaggaagcactggccattttggatgttggtttaactgaacgcaaggtaactggcactggaatgaatagcgttagctctcgaagccatggcttcttttccctggaagtcaagaaacggacatactcaaagcgaactggtgaacacaactgggctggaaacgccctcacggttgtggatctcgctggtaagtagattacattcttactgtaagtctgtaactaatcaatctaggctccgagcgtgcgagaacagcaaagacagctggtgccacacttgctgaggccggcaagattaacgaaagtttgatgtacctcggccaatgcctgcagatgcaaagcaacatacaggatggaatgaaggtatgtttggaactcatagttagtgtgctctttttggcagctgctaacctacaaagaccgctctcgttccttacagacagtgcaaattgaccgagcttttgttttcgaattcatttccatcatctcaccagatgtccagaggccaatatccccagaaggctatcatgatcgtcaccgctgaccctgtgggtgatttcaacgccacctcccaaattttgcgttactccgcattggctcgtgaggttacggttcctagaattccctcgatctgtgaatctattctgtctgccgcttctggcagtcaccgctcaatcagtgggtccacttcgccaaattttgattcagccgaagagctcgagagagctgctgctgagatcacacgcctcacacgcgattgtcacggccttgctgtcaagctagccgaagaagagattgcacgggctgatgttgagatgagattaagcgctgccgaagaaagatgtcttatgatcgagcaagatgtgcgagaagaatgctgggcagagatggatgagaaaatggaagaggaaaggcgacgctggcagagagcatgggatgagcaggttcgtagccgtggatcagctcaaaacttgcaaaatgctaataaacccagatcggtcgcaatgacgagcacatcgacaagaaggttgagcttgtatcccgcggatttcaaagtaagtctgccattgaggagcgaaatatgataactcttaaactgacctttctctccagtctttgaggattcggcgtcgaacgaacgagtggaagagcttgagcaagaaaacgaccagcttcgccgcaaactcgccgcttttgagcgtgagatgcacaaccaatccccgacaagaaagaatagacccaagaatgccacgtccgcgcggtctaatcccctcggccgcggtagcgacgttgaaaacgctttgcaacgcatggatcaattgaagcttgcagataccatgtttgctcctccatcgccaggatcctcgcctatcaagaagacgaggaagatgggaactcggaaatgggacctcgccccagaggaccagatctaagctgccttatcctctactccgccatgactgttacgatttattcttcttgtgctttgagatactcaagcttttaattcctatgtttattttggttaatacggaatgatatcccttggctaaggcgtttggggcaatcgatcctttgtttaataaatgttcatatttcatttccacaatcccagatttggattttgcgaatattgtacagggtagctcgtaagccattcaagccacctgtctcttaacgccatcctataggtcaaatagatcctgccctgggaagaacaccccatgtgctccataaaccggaaagaaaaaaagaaagcaagcccactcctggattgtaaagcagattcctcaggactcagaggatgtaatgtccatggcatcttgtttcccggtatctcgcttgtcggcgacatgctcaatctcagtatcattggcagattgatcgggagtgtggatctctctcttctctttgtgttcttcctccaactttgttccatcatcctgcatgtcctcatcctcgtccctatcaccctccccttcttcgccttcattctcatgaccaccctcatcgtcctcgccgtcaccttcatccgcaccttcatcaccggtccccgcctcctctgcatcagtgacatgagggaaaagcgccgaggtcccctcatcacctagcttcgtgtcctcattatcgctcagctcagtctcgtcagcactgccatgctcatctctttgctcaaccgagtcatccccagtaacagaaatctgcttggctgagccacgagacgccgaactcggcccggcagcagtatgcccaacaccctgcggagtcgcaggtggctccgtctcgcccgcagcaattattttactcgccacggcccggggagccagcttcgtgttcacgattgtgtcggcgcgtttttggatgtcgcggcgggcgattccctttgtccggccgcgtggtgccgggttatcggatactggaatgaatgttggagcagttgaggtctcgggaaggccgtcgcctagcgtgagaacgtggtcgactttcatcttttctttattttcctcggttggttgttcgaccaggtggggcgtgttgatttcgtagagtcgggcgtagaggtcggcgatcaggtcttcgaacatggtgattttcatgaggttgttgttgagcttctttagctctagggcatctcggagcagttccaagatggcctggctctctggccccagttgaggtaggctttccaagcgagctgtcttggtagagaactcttcccatccgattggtttgaatacgctttcttcgtgaccttcattgattttggctgcgcggcggatgatctttgcgtaagttagacaaatgtcttcccacagcttggtgtggttgaagaaatcgccttgcttctttctcacacggcgcaaaagttgatctaagcttgcacgatcgtcaagctggtcaagcaggccaacaaaaaagtacacgtagcgggtcgtgtaaacgaaatgtcgacccggacgttcaaattccggccgccagacctggatcgtaagtgtcttggtgaatatttgggaaagttcctgcttggcagcaatggcagcggtcgcgttttgctggtcgtcgtaaatgatatgcgcagcctatggattgtaagcagtatgaacaaaaaaagatcaaggtgcgggtgatatacctttacacccatacgatgatgccagttagacttgtcagcgctcttgtacttccgaaggacttcgagtatgtatgtgttccaaccctccatattctcaggggggtcgatcttacgggcccagggagttgcaaggaggatcttgcttccttcggtgggctgatattgctattagaatgggtccttcatatcaggagcgatacaacttaccgtcatgtttcctcgacgaacaagtttgtgcacaaaagagaagagtttgaaatgtggctcaaagataggatcagagcgtgagtctcttcgctgcggaagtgcagcaatggcatcgagaatagcatttatcacctcttttacttcgaccttttttggggtcgttctcaaggaatcatcgctggtgaacattttccaaagacatttgccaagcgtgtagtgagtcctattgagtgttagtactctttctaatgtccccgctctgtaaagtcccgttgaaaccacttacatccatcgcttagacttgtcaacagctgcccgtttgagaaggttgctagcaaaattccacgtggaataagccgacatctccttaaaaggcgttcccttgtacatttgttggctcacctcgctgctgtaatgacgagggaagtctacaacactgaagacccccatggacagcggctcgcgagaggatgagtagaggcggataccaaagtcagagtaaagatctgacatcgcttctctagtctctgccgttggctctgcagtcctcattgctgttgaaacagccatggcataacaatgaatagcatttcgctgcagtgctgccaagtccgaccggttgttattaatcttatcagctgtccatgtaatgtcttcatcaagctttgagtcataggtttgggcaagcctataccaggtttcccatctgtctgttccatgatccaggtcttgtctgaagaacccgatggcgtcatcaagctcgcttgttggaccagggctgagacgtttctgggatcggaatttggtgagtgcggcatggccgagaaggaagaaccaccccttcgaagcgatcttcgcgttctctgtaggaactatcgtcgtcgaaagctctgtaataccctgaacagcacggagaagattggatgggttgattggagctttaagatatacattcacaaggcgacgattgaaagtcaactgaggtgtctgtgaagaagccttagcggggccaatcgcttgctgcatcttctcgatggtagtcttcaattcagacttgaacaagtccttcatattcatcttgttggcttgttgcagaacaaagtcgatcatcatgatcgctgtagggcgatctaatttctccggaggacatccatgatccacagtcccatcgaatgcagagaatttgataccgtgtaggtcgagaagtatttgacagacatcaaattcataatcacccttggtttcaaggccaaagagttccgatttcagaagtttcaagaacttcttttgcgaatatctgcacatcgatcgaacgcccaatgcattatggacggaacgaagaaaatggatgcggtcttcaagcggatcattgaaaagctccttgttttgagcaatcgcttccataaagagggtatattgtaagatccagcatcgaacatacagctctcgcattttttctttcatgttttctagcgatttcgccaacgagcctcggaagtcgcgaccggaaatctgccctactcgcaccgagtcctcgtaaaggataaagctatgtagaagcctcacgaggcgggctatagcagatattgaggtttgtaaatgctccatgtcgaaacagtcaaatgcttgttccgaatcttcgagaataagcagtatagccttggccacaatgccatcgagggctttcagccagcccaacagagctacttgacgatgttggcttgtttcctcaccgtgtttcgctgcctcaagttctgccattatcacttcgatgcttcgtaaatagcaagagacaactttaggagggtagtcaatggcttggtatgcctcctggagtcggcgccagaggaatagtcgcaatgtagcatctcctctatcgaggaaggcagccatctcagcgagatgtgaggtaggatggttcatgtcactctcggttggcatttcagcatactcgatcgacgagggctcaagaattggctctattgcttcgatgagagtcacgggatcctcagagtctgagttgaataccttggcgaaaaagtccatgcacttgagcttcaagacctcctggtctatcacagcagcggacaattctgacatcgtagcattatttatgagagtgacacttgggtctccaagggactgaagtatctgcttcaggtcttggagacagagcaagatatgttctcgctgtgcgtccccggcaagattgacatgaaatgccgatgcccacaaatggcgcaaagtgaggtttgattgggattcgccggatgggctgtggttgataaaatgatctatggatgaccgggctaacataccccagcgggccagccgatcacgctgtgcgagttttgtttcttggtctgtctcactgccaatattctcaactgaagcaaaaacatctagatgaagctcgtagatggtttgtatcatctcgaattcaaagaggtctttagccttatactcaaatggagctctatcgcttgagccaagaattcgagcttcaagattcgcaatcagttcgctgcacgcccggtaggtaaattcatcctcccgaactagaatctctaccactgtcttctttagaccctttggccacaaaaaattgacgtaagtcgactttgccgtcgaccagttcgaagtctcttggccgaagtccggcatgagaagacactttagccattcgaacaaagtttcatgggaatgtagccagtcagagttgatggcattggaaaaattataaagttgctccccggaaggaagctcttcctcgataactggcttccaagcaccttttcttgagtgttcaaggaaaacagccaatcccgacttgcttgtgccacggatgtccttcagcggagataaatcgtctttctgctgcatcaatcgagacttttcgtcatcccatgtcttcatgagccctcggagatcccgaaacaatcgcgtctcaatatcttggggtgtatcgcttgagtcattcgcagagcacttttctcttaggtcttcaacgctaccgagtacatcgataccgatcttcgagaagagggagtcgacagtgctaaacatccaatcatcggcattgacaaaaacctcgagacggtcttcgtaatacttgtcttgatcgaatgcaacttcttcaggtggtagagtgtcggcatttgactctcgggctcgggtccgtctgcttttcatgcggccgccctccggttcttcgttcgcagccgacgcagacgatcttttgcggacgtgcactatagagttcgtgtcaacttcttctgcatgagtcccatattgttcggcctgttgatcttgtggctgcgttgattgacgttccagcgactccatcaattgcttttcagcactctgatcgatggacgactgttcctcacctcgctcagagggctctttcgttggctgaagtaaattttcttcgggcttgccattactttcggttgcctcaagcatcacgtcggcaacctcattacaacccttgtgtccctcgttatctatagccatttccgtgtcctctgcattgtgtgtgggtgtggttggatcttgggagtttattgctggtaggataataccgatggaccgagtgggaactgcagcgagcgaatcatgatcttcatcgtcaagtgtttggagaagcgccttgccaactgactcccaggtcgactcggcaggatttatctctcggcgtaaagcgtgcagggcaagagggccctttgtcggatttaggcatcgtaaatcggcaggaagggcgggcaaatttgggtatggatcctcatgctgtttgaggtatttcaataatgctttttttggcctctgggcggggatttgcgacgcagataacttgtcgaagagggactgcagcgtgctccgcaagcgttgctccgcgaatatctcctctaggccaagctgctctgaccttagttccaagcgattgtcatcgtccgctagcacactttccaagcaataccgagacaaacggtagctgtttaaggaactgctgagtcttgcgctttgcctccagaggttgagatctgagtcgtcacgctccaaggcatccccaaaagaccctaaagccttccttgatgcctccgtcaacttcctttgtgtttcctgctcggattcgggggtctgtggcgcggtttgtatggagtcttgtactgaatcgaggacgaatttgccgtgatttttataggacagataaagcgtttggaatagactagaggtagagtcgttgacgttgaactcagcgattgattctgtagcaagttcatcttgcacatcgtcgaatgcaccccttttgaaatcagagatcgactctgggtatttgaagatctccgaattgagaagagcttgataggcctccgcagcctggggataatgctctggcccttgtgaatgcagcttcagggcaccgtggtaaagcttcaaagcttcctcgatctgaagctccttggtgtcgtcaacttcctcttcgacagcctcatcgggctccacattcaatgcgacccagctcgacatggtatgagctccacgtagggtccctcaaatcttagctgaaaaagagaaatctggcgacagcatcggggaggatactaagaccctagactagatgcgggcaagaagcaaatcaattggttatcgcggacagcacccatggacgttatcacgcgttgcacccaatcggggaaagtgatttggggcctgggtgcctgggtgccttgtggcctggaacccttttcttagagagtaataacagttggggtattctagatcactcttcgctttcccctcagcgcaacccctgaaacgtcttacgattcacgcagcattcattgcattaagataccctcatcttcgattccatcgcgcttgtgcaggtgccatggtcgcgcccgctgttcctgagtatgtgctcatctccccatttacgtgttccccgggttgcgtatgcatggccattgttcgagattgtcaagagttgccactacgaaaattacaggaggtgtgactgacattgagaatataatttaggatccatgaggaggaggatatctatgttgccgtcgatgcgcgaacggagtccttgcagagcttgcgagaactaggccctccagacttggtctatttggtgaagcagcctaaggccaattccactcgccaggtaggttagaagataccaacttttctttcatgatacaatctttcatctgtgaacaatcgattgattttctatcgatcgcagaccggactttatcaccatgtcaccggaatcgacgcctcctcgtccgcgagcttagccgcctatgttaataccctcacattctctcccctcgacaagacgcataaagtggtatcggggatttactggttagaatctatttggtacagtgttgggttcccatgctgatgtctatacagttgctacaatgcattctcccatctcgatatgcgcgtcgaagtcaaaatccccggaagcttggagagctactgcattgatgagcgcggtgacaagcgagttgctactgaggctctttggcttgagaccttcctttgcgccgttctgagggcttacctctatgcggacgacggaagtggagattctgtcaagaagattgttggagttcggcgattcaaccccgtgacaaacacggagatggagcacaaattcttagatgctgccgaaaagctgttcttcttgggtatagatatcgaaccaatttgcctgctgtgtctctgactaacaacatttcaggccgccaactgagctctgaccccgaaacccaagtccctaacactgtgagcaaccacctcacatccggcatcctcaaatacatccacacgactggccgttatacatctggaatcaacttgtttgagaagcttcgcacaaaggatgtagaggtttcatccctactggctcgtgtacagattatggcagacgaggaggtgcaagcggtacgcctcatgtacgacgctttgcaggatgttccgatggactatgctcttcttgattgccaggctagtttctgtcaaagcaaaggcgaaagcgaaatggcacttgagtgcgctaagcgtgcagttactgcagctccaagcgaatttagtacatgggctcgcctcgcagaggtatatgtcggtatggaacgctgggatttggcgcttctgactctcaactcgtgccccatgttcacctatcaagataaagatacccctcgcatgccacaaccgtcacgcatcatgctcccaattcttgctgaaagccttctcgatgaaatcgacgaaggccagccaaaacagggagaccctcacgactatgttcacccctcgcttcgaaagatccatgctgctagctaccaaggtactttcttaaaggcgtacaatcttctgacaaaaattgctgctgccattggatgggatcagttactcaaggctcgcagccaggtcttcgtgatggaagaagaatatcgtgttgagcgacaacatgttcccaagcccgctacgaacggcaacagccccgccaacgaagatgactctagctctgtggctggccctgactcgagcgagccgtcttcggaagaaactactaatggagatgcgggagacagtcaccctgaaagccccctcgagcgaccggagcaaacagtagcatctgaagttgccaagtctggcaaggaagatgtatgtttaaaacaattctggacgaatttcataatgagctaactgtttgtcacagcccgacccatctcacgcttcatacacgcaattccgaaacaagcgactctgtgaaagatggctagataacctgtttatggtactttacgaggatctgcgcatctacaccatctggcggaccgaaatggcccagtcccgtcaacaagcaatggagtacaagaagtctcctaccgagtgggaaattcttggtgagcttgcacagagactgcaccatttcgacgaaagcattgaggcataccagagctgtctcgccactcggttctcgcccaaggctatgcgtggagtgttgaggttatacgaaaagcgaaatgacaccagaggcatgctcggcgcattgatccgtctcatcgcctggcaatatcgctggtactccgaggtatgctcctttctctagctaatattgctcggaccactataactaataaactattcagttctcccccgaacttttgttcctagttcgcaagctcattgaggacgagggtgctgtcaaggtccgcagcattgtccaagcgacaaacttgcctcaagccgtcctcgacctcacacaccagtattgtcaactatgtgccaccttccgcagcagtggtagcgacacttgaatatgttcgcgatgatcgaagacaagctgagttggagttggaggacaatttgatgccttcccctggatatcaagatagaaagtggagcacaggcagggctaatgaccacccttgatgacaccccttgttttgcactttctcttggtccgattgttagttttcttagatggtatatattttatatgttccatatctagtcgtgtgcgccattcaacatgataggtggatcccgtacggagtaaccctagtagtttggggcccgtatccatttaggcctcgacttctcactgcccaacgctagtatatgcatcggaacccactgtggagagaaacataggactcagccagtagcggcgatttctatgcacgtcatcttcaagtccccgagaacacagcgaggattggctacttccatgaactaacttgatgtccctgaatctagacacataggactctacattcacagcatctctagttggatacaggagactatcacagcaaaacaatccaatcacccactcaaggccgaattgtattttagttcaataaattttttgccgtaaagaaaccaaattctcgatagcaaaatcactgctcttcttcagccgcctcaatttcagacagatctgactccttaggaacaacaccttccttagctcgagcagcactggcagccggaacactcttcgtggcggtatcagcggcactctcttcctcggcgtcttcctcggcgtcttcctcaccaagctcttcgtctcgttcgccacttgcgccgttcgcgccctcggaaccctcgtcatcatcgacgggaatggcttcagtcttctgtttcttggctgccggggcgcctgaaaagaggtgtatgtaagcgtgggaaagttggggatgaagaggatatccataaaggctaagggtaaaacgtaccttcctctttgcctttctccttgcttttgtctttgcctttgtctttgccttctgctgttggtttttcttctgctccttctccttccccttcctcatcttcgtcagactccgactctccttccacctcttcctgttctccctcgtcgcttccttcctctacgtcgggttcggagtcttcatatctaattcaacgcgcgatcgggttagcaaagaccaattatgcttaggaggtttcgcgcgacgtgtttcgaggtcgtctcgtgatggaggcatagctagtacaaccgtgcagaattgtagtggaatgatgcgtaggacatgcaagaatgcgaagaaagggagaattgataacgggatggaacaacatatgaactcactcttcctcctcttcgctctcatcgctaggaagggcctggagctcctcctcagtctcttgctttctcttgcgggtagtcatcgtaaaaatatttaggaggttggtaagaattaacttagtacagaggggagggaaggatggaattataaaggagagagagagagaatgttctgaattggcaaaagtcccttgagtcttgggggggaatggtaattatagagaggagcagagctctaagaagaagggagggggaaacccaagagcataagcgggagtgacggtgacgacatgggagtgacaagaccttagggttaaggtgatagcttacactccggagtgcgtggtccatgacagaagtgtgcgtgtcgccaaccctggattcttgcgctatttacattccgtgcccatctaactatggtatccaaatgttgatatccttggtatccttgatatttttaggtttgcgtcgattccttgctttgcgggggtcttcatggtcattgtgttagaaagtcaaaatctgccatactcggatctagcagattctcatccagaccaaatccgtatgtgccgaccattccatagatcagatccggtggagggaatccctgtgccatggcattggctcccccagggacctcgcggccttgcagcgcagtatcgttgtttccttggaattgccaagaagcctcccaagagtcaaagcgctcaagcatcttgcccaatccacgtgcgatatgtcgagtaagatgtcgatcaccggcagagacgcaattcattaattcgatcacacgttcaactagccgtcgcacttgtcgagcgttgatgcttaggtaagctgtgttccaattgattgcgaccttgagtaggaaaacagcggagaatgtaaccatagtgtgggtgaagatcggaacgccaacaatcgcatcccgaatatcaggctcctcaagaaccatattgagacatgccattgcggaggaaattgcgatgttggcggattccttgcggtccatggagaagacgggtgtgttggatggtgagagcgcacgaagagaaagcgagttcagctggaactttgcaaaatggtagtgcagaaccactcctttcgatggataagtccgcacataggtgctatcggctgtaatgcattccaagttatgttagaaccgagagttgctgagaattaggctaaaatgtcactcaccagatcgaggctgccagagaagtcgccattggtctactgcaacattgtatacgcgcaactgtccaaaatcttcctcagtcaatgtttgttcagtgtcgctaccaaacattcgatatgcctcagtcaaaatcataaagagagccacttgagctaaaagtcgaatgtctccggggacgatcatcggcagcgcgaggaaggtctcatagttgcggatcaccacatcctcgtggatgacaggtggccgcccataagcaatactgaagtgatggtcgcacacgtaaagcagataccagagctgcgcgcgctcatattgatccgtgtgtccacgggtcagacgctgataactttgatggagacccatctcggtcgcgattcgtactgcatgcccggacaacttccaactcaactctgacagccagaatgcccccacacagaggcctcggatatcatccaaggtgtgggcccgtgtgagggccatattggatacgagcgatacatactcgctgtagcagcggttcaaagtttccgtgcggttcggaatatgaagtgccgcgacagtcaaaacggctgcagaaagaagcgtcgatgcgcgacggacggacgttaaatcgcggtgtacaagaataattccaccccacagtagctggttcatggtgcgactgaagtacgcgaataattcttcggcttcatggagggagatcaatcgtcgtgagataaaatcttcctctagcaatgtctgtttcggtgcctcgacatgattgtttcttaggttccgtaatttagtgacctcgtatagactgcgcataggagcaggcactaattctgggtcttggagatcctgctccggcgacggctcccgagtaacatccatcacgacgcccagtccctcctggtgactgatttgtgtctgcgatcgactgacggaagggtggccatgatacgactcggcaggactggggccattgagagcctccccggaagcataggttgagagatcaggcagtccgccttgtcgcaataggtgcgaaacagccgcctgcagctgttgcatagtcgcattggcctgtgatttccatctataccagcgccattagaatagcgcccccgataggtccaaagcctcaccaaagggccggggcggggtcacacgtacatcccatcatcgttaacaaatttctgtgaaaagtcgtttacgacgcacttgataccgctgcgagtacattttgtacaagttgactctcctgaccgaaactcacagcgaatcttatgacgcttgcattctgcgcctattccctgttaattaggaggcattggagatgatgtggggaagactcacatgcacgagctttggagatcttggggacagaacgtgtcttgctctcttggggtgattccaggccagcgtcatcaggagatcgtttcagtggagtaccggtatccatgatgtgatgctactctagaggatagtgggaagagtcggtgatactccggcacgcagtttaggggagaaatcttctcccgagtggggggaaagcgtcggagtaaagcgagttggcacgagtacgccgaagagccagagataaattgcagtttatatttcaaggaggttgttatggccaatagggtaatgtatgtacaacatagcaagagaaaggaagaggacaaaaataaatcgtgtgacttgggaccccccgcagactcgacttccccgaaatcctcaccctagacgttattctgttgagatattgttggctttttaagattcaggtctgaatttcgaattggacatgttccttggatagagtctagtatatagcttattgtcctcgacttctaactgacaggctgacaggtcacaacacccgtggacaaggcattccccaggattcaaccccaattgagatcccccaaacaaaagagggccctgaaagatgacactccaaggcgattcgcgcacagcagttccacagcagatccacttaggaagtgagtcccggcccaagtccggtgcggaggaccagctacggatcgcctcggacttgatgcgaatgcggagactaaacttacatattgaaatacatcatcatcatcatccctcccatattccctcttcatcacaccaatctcaagaaaaatgcatgtcctcatcactggcgctgccggcttcatcggccaattgcttgcgaaagagctgttgaatgacccagcctatcgcgtcacactgaccgatatacatcaacctccgatccccgcgggcgttcgctatcctcaatccgcaacggcaatcaaggtcgatctcttgacaggcgccaaggacattgtcgattcttccttggacgccgtctatgcctttcacggcatcatgtcgtccggctccgaggacaacttcgatctaggcatgagcgtcaacgtcgatgcaacccgcaacctactcgaggcgctgcgacacacctgtcccggagtccgattcatctattcgtccagtcaggccgtatatggccgaccgttgccagagattgtgactgacagcgtaattccgaccccagagtcctcttacggtgccgagaagatcgtttgcgaaacattggtgaacgaatacactcgccgtaaattcatcaccgggtttatcctgcggtttcctaccatctccgtccgaccgggtgcacccactgctgcagcttcgtccttcctttccggcatgatccgggaacctcttgacggccagcaatgtgtgatccccattaaagaccgacagttcaagtcgtggctatgctcgcccaaaacccttgtggaaaatctccttctcactctccgtcttcctgcggactccgttcccccgcacattcgccagattaatgtgcctggaatctgcgtcacagtccagggcatgatggatgcattggaagccgtgggcggtgcagataaactcgcccttctaacagagaaggaggaccctgcgctggttccaatcttgaagtcatggccgacgcaatttgataacactcaagccatctccttggggttcaaacgcgacgagtctttcgagcaaaccgtgcgggattataaacagtcattgacacaatatagatcttgaaagttcaatgacatcgtttattagttgatttctaaactctttgtcattttacctgttacataaaacaaggaggtttctggtaactatagaccagggttgtgctagtcagtcagttgtcagcccaagtcgccatctgggcaccacccgcttttcctaccaactcacttcaactcttgggctgttcacccacttgagtgggatattctataattttttactccgaaaatcaattgtttcaaaatgccaacacaaatctcgcttctcgtgtacaaaggcgtgccagtagacttctccaaataccgacacacagcgctgcacgccctctactccgacggccaatatgattggcttcatgctgtcggcgcacaccctttcttcaaatttcaaaaggacacagagaacccgatttctgagccgccaatagcctggattcctgtatgtacggtgccggactctgtcactagggagaagattatttgtgcatgtgcttgcacgccggtgcgcaatggcaatagcgaccgagactggaactgccagaactgggtgggggaggccttgactgagctcgtcaagattggctgtttgaccaaagaagagcgcggagtggcgattggtaaaatggtggagattatcttagaagcggagctggaagacgtgagtcccgttctggataactgttctatgcaggaaattatgtggactaatgtggatttgttgcttgtacgtaggatgggatgtattagtctttatggcttttttctgctctggtcaactggtttcagctgtaggttgtcaatttatgtcatgccacaacctgggagacttcaacgacaaaatttcttcagagactgcagtaatgatatttagtttaggtctcttaatacatcgctagtcaaggaaacatagccagctgtacatatgccactggcacataaagcataacaccatcagatcggagacatcattgccaaacctgcgattctctcagcacgcgtcctggaaattgcatcaacagctcgcccaaacctgtccgtcaatggcaataagccgattaaacagctgattcctcgtctccatggcagtgagttgatatgactgccctggcatcttgccaatgatgagcaaaccgtcaaccacctccttaccatgaagagcccaaccaacaaccaatttccccttccatcccataccgcctaactttcgcatctcctggatctcagtcaccggcatagtgaacataaccgatccatctttgcgattctccaattttgcgtctccattctgcggcgtatcagttgtgaaatacagcagcggaggctccttggtcgagtcaataatcgcagtaccgcgcttgcctttgtatcgagcatcaaatgccacaggtccacttggtgttatcctcttccctctatcacgtaggacgccaacccgattcttagcatgatgtgaaccgattgctgctcgtaagcgatcgatccctcttttgctctcaacaccactggccgttgtttctcgaaataagcctagaatgctcgatcccaatgtccttttatggctcttctctggtgctggtggagcttcgaccgcctggacatggtcgtcaggcttaaccagtgcagcttgtttaatttcctcgttactagcacctagggtcagttcctccggattcaaagagactggccgcgagggtactttgtctggtgaggttggaggaggcggaagtggtgacgcattagcttcgccgatgcggagaagagtaatagccagctgagcatttgttggaatacctttcaggagggaactgttgcgagttagcattgtgagcatatgcactgattgaatgcatacttttgcaactgaataatcttccgccaattcggtaggcggcgatttagatatgaaacccctcgtctgatgacagggtctccaaagaagacgagcccgatcagaagtgtactcagcttcataaaaacgtagcaagatgtcattaatgaagctaggaatgccgggaacaacaccgtcgccaggcgcagacgaggactcagtcgaggaaacggagttgttgcggatagagcgctagataaacaaatttaacaacaagccatgagtaaaaccacgagctcttactcacttgcccatcttctcataggtatctgtgatgtcgcctattacgtgcattgaagagtttgcaatgtccatcacgctctgtttcataggttgtcgtgttttgtcatgggagtctgtcggtaccttcccatgggcagcgctttgcgcatcggcagtattggcaacaatatccatcgcgtctggaacgtcatcttccaagggtgcatcatcagggaccccttgatcatgcttcccaactgcgcttcccacggccacactggcaacgcttgcaacaagattactggcctcttgctcggctgcttcgcccttgaatttctcgggggccccggtaatactatcctcagacccaaggattcccgcctttggcttttgtacaccacccgtatctttgttgacaagagaaattggagcgggagggaacatgagtgatctacacggtggatagagcaccagggcaagtaggatgaccagcatagttggaacaagtagatcgagaaggcatgatagtacgtagacctacataatatcagtagcgctccaaatacatttctctagaatggagacataccgtgcaaaaggcagcggttcgtcgcggctccttccaagaccgtagtcgagcaatatgtttgatacaattggtcaatccaacaacaacggttgtgtaaaaacgttcaattgtagccctgagtttatccggcgagaattcatcgtcgtcttcacgcgtgaaatccagtttctgcagggaaacatcgggaactgctttgactcgatacatttgctggtgtgcaaattgacaaggtcggtttcaattctcctacattttcatgtggggtgctcaggacataccttgtcgaatcgtctaatgagcatccacaaatcctcatttgatagcccggccactaatggttcctcgatgacatctggagattcatcccatccaatattgctaatttccgctgtgtcgccagctttttgtgcaaggcctctctcatcctgttttatttgagatagcacatggctatcggttggtccctcgggaatttcaggatccgtagtgagattgttgtcggccttgattgtagcacggtcgactgaagcggatggcatcgcctgtctgtcggttgcagacatgagtgtgaaattgttctaaagttccctagattaacttgaagggtttgttttgaggtcaaccccattgagaggaagctttccatgggacctggaacctgtcttgtagttgcgcagactgtcgacgtcatcttccttcggtggcaatcaacacaaccttggaagcaaactggattattttaagtaacaaatgtcatagaataaattgtggtaataaggtttggctggtgaaaaagcactcgaagacatagacctgacttttattgtttgggtttgcgcgtgggttgacgaccaaggcggctggctgcacgagtgccattctgggtggtcatcaattctagttctaactgcaatgcaaaggatgaaaatgacctcgagatgtaaatgcgactaaattatataaatgagctcgttgtaaatcggcaaaccaagtaagatggatgcaagttaagagcagccctccccaggtggtcttacaaggattgcaatcaaccttccttatctctcttatcaacacgtgccagtattcccagaaaggcaacatcatcgcgtccaagcaaggagaactcatcttgatgataattcgctctactaatctgccatccagtcactggacactcgactcgccatgagcgaggagtgtgcaaaccccctactcctggggtggattaaagaatggctggatcaagctcgagaacggaatagcaaaggcgtgaccgtgtacgtatctcttggcgcccatcgggaaaagactatatctgacatcttgcaggtacaagaaggcttatgagtcaatgaaagcctgtccgttagaatttcaacatccgtctcaagcgcagcaattgaatggactgggtcctaaattgtgtgaccgcttgaccgataaactaaaggcccactgtcaagaaaatggacttccaatgccggaactgcctgggaaaggtttgtggtatcacttgcaccctggccccggaaacggacgctcaactaggtcgaataggtggaaagagagcatctgaaggcggcgtggatcaaccggcgaagaagcctcggaaagccaagccgtatgtaccgacattacgatctggtccatatgcactgatgttggccttgggaacccaaaacgagaatgaatcccaggggatgaccaaggctcacctgatcgaggtggcccaaccattctgcgacagttcgttcacggcacccccggacccgaccaagttctacactgcctggaattcaatgaaaactctaattcagaaagacctagtctatgaacatggtcgtccacttcgaaagtatcttctttccgaagaaggctgggaggtggccaaacgtctccaaaagacattacctggcgatgttcaaaccgccatgtttggctcccaagctactgcaacgactgagtcacagcaaagagcatcgacagccgaacttgcctcatttcaacaagatgatgatttattggcagacgctcaagaaaaactatccgaacacgacattgccaacatcgagcccatccttttcccagctaagagcttcactatccatctcgttttagacacccgagaagtccgcacctccaccgaccgcgactatatctccggcgaactgatcaagcaaggaattaagccgcaagtacgtgtcctggaagttggcgacgcaatgtgggtagccaagtgtcacgatccaactttcctcacgagacatggcgaagaaggtgatgaggtgatgctggactggatcgttgagagaaagcgtctagacgatctgattgggtccattaaagacggccgcttccacgaacaaaagttccggctccgtcgctccggcatcaagaacgtcatctacctgatcgaagagttcgcagtcacgcatcctgactcgactagcgggagtgcagctcaatgccaggagatggttacctcggccatcgcctcgacacaggttcttaatcaatactttatcaaaaagacgaaacatctggacgagtcaatccggtacctagcgcgcatgactctgctcttacgaaagatgtatggggtcgaagatgcgccctccatcggagacactgatagcaatatcaaccgtagcacggttcctgcatctccagtatccaaaattggcctcatccccggccgccgtctctccactgactcctacctcactatactggataatctccgctctcaagatccgtccatcacatacggggtttcattcgtgaccttctccgcactcacttccaagtccgacgttcttactcttcgtgacgtatttcttaagatgctgatgtgtacccgtggcgtgacgggcgaaaaagcccttgagattcaacagatctggccaacgccacggcatttggtggatgcgtacatggctctagaatctaaggagcgagagatgatgatagcgactcggatgtcggaggttgtagggcggaagaaagttgctaaagatctcagcaagcggattgcagaagtttggggggaggtgaatttgtcttagaaaggttttctttcaaggctcctttgaagatgacatagtaccgagttcattcgcaggtattagatacaaaagtaacgccaaaatgaaataaatgaatatataccataatgcctacctcttccttctcacaatcttcataatactttctttgttaatcctcaaagccaagctactcagcacaacagaaatactacttaacgccatggccagagcagcccacaccggactcagtctccagtgctcattggtcatgatcat

SEQ ID NO: 105 - DNA, 4395654 bp, Penicillium roqueforti (residues 1,465,219-2,930,436 of 4,395,654)
  misc_feature (85032)..(85336): n is a, c, g, or t
  misc_feature (96912)..(97035): n is a, c, g, or t
  misc_feature (167457)..(168881): n is a, c, g, or t
  misc_feature (174735)..(174875): n is a, c, g, or t
  misc_feature (186965)..(192855): n is a, c, g, or t
  misc_feature (360823)..(361014): n is a, c, g, or t
  misc_feature (391959)..(392118): n is a, c, g, or t
  misc_feature (496716)..(496904): n is a, c, g, or t
  misc_feature (596248)..(596477): n is a, c, g, or t
  misc_feature (682798)..(683428): n is a, c, g, or t
  misc_feature (719087)..(719175): n is a, c, g, or t
  misc_feature (843422)..(843591): n is a, c, g, or t
  misc_feature (1092721)..(1092892): n is a, c, g, or t
  misc_feature (1157553)..(1162652): n is a, c, g, or t
  misc_feature (1192588)..(1192765): n is a, c, g, or t
  misc_feature (1228267)..(1228378): n is a, c, g, or t
  misc_feature (1338795)..(1338950): n is a, c, g, or t
  misc_feature (1570178)..(1570379): n is a, c, g, or t
  misc_feature (1572427)..(1573064): n is a, c, g, or t
  misc_feature (1778995)..(1779142): n is a, c, g, or t
  misc_feature (2068487)..(2068564): n is a, c, g, or t
  misc_feature (2226929)..(2227148): n is a, c, g, or t
  misc_feature (2309644)..(2309799): n is a, c, g, or t
  misc_feature (2399265)..(2399444): n is a, c, g, or t
  misc_feature (2468197)..(2468413): n is a, c, g, or t
  misc_feature (2498734)..(2498793): n is a, c, g, or t
  misc_feature (2576637)..(2576892): n is a, c, g, or t
  misc_feature (2701425)..(2701645): n is a, c, g, or t
  misc_feature (2766528)..(2766643): n is a, c, g, or t
  misc_feature (2901310)..(2901574): n is a, c, g, or t
  misc_feature (2994310)..(2994455): n is a, c, g, or t
  misc_feature (3046176)..(3046296): n is a, c, g, or t
  misc_feature (3064322)..(3064652): n is a, c, g, or t
  misc_feature (3131107)..(3131265): n is a, c, g, or t
  misc_feature (3155041)..(3155788): n is a, c, g, or t
  misc_feature (3156743)..(3157054): n is a, c, g, or t
  misc_feature (3187005)..(3187665): n is a, c, g, or t
  misc_feature (3198552)..(3198823): n is a, c, g, or t
  misc_feature (3203257)..(3205231): n is a, c, g, or t
  misc_feature (3205958)..(3206270): n is a, c, g, or t
  misc_feature (3207716)..(3207874): n is a, c, g, or t
  misc_feature (3257409)..(3261006): n is a, c, g, or t
  misc_feature (3261812)..(3386811): n is a, c, g, or t
  misc_feature (3388273)..(3394703): n is a, c, g, or t
  misc_feature (3514038)..(3514368): n is a, c, g, or t
  misc_feature (3520886)..(3521278): n is a, c, g, or t
  misc_feature (3528699)..(3531253): n is a, c, g, or t
  misc_feature (3533644)..(3533755): n is a, c, g, or t
  misc_feature (3544131)..(3544318): n is a, c, g, or t
  misc_feature (3640988)..(3641179): n is a, c, g, or t
  misc_feature (3768183)..(3769905): n is a, c, g, or t
  misc_feature (3862530)..(3862864): n is a, c, g, or t
  misc_feature (3867901)..(3868538): n is a, c, g, or t
  misc_feature (3874100)..(3874791): n is a, c, g, or t
  misc_feature (3907480)..(3907707): n is a, c, g, or t
  misc_feature (4023569)..(4023725): n is a, c, g, or t
  misc_feature (4214675)..(4214820): n is a, c, g, or t
  misc_feature (4215907)..(4216419): n is a, c, g, or t
  misc_feature (4384696)..(4387115): n is a, c, g, or t
  misc_feature (4389540)..(4393053): n is a, c, g, or t
  misc_feature (4395652)..(4395652): n is a, c, g, or t
ttcaccattaatggttttatgatgatggccactcacgataggatagaggacaccagcagcaaccggaaccaaacagaggttatatataaccgcccagccaaagttcatacggactcgattgaacacacggcgactgagcaggaccagctccaaaatcgtgctgagatctgagttgaggaggatgaagctggcggaattgatagcgacgtcggagccagatgccatggcgatgctcacatctgctgctgccagagcgggcgagtcgttcactccgtcgccgacgaaggcgacaatgggacgtgaagggcttgaactcggtgtagtctcaccaccggccggtgttgtattctgcgaacgttcttgaatctgacgaacaaagctggctttctccgctggtaggacattggccattaccttggagcgcgggatgcctagcatgtctgcgacggcgtgggcggtagtctggttatcgccagtgcacatgaagacatcaacttgacgcttctgaagctgggagattatctcgacagcttccgggcgaatcgtgtctgatgtggcgaagataatagctggtataaagttggatggttcggtggatgggggttgtacttgacgtagtgaaaggactgcagtagactttccagctgactggtatttcgccagcagactggaaacgaaatatgtgtctgtttgtggggatagtagactgttgagaagacgttcattgccaattgcggcttcatactgcccttcgtgctcggagccagacacagtaaaagttcctttcatgccttgcccggaaatctcatgaacgtctgacgacttgacagaggaagatttttgtgttttgcagaattcagtgattgcctgggcaatcggatggttgctgctctcttccattttccgagccagagcccatgcgaccttcgcaacttctgggtcactggtcaaaacttcatgttcagaaaccttcagacttccaccctcagtcaaggtgcctgtcttgtcaaagacgattgcattcaagcgactggcttcttggaaggcttcaccaccaccttttaccaggataccatacttcgctgctaggccgcccccaacgaaaagcgctgtaggggctgcaagggccagaccgcagggacatgccaccacaaacactgaaatggcaaattccagcgcccagaatgtccagccaccatgtgcgacatcgagataatctgcggggagcacaccggaatgaccaagtgccaaccaaataacgaaagtcgaaatggcgatcagagtaataataggcacgaaatgcgaagtgagaagatcagcaactctttcaagaggtgcacgcttgctttgcccctcacgaaccacggcaatgatttggtcaagcatagatgaaccaccaagctcagtaatacggatccgtaccggctggccgacgttaaccgagcctgtatagaccatgtcgtcggctgttttcttgactggtcgcgattctcctgtcaaagagctttcatcgaattggtatgacgcgctgtcgacgatgactccatctgcaggaggcgaggcgccatggggaatactgacgacgtcaccaacttccagcaggtcgacattcgtacgcttaactccatcttcggaagtgtcatcggacaacagtgcctctgaaggtcgaagcttgcccaaagatgtcacagcatcgccagttctggctttactgtaggcctccaggaagcgaccaccaagaatgaacagagttaagaagacaaccgagtcgaaataagtcgtgctatgggggctcgacttggtacccacaactgcgtcaacgataagtaccgccaaagacgagatataggctaccgatgtgcctgcagagatcaaaaggttcatactaccaaaacggtagaatcttcgaaggatcggcactcgacttccaggccgccatagcgcataaacctccttcgcagcacggacatggaacacatcagtgccgtagaacatgacaggagttgacattataaacagcgcccattcgatgcgggtcacactgccagaccacatagtttgctccagatacattcgaacagagttttcagatgagacaagagacataaatacaatccctatgaagaaagtcggaatggcactgataaagacgaaaagcaatcgcgccaacagacggcttctttcatgatgctggatcgcacgagaccggtcttcaatactaggcgggtgataaacagtcgcgcgaaaattgtcattcgccgagttgatcgctgagattattttgcgaacggtaagaaatggtggctgtggagtatatgtgattttgacgatgggggttttctcggagagtgcctcctcgatggtgacaccgggaaccgatttcactgcccccaaaacagtttgtgggcaatggtgacagaacatcccatccacttgtatagagattgttctgatatgggcagtgctgaacttttcggtaccaattttcaatggagagacactattgacggtggcatcgtatccgaggtcttcaatcttctctatgattttatcaagattgtctcggccttcaaattccaccctgccgctatgggaaagcaggttcacagacacatcacgaataaaaggaagttcttcaagtcctcgagtcacccctccgacacaagagccacaggtcatgccggtgattgcaatctcgctgacgtagtttgctgccagctctgcagatgccggtggtttggggacttggttcacctcgtcaagagatgcttcgaacccagcatcattaatttgctcaacaatctggtcaacattatcgcgaggtccaacataaattactgttgcgctgttggtgagaaggttgacagtgattttgttcacgaacccgagttgttgaacctgtgcggtgatgctgttggcacacgacgcgcagctcattcctccaatgctaatctgtgcggtgaactcatcggatgattcagcggacggactaggatgtcttgcgatgtctgtgggtaatattgaagcagacacatcaggttgaacctttgctttggaggtggcgaatgaacggagaccctcctgcacagcatcctctggggttgactcaagctttgtaacagtgatgtcttcttcgtgctgcttgcccaatggtcggaagggaatttgtgaggacttctcgtccaaagatcctagctccgttcgagaagaatgacgagaaaaggtctctagctcttccttcctgcatgcatcgcagttggcaatatgtcgtttatgtcggctcgtctgaattcgctctttaatattggacgagatactagaaacagaggttcgcggcgaggagaagagcgtagagccgcggtgattccaggaagaggtgtcgagttccgcgatgagccttcctcgttggtcaaatgtcgttacatagtgtacttcaaacgcggcatgaatcagcgcgttgacgaggtcggcaggccgaatggcggaactgtggctcgcacgcacttcatgcgtcaaaatggtgacttcgatgttttcgactgtaggagtctcagagagcacttcggtgatatatgcaacacatgatgtgcagtgcacattcgatacaaaaaagacactggtctgggtatcaacctcttgatgggctgcctccagatcgaaagacttggtgttgggttttgatgacatgactgacggagatctctgcgacctaaagatgaggtacagcgtggaatatatcgatcttgcaagtcctcagcagagtcgatgattcaatatcgctcagacaaggttagaaacgggcagttgtcgggattcagtgtttacagagcggcctgatatcaaggtgaagggaagagcgattataaaactgggcagggaaccttttgcaatgcagtataatattccactaagaaagaaaagaaagggaaaatcctagaagtgggtggctaagtttaaacatggcgaagatgcgccatttgtgcgcgattcctccaaaccacgcacaaataccgcattccagacatgtcgaccatgacccctgtgaccactatgtagtatgtcgctagtgtcgaggcaggcaatcaagaatgaggccggattctcgtattcgacgttgtaaaagcaaccacttcatgtggagtaccaagtctgatgatgctgttgcagtagcagtcatggatcatctaggaacctcaggcaccgaggcgcgacaaagaccagacggttctaagcctaattgggctagcgtaccctgagccaattaaggtcacgtgattcatgaatggaatccatcagatcagccatggagcaggagacaagcgacaagagataaaggaactgaactgaatcgagcgatttattcatttatacctgactcactcactcctggttcccgacatccaatcagctagaacttcaagtcgtatgtccgaattcagctctgcagattccggccaattacataagcaggttgaatacttttttctcaccttccactttcccttatcgcgattctcgtgacagtcgataaacccttcgctacaaaaaaaaaaaaagaggctgcgcgacgtccagttaaagaattctgaggctgtgaggactcggcctccatcgagtgcccctgtctacattcaatctctgacctcttacttttcgctttaaccaacatgtcggcacccagatccggcgcgcgtccaatccctccccgcgggccccggcctcctatgggacgactggccagtctaaaaccccccaactctactcctatcaatcgtccaacggctattggacgctctcaaccaccccgcccgacaacacacccgaaaacatctaattgtccaaacccaggatgccctgctccgcatattgtcgatgatggaggcgtgagggtctgcacgggctgtggtacagttatcagcgagaacaacatcgtctctgaagtcacgttcggggaatcctcgtctggtgcagctgttgtgcagggatctttcgtcggagaagatcagacacatgtacgcagctatggtccgggtttccagcgcgggggcgccatggagagccgggaaatgaccgagcaaactggaaaccggtatatgcttcaactttcccgggctttgaccatcccggagagtgcgaccaaagctgctggtcaggtgtttaagcttgccgtgggactcaattttattcaaggtcgtcgcacaaagacggtagctgcggtctgtttgtatattgcatgccgtcgccaaaatggcaataccgtcatgctgattgactttgccgatgtgttgatgatcaacgtcttcaagcttggtcgtacatacaaggcacttctcgacgaactccgcctaggtggcaacgtctttctcatgaaccccatcgaccccgaaagtttgatttatcgtttcgcgaagcagctggaattcggaccctctctcatggcggttgctggggaggcagtccggatcgttcagcgaatgaaccgcgattggatgaccaccggtcgacgcccagctggtctctgtggtgccgcactgattcttgccgcgcgaatgaacaacttccgccgaaccgtgcgtgaggtcgtgtatatcgtcaaggtgacggaaactactatcagccagcgtttgaacgagttcggttccaccgagagtggtgaattaacagttgatcaatttcgttcggtccaattggagaacacccacgatcctccatccttcactcgcgggcgagaaggtcggaaaattcgtatcaagaagttgccagagactgcggcggaactcgaagatgatgactccccaacggaaagtgaagcagaatcagtgcagccgcctcgtatagatgccgacggtttcgctattcccagtctccctatcgacccggctttgactgcaagtagcctcggtcgacgtgcatcaataatatccaaggcagtgaatgaagtcgttgaagatatcaggaacgagccgatccactccaagggcaagggcaagcgacaacccacgccagaaccatctgccgagcaggttgcatctgaagcggcgctggaagatgaaatgcggtctatgcttgcccaaggatcatctatgattgagagcgtcggctccgaccaacccccgcggccgaccgtttccgacagcactgaaatcgatgctgccgagtttgaagatgaccccgaagtcgccaattgtctgctcttgcctgccgaagtcgagatcaaggagtccatctgggtgacagaaaacaaggagtacctccgcactcaacaagcaaaagccctgaagcgggccctggaggagtcaaccggcgggggcacacctcgcaaaccgcgcaaacgccgccgtggccgcctgggagatgtcacctatctggagggtgagggcgaagatggccgcagctcccgtgcctcgacaccggctgaggcgacacgtcgcatgcttgagcgccggggctacagtaagaagattaactactctcttctggacacattgtatgggggtgaagggggagatgcaaagacacaaagcctgagccgaagccaaagtcgcagccaaagcgtcgtctcacggcgcagcgccagcatcgaaccgcaggcagccacacgatcccggcgtgcaacgccatcagatgccaaatccatccgtcctggttctaccgcaccactacctactccgccgtccactgctccagataccattcagggtgcaaagccgctcatagccaaggatggccccatgaacaagcttgggacagatcctgaggaggatgaggatgaggaggacgactatgatgacgacgacaaggatgatggcgtcgacgacgcatttgcaggcaattacgaaagtgactatgactatggcgatgatgatgactgagaaagcagacctcagaagtccttacgagcattttgtcatatgtccttttggtggattggagttgtgaggatgcgatcggcatccacttgctttctttgtcttctattttacggccttcgagatgataccatgtacctatttcacccatatgagcattggggtttccaaatttaattatcgtattaatatctcacggttggaattggcaccttgctcggttgcctcgacgtgctctaagcaaaacactcgctgaacctgagtagtatcaagctctagcgcaccaatagtaatgatgattatcattataccacaccattttcccacctatttacctttcacctattccatgattgtaggtaaatattacttgaatggtcaaccgtgccaccactagttaactacatcatagttcctgctttaggtaatgtagcttgactgagcatggtaagtattcggttccttagaaatgcccgcgaaaggcaccaggtcctgagtttagcatctattttgggtttcagatactcttgacataagcaggtgaggtaacaagggaagttagaagaatagactgagatgagaaatctaataggtaccgacgctcttggctgggtcacaaatgacaacgggcctaggaagtcaagagctgtcgtcaggactaggtatcaaagtgggcttatttaacgaccaggaacatgtacttatgtacatctgtatacctcctgaatgctagtgaaagcaatcatagttcgtacaaccaatatacgaaatcaactgggctggctctaggtgatttgttcttaggcgtaggttttcccctgctataactcgcataggtgtataatacaaggaactcgggtttattatggtattcacgccagaatgatttcaatctttttgatttggtgagatagatagtcgtaaataaataacggttgtcaaaagcatgttgaagaactcccagattacgacgccattttccatgaaagagatggaaagcaaaccacccaaaaccatcaaactctccaccgggcgggaaccgaattgggccggactgggtcagtcaggagcgtgagtctcataactaaataagcaatagtgaagaaatcttgagaaaatgtttttaaaaaaaaagaaagaagagaggaaaagaaaatatgatagaacagtcggaaagaagaccgagatcgatcgcggattggttggatgtcgagtcatcgggtcggatcggtcgatgtcgtcggatggcacgggattgagaaatcgaatgcatttttggaagaagttacgagtcgatctccattcccatttccgcgcctccgctcagttcgtcgaggctcgatgcttgcgggttgttggacagggcttgttggagaagtggcaagccagtgtccatggagttgaaggagacaggctgtgctctaggccggtcggtagctccgaggggagtagagccctcgaatatgatgggggagctacgaaggttttgaagacatccttcccaagaggaggcaacgagctggccttgagtgaggtcttcggtgaagagataaaaggcaggcaaggatccagaagttggagtggcagccacaagataggcgttcagagcgcggcttttcataagcatctgggagccgtgcaggtgggccgagtattggttgtcgatatacttggtccagccacgaacagcaggcgccatgtcaccgtcagtgttgacacgctgccagccgatacctaggagacgagtggcatcatctactaggggctcaacgggcggggcagggcctgcattgagagtgcggtgctgatcgttggacctagggtcgtccaggcgttgacggatcgaggacagtgcaatatcatccagacctggtgcagatttatcaaggcgctgagacttgcggcttacttcagcagcatcagaaagcagcgcgtttgaccgcgaggggacaggtgcagcagcagcctgttgcgcctcagactcttgttcataccatgtgccggtttgactctcggcagatatcgcaaggccagtctgcgggtttaaaagagccatgccttctccatagataggccggaccttggtagctggcaccgcctggtgtgccagaggcgcgctgggagcaacggcgtcttcaaaagtggcctcatcacgggatcttttgcgggagggcttgggcaccgcaggggcagacgataaattgaagctcgaggggacagacggtgtagagctattgttggtgaagacagggctggtgtttgtcggatagctgttgaagctccctggggagtcgaggaaagaggactgggagaactgagcgaaggcgtgttcccggggaggagagaggaccgtgaccggcccgtctgagaggcgattaagaatcattggagacattgttgctcggaatcgtcttatatttaagccaaagggaactgttctgttagattaggtgagtaagacacaagaagcttcaaccacctgtggaaagacggaagtaagagaggtaaaaggaggaagatatctcggtaagtaagtagaagaatatatatagatgagggagaaaggtgggtttgagagaaaagagaaagaattgggaggagaaaaatgggcgaaatgggggaaaaggaagaaagtcgagcgaagtaagagtaagagcaagggtaagagcgtgagacaggaaagaacgatctgaagaagtggatgaatcgatgcgcgaaatgcggaggtaccaagccgaacggtaatataccagcaaaaagcagctatccgatcggccgtaacggtaatgatacgtgccctattaacgggtactattggctcatgcagccaagacctcaagtggagtcgaggtggatgggtccaggccagaggcgatcggcctatgaggacggacctgtcgcccgcgaggattacatcacgtgaaattcataaaagacgcatacatatatcacgtgctttatgtgaggtcatataaggttcaagtctattgagatactataacgacatgatgggaaaaaagaaaaaaaaaaaaacacaacgaccacaagatcaggtccaaagcaaaccgacaccagagctcgtgcaagtttaccatcaatcaatgctcgtagaaaaaaaaaaaaaaaaaaaagtacactgccaacaacaacactttcatgtctttgtatacatcacagaaatgtggctggaaaaagaaaagattggtaataaaacagccaaaaacaagttcctcctttctccattgcacctcaggggcccatagagacaaaagtatgagcggcagtctctgcatgtaaccgagagacgggaaggaacggatacccgctacataactgcacttatcctctcgtgctgtcgatccgagaatggatattgtggcttcaaacactgggtcgggttttcggtgttccaattcataagacggaaaaacaaggatctgataagtgcacttaagcattaccagcagtagcaccgccaaggtagcccttgacacggtcaacagagtcattggcgtagctgggagccatagagccaacgaagaggaagaaaataagagcggcagcaccaaagacgacaaatttgcgctgcgcagggcggttgttgccatagtcagcccaggcacggccggcagacgaagtgtactcgcgcatcttgtcgccgccaagcttgtaccaaacaagacccagtagagcaatagaataaccgaagaactggaggccagtgacgggagtctgccacaggaacatggaggcagcaaccaataggatatccttgaggacaccgcacagagtcatgaccagggaagaggtcttgccaatctgtagagagtattagtaacgcttccctcgggagtaagatgcgggttgctaaagtatcacttaccaggaaaacgaccgagacgttgagcaggaaagccacaacggcattgagaactagaagccagataccaacggagtagacatggtccatggtgacatgggggaattccaagaacagagcaacgacaccgttcatgacggcacagatgggggcgaagtagtacagagaaaccatggggtccatcttaaagtcggcggagctaagcagaccctgtaccatgaccagacgggtggcctcgaaaacgataccaccgagctggaacaggaaaccgaccatgttgaacttgatctcaccgaaggaggcaatgatcacaccgatcacgatgatggagacgttggccaggaccttcatgttggccggagccatgcccataccccaggttgcgaggagaacagccacaggggtggtggccttgagcatttggataaaggcaacgctcaggtagaggtaggtcatgttaccgcaaatcaagctcagactgaacattataccgatagggacgatagcgcggaggtagacacggccggtcatcttgaccttcttgcggccatcgaggacagtagtggtgcgagcgaggatttgggtcatgacagtagcgaaagacagatgccatgttgtgaggatgatggggaaacctattcacagcgtgaggttagtgccagtttcctcgcattgtatctccggtctgacttacggaagttggcatagtcgaggaggtacttgttgaacaggataacagtggaactcaaggtgatccatgtactatcaaaatatcagcaatgttctccgatctgtctggttccttccgatgttgctcacgtcacatagaccgcggggtggaatgtaatgcccggctgctctgtcttctccgctgcggggttgacagtaggcaaagactgctcccggggagtctcgccagaggcgcggaccttctcgccgtcgctcattgtaaaggtttgagattgatcggacaaaaagcgcttaaattcaaaaggtcgtggccgggacaggcttccttgactaaatgcggaggaagccacggagaaaagtgggcaagataaaaagggaattagagggaaatgatcactaaaatgctccaaagattaacgagtgcgacagaaagaccaaaaaaaagcgataaataaaaacgagcgtggatgaagaaagcgtgaatgaagaaatgatgatgaaggttgaagggatggaatggggtacgtactccgggagtaatttttttcggcaccaaacattaacttcaatttgggggtttgacggagaaattaagggaagaaaaggcagttattgtaaaggaaatcgacaagaagccaaacataaaacagcaacgacaagaacagaaacaccaggtcaagagagatccactcgccgcaaacagaaagtgagaggagaaggctggtgtatgaatgtctgtacatgtatggaaagattggtatacgaattaccattactccggaccttggttacggctctgctaaggccacctatactcttcgcttataatttctactgttacgtagtggtttcatctgtatacccgttttaccagaaccaataccacttgtactttactagctcttaattttaatttgtgaggccatggatttgctcgtggcgacagtctccgactccccttttccctgaaataaccaccaatcacaccagcctagtcatgggatccactggccctaatcaacacgcttatccttaatctcaatcagattcccatcctaactcatgtgaatatctatataggtatgtttgacatcgacgaaaccatcggcactctcggaatgtcctaaatcaacgggtttgaaattcaaacccgaaacagcgcagatccaaattaatagtagggcattacgcaagcagctgttagccaaggcccaccagaacccgcgttcagtgaccctctggtccatctggtcccttacgggtggagaatgcggcgatccgccctctgtctgacgcaatcaggggacttccagccccccacaagcatattgtgcttggaccagtggtggtggggggaggagacccttaagcttttggtgttaacgggagttagtgtttcgagcggcaattggcaattggcaattggcggtgtttgctggttcgagaagttgttcgtcaagggggcgatcaatgggatcggttgtttgtattactttcttaggagtgacaatcagtggaaccagatgctggcattttgtaaatctcgcttctcatcgagaccgccagatgggatgatcaactctgcggatgttgctccgggaggattcaaggtgtttccttttaggacggtcctattgtattggctatttgatgcatgtgagacacagggacagtgtctggtgtactccgtacatcgtggtacaatgtatacacggggaaatcgatgtgatgaaacatggatcaccatctttaataataagttcaagatagcctcgtttggtctagcatcacccttgatggaggtccatacaaactacggagtaccaaagcaatattggcgtcctaatttaaccacagccaacaatgtaccaatgcctacatcggtggcgtttttagcccggccacatttgatcgagattcaatggttgccccctatccatacagtatcgcccctttttctctgttttcttttttttaattcttctagaataatgttctgacctgggattgatatgataacgggcattccagaggggagatactgaatgctatccaatacccactaggggaattctaatatcgactcacccgcatgcgaaaagtaaatgcagattccatgcactccaggtccctgcttttggaggtatcatgataagcttaagaccaataacggctttgcgctaaatgtgatgtgttcaatcttaaccagggtccttattacagcgtggtgagatgagattgccttacgcgttcttttactccagattacttgcctcttagattgagccctgcagcactgcctccccctgagtacattattgtaattgtaattgagcttgtcgatgtgatagggcctcgggagggcctggatgtgaggttaaaaaaaaaaaaaaaaggaaattaggccataataaaaacagggaataacaaatcataacaaatcaggaatcaatatcaatatcaatcccaatacgaatcagtaaagctgaaacaggcacgtcgtctccaccggatccgtttaacccacaaacccaggtgcgtctagatacccttagcttggccggtcacgttgtcctcccacttccccttcttctttggttcctccgcttctttgccctttattatccctccattccctcttcatcttctgcagattcctgcagctgtgcttctatgctgaacgtcgcccgcaagacattcaaacgagtccccagttttcaggacctcctacaaggcagaatgacccaccctgacatgtaagcacttgtccacccatcaacatccgtcatcgctgacaattgcttcgcagttctgttgacgttctcgtcattggtgctggcccaactggtttgggtgccgccaagcgtttgaaccagctcgtaagtctttcgctgcttatttactgtgtgggagaggggcacaaaaaaaggggggaggggtatccgggaattgaaaaagctaattgagtatacagaatggcccctcgtggatgattatcgactcaaacgagacccccggtggtttggcttccactgatgttacccccgaaggtttcgtaagttgcgactcggtctcaattgtcagtgtcaacactaacctagttcacagctctacgatgtcggcggtcacgttatcttctcccactacaagtacttcgacgactgcatcaatgaggccctccccaaggaggaggattggtacacccacgagcgtatctcctacgttcgctgccaggaacaatgggtcccctaccccttccagaacaacatctccatgctgcccaaggaggagcaggtgaagtgcattgacggcatgatcgatgctgctatcgaggcccgtgtcaccaacaccaagcccaaggatttcgatgagtggatcgtccgcatgatgggtacgggtattgccgacctcttcatgcggccatacaactacaaggtctgggccgttcccaccaccaaggtaagtcttgacttcacgtccctgggacggaaacatgctgatcgatgatctttagatgcaatgcgcttggctcggtgagcgtgtcgctgctcccaacgtgaaggccgtgaccaccaacgttatcctcaacaagaccgctggtaactggggtcccaacgctaccttccgtttccccgcccgcgatggtaccggtggtatctggattgctgtcgccaacactattcccaaggaaaacacccgctacggccccaataacaaggtcgagaaggtcaacgcctacaacaagaccgtcaccctcgccgacggcaccaccattggttacgagaagctagtctccaccatggctgtcgactacctcgccgaggccatgaacgactccgagctcattcccctcaccaagcagctcttctactcctccacccacgttatcggtgttggtatccgtggtgcccgccccgaacgcattggcgacaagtgctggctgtacttccccgaggatgactgcccattctaccgtgccaccatcttctccaactactccccctacaaccagcccgatgcctccaagaagctcccgacccttcagctcgctgacggctccaagcctaagagcaccgaggctcaggacggcccctactggtccgtcatgttggaggtctctgaatcttccctgaagcccgtcaaccacgagacccttcttgccgaatgtatccagggtctcgtcaacacccagatgctccagcccggcgatgagattgtctccacttaccaccgccgcttcgaccacggttatcccacccccaccctggagcgtgagggtgccctcacccagattcttcctaagctccaggagaagggtatctggtcccgtggacgcttcggcagctggcgctacgaggtcggcaaccaggaccactcctttatgctcggtgttgaggctgttgacaacattgtcaacggtgccgttgagttgaccctcaactatcccgactttgtcaacggtcgccagaacaccgagcgtcgcttggtcgatggggcccaggctctcgccaagaagcagtagataatgaccccttatttctttttaacttgtcccaccattcttgtctgaagtgaagggttcttttttttcctccattttttgatacaattgaaacgagctcataccgtcatgggaaaattatacacgagagagcatttgaagcggcatctggaagacgatcgatctttgttggcgtttcatcttgttacttaacaccatccaacccccttcaccctatcatctacctattattccctcttccattagccgacagccgggacttgcttttgatacacttttctagactgccttgatatgtgctattgctcattttaattcattcagttgaccgatgaacctcttccctttctaaaaatgcagtggctttctcgatacttagcacgtgacagtgttgcacgtgacccatatccgaccgctgcgacgtgctaagcagatctcaccctatgtgggcagagtgtttcgtggcatttctcaccccaccaataccattgctccctccagttacactcgccacaatgcagatcaccaaccagacaatcactaacacacacaccgcgagagcctatccccatgtatatccaagccatgtccacccatgaacctaggaaccaaaacccctgaatggcaggcccctggattcgacacaatcaatctaccggcaaatgccgccacagcgccatcaaccagacacggaaatataccggaacaaggcagttcaaggttattctacgcggtggcgtagtggatccgcgcgcagagaacgcgggtcaaccatgaaccaatcgtatcgaggatcgaaaatgtacaatctaaacggcatttcctgcaggcaaaagcaaagaaaagtccgagtacaacatcagcaaagtacctcagcaatgcagagtgacgtaggtcgggggtttaacaccattcttgtggtgagatgtgtcaatggctaaaagggcactgccgaggccgcgtcagatctggaggcaagccagttttgtggttcttctccactgaactattgatagatttgggttgccgatattgttgtttcagatatgaattgttgactgacattccagatcgcttcttttgcattttaacgtgagacattgtaatctggcccaaggcttggagggttatttttgatatttcttgtggtatgttcaacatgtctgggactgcttatgtgtgaggctggtttcaatatctcatattggtaattaaatattaatgcatacttccattgcccgtatagtcgatcatgaggttttggggcgagaaacatcataccataaatatacagaattagagtcgacaggtcagtacaaagccacaggtatcggtagaaaccccgctgggacagctcatggtggactcgaagtggccaaaccgccggaggaaagccaccaattccaagcacccacacgatctcttcatagggctcctatatggcgattttagtgtgagagccacagtcctcgctgatgctattggccgcactggcaggcgaaactgcttcatcggccaagactgcctcgtaagacatagtggacgctaaggttaggtcccggggtgggacacttgcggccggacttgacgacacaccgcacgacaagaataaaacctgcggcgtcgaggctggcgagtcaatggacatgggtgtatatatagcatctgtgtggcttgggcggtggttttctccgtgactaaattgaacttccggtgattcgttagatggagcaggtttttcgacttcgggagtttgacatacctatctcttcttcaactgccttaccgctatggagctcgagttcgcaggcctgcggtgacagagcaaatttcaccttcagtcgcggtgggtcaacaaatcggtctgcttgcgagtacactccgatgggaattgtcacttgtaccgacgagtgttgggttggagatttgaggcatgactttgtcacagaagtgtgtagaattgcatctgcagaaacatggctattgtatcttggagatgtagactcaaaacatgacccgtcttgactcagccctgtggtatcaatatccacatccgaatccgtagagatacaggagctaggatatgggtccgtttcgtcgcagctctctaggtgcagctgctcgaattcgacagtcagggtatgacggatatagatccgctggaggtgagattcaacatccttttcctccagggcaatgatggttgggggccgtctgatcatgtttccagggatgaatgatgatcagtcgcacgaaagccctggagcctggaggtcccgtatatagaaacatcgtgtcttaggaagtcacgtatcttcacaatccaagaaacctcgaccaggatatgcggccgagaagatattgcaatcgcgaatgcggcgtagtccctaaatagtgaatcagcaaatgcgatagatgcctagatgatataaatcctatcaatccctgaatctgtgcaatataaatggtgtaaatgtatcccatcgactcgaaactggacaaatcagacatacccattccatctcaccactgaaagggattaaaataacatacagatatctttttttgtactctgaatctctctctccccctctaattctctagggaaagccctggagggaatattaatagtcaagtcaggctcagcccctcgacactagacccaatttctacggagcctcctgttgatccttccccctctctccagcgtcgactctctcacacacacacacatacacctctctctttcccccaactattcctcggatcatgcatccgctgcgtttccgatagcctgtctttcattgaccttttcgaccttgcttcccctgaatacctcggcacatctccggtcgctgccaaacctcaaatctccgccatgaacggagatctcagcctgtcccagactctgggagggcttcggatagccaatccagacgattcgcctcccccaacggaggatgcgaccggtgggtcaacagactctaatccgttcggagcgccggacggttcggtatcaacacaacacaatcccgcacatgacgaacacacctctgcctttcctcctgcaaccatcgaagtcccggtgacagacgaccgtcagacttcattccttcaaccctcccccgagataacaccacaatcaaacacatatcagccctattcggctccatccctctcaacgcctccgaatcccaaccgacccctttcctccgtatacgtgaatggctcagcaacctcggtcctccaccgtgagaattcatatcgcatccgaacagattcgggtgcttcatccaaatctgggtctcaggcgcgcttagacacacgaggaggctcgtcggcattacatgccggtgtgctggcgcgcgacaactcccacagcgaccgatcctaccggaccgcgcagattccgggcaacggcccggcggtgatgcgtcagtcatctcgatcacaagcaagaagtggcggcgcatctcagatgccacgaacggcttacatgccagaaaacggcccaatggcgagtagcgaggattggcaagaccgtggcgccgcggtctctgtgagaaaggaggtggatgccaacggccaaactgtctctcgctatatcaagaaaggcgttcgagacttctcgtttgggaatactctcggcgaaggctcctacagtacggtcgtcttcgcaacggaccggcagactttgaaggaatacgcgattaagatccttgacaagcgacacattatcaaggagaggaaagttaaatacgtgaacatcgagaaagatacactcaaccgcctgaccgaccacccgggtatcgtgcggctatattataccttccaggatgagcagtcattatatttcgtgctggacttgtgcaaaggaggagaattgctcggtgttctcaaacggatgaccacatttgacgaggagtgtacaagattctacagcgcccagattcttgacacgatagactacatgcacaagcgcggtgtcatccaccgagacctgaaacccgaaaatgtgttgcttgacagcgggatgcatatcaagatcaccgatttcgggacggcaaagatcctcaagactccacgagttgatcccagttcaaatggcattcttcctcttgactcggccgagcttacacaggaagagcgggcgagctctttcgtcggcactgcggagtatgtcagccccgagttgttgacggacaaaaatgcatgtaaagccagcgacctttgggctttcggctgtattatctaccagctcttggccggtcgtccaccgttcaaggctgggaatgagtaccagaccttccagaaaattgtggcactcgactacgaattcccaattggatttcctactgttgcgcgtgatcttgtcgaacgtcttctcgtcctagagcctacccgacgtcttcagatcgaacacatcaaaaatcatgaattctttgacggtatcacatggggtccagatctatggaaacagaaggcaccccgcttgaaggcctatgtaccccccgcgcgcgatcccatcaagcttaatgacagtaaaaacggggagagtctccctccagtcatctccactgcaccctcgaatgcaaatgccagttcccgtcaccttccacgagtggtaaccgagctacccccgccgagtcagctcgatatcgaatggtcaccagtactgaacaaatccaacgagcggatcttaaaattgggtaatttggttgttctgtcttcggctgcctcgcacagtccgtcgtccaagaacagtagtggcgagtttgatgcaccccggaagttctctcgtttcttctcaggaagcgccacaaagaaacgacagcggttggtgatggtcacatcatccgggcgaatcattctggccgcatcaggtggtgatgataagaagataaagctcgagattcccctgcttgctccggggacaagttacagaagtacgacggattctaaaggaatttcatcctggattgtggacacggtatgtacttcatcctttatcggtcaaaatgacatatctaacgacaccccacagagagagaaacattatgttttcgaggatcccaagccatccgcaagcaacgccggcgccacggcgatccaggtacaagaatggctggacgcattggacaggtctcgggagatgtcacaggaacaaagcgcaggcttctccgacgatgcattccgcgacctttcctctgggttccctagtcccgccaatacgctagaccgcacatctgacatgcagaaagacgatagaggcccaccatcatctggtcggaatcacctagtgaaacagcaggccaccgatagcgagtcaacgaaaggaaggaaacgatttagcaagcgacattcgaagaatggtctcgctgcggtgttctaatgacatcgaataagaacgacacatattgcgatccatatatccacgtgccaattgcctttcggttttgtcggtttgataccgactttcttatactacctgccttcgcacctcgctatctcaccatttgaacacacctccacctgtctccccgcgtctctttttttcatttctcttcccatgcacgggcattcgcacaaagatgggttatcatctcagcgtatcggttatcctaccctttgcatattccagtgacaagcgtgttcttctgtttgtttgtgttctttgctggggaaacatgtttcttgcatttagatctggaaaggagcgcatactttttttctttgcctgactgcctatttcagacagaataccgattttcctttcccttgtcgtttgctatgtcttccgctgttatatatccctgatttggcctgaagcatcacaacatcgagcctttttctgttcggctattttcatttctttgttgttcctggtgagttatcaggctttattgaggctgacttattgattatctttgaaaaatatgaaatcaagactgatacgcccgcgtcctcattcccctcctcattttcttatacctcttggtgtgttgttttagggcaaatttgcacaaaagaatactttccttgcttcgatatcgtcatatctctccttgtgtctcttgttttccttggtccccaggttccttacagtggcatcttggtttggccgcattttcattgtgattttcttgctcgcttcattcctcttcgaattccatcctttgtctcccctcttagtattttctttgctctaggctgagagatgatatacccgattttcctattccgaaatcattattcaaccgtcttgctacaattcttatatatgttgaaatccataatgaaatactgcgcattccaagcagagtgatcttgaacaatgtacagtttgatagataactatatacaactaaggagacaaactagatacaagtagacatcagtcataagcgggagacccgtggacatcgtcccccagattagatgaacagccagtcgaggcttgtatgatctagctcctcaatccagtcaaactcaagatcagaatcattattatcataaccattctgatgctcacggcgcttgagatcctgtttctgccacatcagacgcaggacccacgcagcattgcggacattaacactcgtcatggcctcatagagtgaaccgagcttttcaaggataagagcccgctgcgaagggcgacactccgcgccagcaatgaaggtgggccagatgagacatttgaagtgggagtccgaagggggaatgagggagatttgggtgatgagatttgtggcgatgagtctatggtcgggtgggaggccgacatctatccatggaggcgagaagccttctctggtgcgcgagagaacacggcttgtgtagaggtagacggcgtcttggtatgaggttgcgagtgcgagacggtaggttaagtttgggatgaagaagacattttgcatctcttggctccatgctaccgggtcgaagtcgcggattccttggaggaggctggcgaatgagtctagggtgaggggctgaccaggttggattggggttggcagcgctgttggttggggggtcatggcggcggcttcggattctggataccagagggcgtggacgaagaaaatcactcccaggagataggcgggacatccgacccaagaattttcctcgaggcgcttgaggatctctgggcccatggatgaggagtagaagggctttgagagcgcgcctggccgagcgagcgttgatcccatgatttccattctgtatggtcagcaagaactcttcgctataggcagagacccgaagcttacattaaacacccgtcaagggcaaaagcgtcgaggtcatcgagaattccttgtcccgggccactttcagggcggtccttgagaagcttcttcgcaccctcgatatgataactccaggccccgctgccggactcgaatatgtctatgaaggcaagcaatacgatagcagctaaggtcctgccgtccttctgcatcgccgggttgaggagatccatggataattggcgaagggcgcggtgcttgtactccaagaaatgatgataggcctgcgaagcgggttttcgagaacttgccggtgcaacaatatcttcaatctcctttactgacattgatagattgcctgatgaccatggtaggacagatgagtccgattctgatacaagggagcaatgaagagccccaagagcagcgatgctgctggcaagaacaggagaatgattgaccaatgcagtaagatctcggaacggatttttgtgttgggagtaaagggcgaagtcattaaccatatattgattgtcttacaagtaatcgtcagtggagccacagataatgcactggggaattctcacagtgatgtacatagtaccttgagaactgactgagatctttgagcagtggatctaccagtccccatggcgttggagtatagtcagcgggaggagcgccccgaggaacatgaacaactgcggtgtcctgttcctcgtgtgtattgacctccaagtgcgcaatttctcccccgaatgttggattttccgtctcaaaagtccatccatcggtctccggactaggctgtttcccagagctgtgcgattcggcatcggacgaggattcggggatagagaaaaagccgaacccgctgctcgctgcagtcgaatcatatatatgcgtagctggctggcgctttggcttgctaggcggtattcccacgtcatcaaagctgcggcccatcatctttcctcgactagccacaccacccttgacccaaacaagcggtttctgataccccagacattccttccccgcatctcgacacttccgacaggtgggttggccattgtcgcagataatgcgacgtcgtcgacaggtatagcagcctttggtcattctctgggcgttgtgagacaaacgtattttctgaactgggtagcgaagaactgagccacttgtgaagtttgttcagcgccactctccatcatcggtaatggtcaggattcggaggcaggatgtcgacaaagccacacgaccatttctagtcgtttaggaagtgactctggcgtcgacaaatgtcataaaccaagttgtcaatccgtcatgctccacgatctcttggatggttcagagaagcttccaaaatttgcggggaggatgactaagataatcttccgacgatcgagaccaggactgttcaagcttcttgcatctcaaccttctacttgctcttccatatcagttacacctgaaagctcatggtcgaatgctagaagaactacaagatggttttgaatctcttgttccgaagtctggaggtaagtgctttcgccttcgccactccgatcttcactgacattgttcgaacttagatctggctcactgtccgagtacgttgctccaatattgatgtatttttgcttgagcttgcattctaatacgatctacacagctccttcgaagtccgatcttccatcgtatggtgggccgagttcaccagaaagttcaacatattaggtacggggtgcctccggaggagcagggaggcactcatctcgagggacaaggtatgcctggtacaaatatttggtgacatagtgtggctgacctgttctgattagatatgaagtacaaaaaattccttgagcatttcaaggaagagctgaaggaccagatgaaaggaaacccgcggaacaaattttaataccccggcgcttgtatgatacgaaaactgatgatacccacatgaaaccgatacatattatatgctttgcttttaccttccgaaaatctggatttgtgcttcctatcatcattttgacccttgtgtcgacaccgggtatacagtgggatacactttcgcactccttgggttgcatcccttgtttaatccggagaatgaacttgatttgaatcattgacttgccccttctactattcccggctgtatttgcagtcaggctgggatccaataactggggcatatatatcgagtttcgggattgctctgaaggatgcgctgcagtaaccttggctacagacgcaatcaagattcgtcgaattgctatatttacatgtatatattgttgctaatttcgtgctactgaatcaatcagcaaagcagattccagcgtgtctatttcttcaaaaaatatgagaaaaagtacagtcgcgatgaatatcactttgaaccattcttattagtctaaatgactcgccgaataccaatgcaagccgatcatgctgaagccgaacccttcctcggtcttggggtcacttttcggtgattcacatccagtcgtctcctcataactcgaactcgggccagctcaagtgaattcttcactctagccagaacacgtcgaaggacaattggtctggcaggcctccagaagaccttctgtatttcccgggggctggtccgcatgaatatgacctcaaccacctgcagctttccgtctctcgggctcaggctcggactctgaattcgtttctcttttttttcgatgttggtaaatgcaacgaacttgcgtctaccaatttgctcggtgtgtagccattccagctgattttcattgccgaagaaggtcacggagagcatatttccaatgatgttcaaataattctcggtgtcgtactcattggagatatcggcattggaatccatgttgttcttgatttttctgtcggatagactagttcacgttagtattcgttgcaaacttaaggtggggtacagatcagttgggatggtactcactgggcgacaacgtgtgtaatattcgagagattgtaatccttgaatttgctttcgtatcgaacgtcgagggcgggaagcgaggttgtgatatcttcgggagaagagtgtatatcggccatgtttcttttgagttgggtagacggagtgtggaatagagtcgtatggcatacgctaattttggatgtgctaaaagctctaaatgtcgaatgaacgctgaatttgctgcagatatgctcagtggagctgttatatgcaaggttagtgaagtcaagttgaaataccagacaagaagaatatatttatattgagagctcccgaggagcaaaaggaacaacaaagagagactagattcatagtgaaatgaataaagaaatcataggtctggaaacagatcaagtcgcactatttccatctcactgcatggctattatgggatatttgccctttgtcgcccttggcgaggaacgagagctgccacttgttttgagcataaagaaagatccaaatataaggctgctatacttttcaattatgcagcgctacaagacggagtcttgaagtagaggctccgctttgtattacccctttgttgtcaagacttcaaacagcttcttgtcgatcgctcggctctcgagatgctaggtgaaggaattctttgcatctataatgatgaggtctcggtataatgaatcagcggtagcttttgctaatctcatagggggaatgttgggtatcagaagcatctcgacatctccaaataccctcaagagccgggaccatcatgtcgccaatttgacacatagtgaaggaatactccattcaactactccgtacttaagattagagctacgtatatgcggggacatcgaataaggggaagattcgtagtcagtcagtcagtcagaagtaatagtcgactacttcattgaactaattttacttactccgcacattagcctcaaatctacgcagtgaatgcgaaacgtttgaggtcaaccggtctgttaacgcttgtcggaacgggcatcgatacatcgccgctcatcctagggcaagagtgaaagaaaaacccttctacaacttgcattaccgaggtcttcccgaggtcttcccaacatgtctgacctgaacaacaaataagcagcccttaagtggttccagaagaggccggaaccccgaaattcaggctgtcagcggcacgccacatggaccaattggggttaggcgcaaaggactccagtttccaggtcaactccggctgtgtcggctttgtaaaattaagagtcgaaagggggtccaggtactcgagggattcgtgctacctgacacagcacggaaatccctgcaggctaggtatttcgcaggaagatgacaaccgttgattaggcgactagtggtgacagggtggtattgatgcaagatgtcatacggcggcttgatgaatgccaatgatatgtggaagatcagaggcagatcatgggagatgtgctaaatatggagggggcaagcgggaagcgaggggtacgtcgtcagacctgttccacatgttagattcctctttggtggtatatacaacataggttttgaggtcattctgcttattcacttattcgctgaattctctaactatggtctcatatgtattcgactgtgaaaaaaaccaaatctaaaataaaacatttgcacccacgggacaaacgtctgcgcgacccagtcgactccgtaccgtgtttcctattgcaggatcggccaatcagcggcgcaggtgcctcggcgcgtggatctggtctgagactagggcggccccattcggcctagctccctttcaaagttcgggacaaacacagcccaaaggctgccttttcgctttgactcctttttcattttcctgcatatccgacctcttttatcaatttcttgacttcgggtcaagtcctttcgttctgatactcacactcgttatccccaaccatgcgtctctccagcctctcgctcttcgtccaggctctgctgttgactgcggtcgcagcccagagtgggattgtttccaatgtcgtgtcggatctcacaactgagtccacttcatccacctctgatgccccgaaaacaacatcgaccgctgaatcaacttccacaacctcggaagagacttctacaacggacccaactacttccgccgagcctactagcaccccgacttctaccacctccaccgagagtaccactagcgctgatcctaccacttcgaccacttcgaccactgctcctacggctgatcctaccaccgattctaccaccgctcctactaccgctgctaccacctcagcagagccctcctccacagcggaggctaccgtcccttcaaccacttccaccgctgattccacctccacgtcgagtactggaggcgatagcaccacttctcagagcaccactaccacccagaccccggtcgtgaagaccatcacctcctacgcgaccagcgatggatccaccatcgccaatgtagtgaccaccacttccacccccgttgcttctccctctcttaacggcgacaagagctccggctctagcggtgtgtctgcttcggacaagaagatcatcatcggtgtcgtggtgggtgtcggcggtgccatcctgatcggtgccctgggcttggtcttctggagaatccacaagaagcgcaatgagcgctacggcgatgaggacgatctgatgggtggcaccgctgtgggctccggtccccgcgaaaaggcccccagcccagccggcaacacccccttcaagaacacactagaccagtaccacaaccctggtcccgtcaacgcggcgtctaacttctaggtctgcgttgactcgacacttgtcgaagtgtaaatcttgtacgatcttcatgcttttctcaggcgctatggacagggtatgcgagttcacggttgcgttcttcggttgccaaattgcttctcttttttttttttgggcgtttgacaccccactccattcattctagattgaatatctgcgcatttttgagcgtttttgtttcggcaaccaccacattccttttctcgcgatcgcgactctcgatccctgcgtgactgacaaaaatgcggcactacttttccgttctgcctgttgttctattttttgattccccgtatctaagcaattagtttcgtcctatgacgaacctccattgtgccttgaccaatattttatccatttaccttttgcagcatcggacgtcacaagttgtatagtgttgatagacgtgtgctgcaaaggtcccttctatcttgatctgtatgtatgtaattcaaggcaaatgaaaccaaccagtgaacccattcaaagtattatatgtcaactagtccataggcatcgatcaatccatgccgattaacatccgcgttgttccggaatgcgagatgttctcagattatactctagagagagttattcagttgttgatggtaaaagacaatgtaagaaacattaaggtcaacggacaagggtattgttgaagcagaagctctataaggcgagtacaatggttgcatgaggatcactgccagtttagagataatcagcatttgggttgccaaccctagcgactaaggaaggtttgaagcaaaaccagtgtggacttcctatttagtgtaagtttcgactatctacgctagatcagccgggtaaactatagagatagcacgatctatgtacggggtacatggtatctcatcttccccgcatctaatctaccatgaggcgttcaacgggtataaccgccaagagatatgcgcccgctgccaagaaatccgctacaaccgcaatatggccttgcgaaattattgttcaaccagccaagcaggcaaagtatagggaggagatcctaaaataaagaccccaaatcaagcaagaatctaaacaattataaatgatgtcattgaggcgcccagctgtggacttacggtcaccctgggcataagctgactcgaaggaagcgtataatgaagtccttcagctggtgtgggatacataagtttctcctccgtaatatcatactggactgatccccctataatagataagcagatccagctcatctttcaatatatcaaagaaacgattcagctcacccttgcactctttctattggttgcttccgcccttgcaaaggattgcaagctcccctctagccttgaaggttgtgacaagctctcgtgtcctgataaatgtctcggtaatcgctggacagtgggggacaatattgtcattggaatcagactatcgcatcccgatgttccctcgtccttcgaggaacctttgcattgctgtggatatcatattggatggattgtttgaaataggcaaactgtgttaagtgttattaactggttcattgtcgaatatctagtattcaaatcaaatcgtgaatcatgatgtatgggccccggccccttacactccggagtagaacgcgctaaattagcgcgactgtcccaacaaggactttatctctccatcagacctctacaacatacggagcaagaatttaccttgttcactctcgagtctcaatcaacaccatatacctacatagtagccctggaactaaaccccaatcttggaaaccacaagaaccaaccgacgcatccgacttccgcatccgacccacggatacgccagaaacccatcaccaaccccataaccatccaccatccacattatcacaatgttcgcaacacaatccccccaaacccccttccgccaatcccactacaccccaacccgctcctccccactccgcaagcacagcaccacccctccaccgtggaccatgtccccgacgcgcaacacccaaggcgcgtcgcaaaacaccgcaccaaacccattcagcaacccgccaccgaccttcaacatccaaaccgagccaatcgcccgacacacgcaaaaccaccaatccccaatcccagtgcacttcaacgcgtccgcctcagcctcaacaacaccaacctcagcaaacccattcctcatccacacccaaacacccacctcgccgtcctccccaacccgccagaaaccaaagtacgaagcacgctacgcttctacgattgcgaacccgcttcagggtgcggcgggtctggcgcgcgcgaaaacacggaagatgttccttaatcgcgtgcgccatgaacgtgacgatggacgctttgaggcgcgcggggagcagatgatgcgtatggagcatcttgctgatcggaggaggtgggaggagagtatggcgagagatggggatgctgttgttgggttcgaggaggaggtggatgaggatgatatgcttcccggtatgttttttcccctggtttcattaggtttgatttgtggatatatgtatgcattgaagatagggtggacatgatgaacggcatctgctaacgttctggttttggtagatgatgctgatgcccttgatgagtttatatctcaggaggaggctatggagatggctctttgggagacgcagaggggtgttcctgggagggttgaggagttacagtctaatgggaccggtgttccatttagtgatgatgagtatgatgatatctttatggcattgtcggagcctcaagggggtcagtctcagtctcaggatatggatatgtcgtgagcgggctagagctaagggttaagtgttgattttcttttgcgaggcattgcattgggtggcgttttcggtccatttgggcgagatccgggtatgtacataaactaaacaagggtatatcgacgtgggttgcgcatgagacggacgatgtatgagtgatgggaaaaaagcaaaccttggcatcaaggcgatatcttcctttcaagcttcgatcatacattttcaagatcatatcactgctgtgggcaatcaggcactccgccagctccacccatcgcacctcccaagtcctccatgaggggattcgaaactagttcatcaggcgggcttcccgccgcttgcatctggagacatagtcagtaaatgaaagaaccaagatatctcgattcaaatatagtaaactcacctcttgcattttctcccacacatactctcgacacttgggatcatcatccgagaaccccttctcctcaaacttccccacaatctgcttgacaacccgcgcctgcgtctcaaaccgctccatatcctcagccgaaaccttgccactgtttttattcttctcaatccacggcccgaacttgacgtccaattccttcatcggctcatacagcatctccttgttggacagctgctccatcatacccaggaacattttcgacaggtctccgtcttcgccagcacccgatgcccccgcctcaaccgccttaagcagctgtgctagcatatcatctgaaatatcgtcttcattacttaccgcggcggtagctttatcaccactttccttcatgcggcccattgtgcgcttgatagcgtcgttgaacgagtcggcggcttgctctgcgcctacgcctgtgcctgcagttgccgtaccagaggagctctgagtgccaggagcagcgatgccagccgcggctgcagctgccgcaaaagtctctgccgaagctccagctccagaaccgccctcctcggccatcacgtcggcgaggagctgcttgaggaaatcacctggcgggatcccgctctcttcgagctgtttagcaaatacatcagcgccttggtcgacagttgcttggaagttgggatctaagctgctcccggcggccgcgcctggtcccatcatgctcgccatctcttgttcgagttgcttgaggaaggcatcttcgtcgaagtctgtgggtgagggatccgagttggtgatggcagagggtgcgggtgggtttgcaggaggggcgggtttgggtttgttgaagtcatcgaggacgtctgtaggtatgagtatctgttcaccctggagcggtgcgggggagcgggggcggggtgaagaagagaggcgggtatgtgttaccatctagctcatcgaattccgagtcttcgtcgtcatctgcagccgctttctgcgattgtgctagtactggtgcgggttcagatgcaggtgcaggtgctggtgcgacgttggtttgtggcgcgggctgagattcctgtgtggttgcggtgggagcctcttcggggcggtcctcggtgggcaaggaggtagccatattgcgcaagaagaataacctaagcaagtatgatctcaattgaaaatatggcccggtcggagttaagcttaactttgaggtaaaaagaaagtctggagatgaggttgacatgtgacgggtgtttggcggggtgccgatcgccgaggtttctatgtattttgccagtcctacataggcaatgttgtgtactactatagtatagtcaactatatgatttagaagtgaggatattgatttactttcaaagtcaaagtcaccgttctctatattgctataaggcagatctaatcgagatcgccaaactctgtccatgtacaaagtaccggcatatagaataagatctagttcactactgcatacctagttagcatctccaaattgtacgtaaacaaccttctccgcatcttcccatgagatcatccagaatatccagtccttggcataccaccccccgcataatttcaaccaggttgttccatgcgagaaaaatctgcaaggcattccaagtccggggaaggtgcgtcatcccacgatgatcgcccattggtccccgagggaaaccagtcgggcgcctgattcgcttccaggtgccccaatgggtcagggtcgtaagatcatgtggcttctggatagggcggaagacaccgaagctcccatagcggttataaatgggatgatctggtatgccggtatcggctatacgggtttgcgcatgacatgcattcaaggttctggggcaatgttctcaatcattctcaatgtgttgcaacttgcaggcagtttgcaagtacaagctgcaaatgcaatatacaatattgaatatactcgtctttttaattactccgtacagcataccgtggaactgaaacacccccccaccacacaaccttggtggatcatacatccgagaataaggccattcaactaaacgtggaaccacccaaaaaaagccttttcttcccaatccagttagaaggtggaaaaaaagaagaaaaaggaaggcgagaagaaaagaaaaagaaaaaaacgaaaaagtcaaagagtccaacctgggcaggtacgcgagagcccctcctgaccggacagaatttttctttcttttagtcaattgttttacacaggtattttttgtttcctcttttatctcaattcctctgactctttctttctcataattcggttttctttatgtcacaacttgaactccctctatctcgcacgtcccttctgagttagccgcgcgtgtgtgtctctctctttccccttttatcctttttatcctttttctttttttcttttttctttttcttttttctctcttttttgccggccagcaggtccggcaacgcggggaaaactggctgtgtctgttccgtgtgcggagggccgcctacaggcttgaattagattatataatggtctcgatggttgaccatagtgatatggtcatggactcaatcgcgcctaaacatgaacccggtcctgatggctccatcagttccgccgtctcaacaccagatccggaagccgaacccttgacccaggatgccgcgcagactcagaagaggaagggaggcaggaaacctgtacgtaacatcttcaacctggggggccccgcattcctcctttgtgtcacagtcttatctcctttgcattgtatactaaccccccttcagatatatgccacctccgaagagcgaaagcagcgcaacagacaggcccaggcggccttccgagaacgcaggacggagtatatccgtcagctagagaccaccatcaagcgcaatgaggaatctctgcagagtctgcagcagagccatcgcagcgccgccgatgaatgtctaatgctgcggtataagaactccctgctggagcgcatcctccttgagaaaggtaccccttaccctgaacctccggtccaaacttcaactaactcccaacccctttatccaggcatcgatgtacaagccgaactacgtctgaaaacaggggcgccgggcgcccctctcaaggcaaaccctatgcccccaaaggcacctaatgtggcagggggccgcccgaaccagcgacaccctgcaggtatcgcctcgaagcccgaggcgttcggcatgtcacagcgggaaggcgcatacgggatcccgtcaccgcagttccaagcaacaccgacctcccacgtttcatcgccctcgcacgccaagtcccccggtttcggcttccagggcgccatgtcacctgtcgaggccggacggccccagcttctcccccaaccccggtctttcggtcagagttcgccgccggcaatcagtatgccgcacaacgaaccgtcagaccccaaggctcaatcccgtgggggagctatggggccccgcggtgcgcgggtcgcagcggctgcttactatccttctccattccagaaacactacgatcagctcggtaagcctctctttgactttgttacttagttcttccccggctgacctttcaagcagagcaagagtacgatgcccaggccgatatggtcgacgatgaccacgatggctcagcatcttatgtccctgggtacaccccgcagtccgtcgcctcgggctcccacatgtccggtttcaaccaaccaccaggcgagggcacacccagcgatttcggcaatgcaaaccagctcctcggccagtacgagccgatgatggacacagatccgtttgggttaagcgctagcatgcacttccccacaccgttcaattacgagcacaacaactcgagacaataaactaaatttgtctacatccttctctcttattctcttgttctatattcatatatccgtccatcttatgtggcaaatgaccatctcttccctaaaagtttgatttgagcattctccggcgttgtgagggttttgataccaatgttctcccctggtcttctcagaggtatattatgttacattttgtacatgaatcgaatctttccatcacggcagtcagcaaatgtaacttacattgcatatttccaatctactaaaccttcaacgctctaggatcaatgatactcgtatccctagtaagccccgcaacggtctttaaaatctctttacgtcgcaaactcgcctgcgttgcagtgaagctctatattcatcttccaggatatagaagatattatagttactactgatttatgatgtgccctgtgtctgctggaggactctttgcccgaggccaattggcttagcaccattctcatttttgtatcagatactacatacgctgcaaaaaatacgatgtgaaagtccctgagttaacccataaggcactttggatattctaatcatgctacttgtaggcgagctagagggaatatctagcttgctactatggagttaagtaaacagttatgtccgagttgtacatggttctttactcgatggctcaatctatcaaacgtcatgacatcgctttctgtatagctttcatcatattccattgcattcttcaagcaagttgtatacatttgtactagggaatccctaattcccctggctttcaccttctacattttaagtttcgtcaacctcattcccgatcctttacactctctcgtatatcatgacattcatttgtactatgcacgtcttcgtacctaaggacaccgacttcactggcagagcagttgtcaacgagcccatagccgccgttcacacggtcacaggccttgcctgctccgacgaagctgccgctgccttggcagcgaaagaccttagagtactccgaggttctttccgagacctcgagatcatcaagcaaggagccagtgagacagatggtttaatcaaccttgcattcgatcacgacttcagcaagtatgcgtagagctgccttgatgagaaagagaccatcgaaactataagctcggtcctgataggaaccaacaatcctctcatcaccacctctagcaccttggggctcaagctattgctgaagctattggtcaaagtacaaggtctccctgctatatcaaaacctcttgacgaagcgggaagtcttaacagcttcatgtcttttgttatgaacattgataactcgacttcatgcagaaagacccaggaactccttcgctggagccacttgccggaagcttttggatggtatcaacgccgggtttatgcacagaattgaggagttgtctttcgcaacttttggggttgggcatatatcaggaccgaaatgcatacccaaggggagaaacaaggaccaatgcgattgccagccaaatgatgcagcaatccccacccccacatgtcaacttaaatccaaacttatccatcctacctgtgctatggatagctcggtgattacatagcttcgcaaggctgggagtacgcaggtgttgtccacaagtcagatcgacatactccaccgggacatgtccgctctgtggaagctaatcaatgcattaccatttgatatacacacatagtatcatatacagaaagggtgaatatagtacgtccaacaacgaataaacccaggtatactccccagagcagcccttgatgtaacgattacgtaaggtaccctaagccctagactgcgggcagccaatcagcaaccgcgggcatattcgcttaggaacagaagccgcctttcctgattagtcaccttacaccctgcaaccacaaaccgaggacctctcttcaccctgctcattcatcatcatcaatcttgacaggccggattcccttgggttctgccttgtgccccgttaactcctctagaccgattgtctaaagttgagcgcctccctccggaaggtctccgaaacacaacaggcgtcatggcggacgtccggtccaaggtacgctgaattggagctttcctgcgcgctgctagtgatgcaatgctatatgaatcgcgatctggaagcgatttgcggggttcaacggatttttttttatgttcattaactaattcgaattgtttcttctaatatagaacctctacgagcttctgggtaaatttcccctcccttgaatacaattctcggctatcttttccgacgacaatgagcttttttcctattccgaacaatccagctctattcgcatccgttcttcggccgactgatcgctaactttgcctatcaccaggtaacgacccagagctcgaccccagcagacccgctcctccccccaccaaggctatcgaccgccccgttgaccgatccggaaagcgtgatgcccccaaggagcaacctgctcgtcacaatgaggccaacgctcgccgtggtggccgtgtgaccgctggcaacgaggccggtatgtggttataagaatcgggttgacggaataattggactaataaatggacagcttaccgtgaccgcaacgctggccgtaaccacaaccgtgagaagcccactgacgaggctgctgctcagcccgcccgccgtggtggccgtagcggccgcggtgaccgccagtcccgcactggccagacgtaagcgatccctcgaatgaacgaatcaacccgaaaggaaaatcatgagaaccatgagatttcgtgaggaattatacaagagtgaccaaactaacccgaattatacagcgacacccgcaagcaggtccagcagggctggggtgccgatagcggcgagaagaccttggacgatgagcgccaaggcgagaagatcgctaagaaggaggagaacgagccccagacccccgttgaggccgaggagcaggaggagcccgacaactccaagtctttcgccgactaccttgccgagaaggcccagcgcgagaccctcgccgccaagcccgagcgcaccgccaacgagggcaccaagctcgacaagaagtgggctaacgccaaggagctcgccaaggaggaggaaccctcctacatccagccctcccaggagaaggccaagcgcgagaagcagcgcaaggagaagaacttccttgacgttgacctccgctacgtcgagcctccccgcagcggccccgctccccgcggccgtggcgaccgtgccccccgtggtgaccgccctgcccgtggtggtgagcgcagcgagcgtggccgtggtggcccccgtggcggcgaccgtgccccccgcggtgaccgccctgcccgtggcggtgctgctccccgtggcaacgcccgtggccctgccggccctaccgtcgacgagaagaacttccccagcctcggcggcaactaaattgcctgaccttgtcgggaactcgtgctcccaggcacggatattctttatcttcccgactctttcatcccttttctccatctgctaggtgtgcaagttcacccggaggtggtatttattgtgtcgcttcatctgtgatggtttctattttctctttcatggggattgggcttgaggggagtttgtgggatgtgagggattatccgtgctctgtggatgcaaaaactgcccagatttaagttttttcttttctcttgggaaaagacatattccgggttggtcttatatgtgttgtgtgtgtgtgtttacatttgccttcggtgagcaaacgcgaattggatgactgaattcgacgggcccatgtaatttgaatcgatccagaagaagtcaaccaaaaaaataggaacgcaaaatcttcaattgaattacgggacatgtctgcttcttatactttcaaagaattactatctcatagatctaccggtggggttgtacatccaacaggcaggtatacgcttttcgatgtatcgacgggcttgcataggaatagaccaaaatcggggttttatataaccttggatttacccaaggcgcagaagacttaaccctatctaggtatgtactaatgataagatagccaaagttgcaaaattcgggcccagaaacgagagacaaccgatttactgtgtcaacagcctctccatccacgacccctcgctgtgacgaaatgcaaacgtctacagctctccctcgccatggcggttctgccccgacatgtcgaattctttcgcggcagactcggcactctgggcccaaaccgccaaggtctcctcgtcgacttcgtcgaggaaagacaggccaggcatggcctttccaccacaggcacgttccaacgctaggaaagcaaaatggccaccaatgacaggccgagcaaagaagttcggaccagggaagcccccgtcaccctccgtgttgtgcaagtccgtcaatggacgatccgtggtggtctcattgacccagcgggcgacagaatcgaggatctctgtacgcacagccttagaggcgacagccattgagaagaattcccagtctgtcttggtgtacatgtggcggctgtcgaggggcaggccgtacttctgacgcacgtagtggtaccacacagactgcttctggtagatatgacgaggaacaaacccaggcgaatcggtatcggtaccctctagatggaagcagagctgggcatcggcgtagaggttgtagatcgtcgtccaagagccataccagtcgtaggcaagcttggcatgggaaccatctcgggacatgccaaacttttcccatttagtgatgtagtcacgggcgactttctgcgggtgtagttagtcaatctgtcaatgcacagataaaagacggctcgtaccttgaaatgggcagcgtcagcatcgtgaccagctacctcggcgatcttgctcatggcgttgatgcccacaattcccttgagagccaaattggtctgcagagccagccaacctgcaaagtcatcggttgagactgttctcaaaattagcttgcatgaacatactatcagaaaagacagagaaattgttcttacgctggttagcaggctcaagagagaactctaccagatatccggtccactgtttccaaaggctatagcttcgcttcacccatttctcagcttggtgctggcccttactaccgccaccccatttgctatcttggtgagcaatcccagacagtacctgtagattgccaagagggaagagtccagaagtctcgccttcagagcttgacgagggcaatccctgtgttgaccaaatggacgaggccgcggtagggtcttcatagcggagcgagttcacaatagccaaacccataatgaggatgttaccacactcttcaaccggcatgtactcgtccttcccgtcaggatgtccggtagcattggggaagtgtgtacccaaatcgtgcatcgcatacttattggggtattggccgctcagcatgtgctcgataagcggctccaaaaggtacgccagccatcgggggttcgtgtacaggaaaaaggggaacgcggggaagatgacatcgatggtttggaagttgccatttgaagagatctcctttaggaacaggatcgggtcgtccggagttcctgaaaatgtagttgcgcccatgacctgccgcgcactaagggcaacgatgtcaacatagtcatcagctcccgacaagtacgcgtcatctgccacttgctgcgagtaattggatgctagagaactagctgcagcgtagtccctgtagtggaaatccaggagctcctccgttgttgggtaccaagattcccacaagggtcgcatcatagtgagcccgcgagatgatgcatactgaacaacggggatttggataaaagcgagagtaaatgtgacgctgtcgttgtagattttagatgaatggcctaggtggaaagacttggagaacgcaaaaaccggcgctcggtcctgaatagcacggaatttatcatcgttggtgtttcgcagagttccagagctagcaaagacacggcgcacgtcaatcgcatctccagattggaatttagcactctgtattgtgattagctatagatcagttcattttgacaagatcggacttacagatggtccagtgaaatgaagagtgccccattccgcacggtcgcgaatctctgtgagaagaagctcgttctccctctgtacttgccattgattaagtgtaaggtcctcgtactcggttttcaagctatcccattcccatttgatcttgctaccagtatctccgctaacccagcggccgtcaacatccatatagatgctgacgtcgacatcaccttgcacatcgattgtgacataggaagccgggattgactgacgtaaagtcgaagttggagtaataggtgaaaggaatgagatagtaacgtctagagggtttccggtaccagtgtcaatgtggtaggttaggttggtcgttgaggcatcgtagttcaggccgaggtaattgggaaacttggtcttgtagctgtaatttgttagttcctaaacctttcatatatgagtaattttcgaattcataccctgatttattatccaaagactcatggggcttgcccagaagagggtagacggtattctggcttggaacgtgggccatcaacgaaagtcccacctcctccccagtatagaacataggccattttaaccaaggtgcatcccgagcatttgcgagccaagtactcagatatggatttcgtacgatcagggggatcacaggcggagtgagcgtagatgcggtgctaaccgatgcctggaagacagcggccaggaccacgagcgacagctgcatggtcacactctgggcgaaggtgacacagaattcggtccacgatacaatttatataacaataatagttggggttgtgtaacgaatgtactgaaaaagttgtagtaatgttggagaagaagaaaggttcaagggaggaagccgaatgcgggggaaggatcaaggatcaacataagtcattcctcggcttttgggaatagtgagatgggcttgaattgctctggtaattacggcttttcttttgtttaatcctatatcttctatacaatgcaattcaagtcagccctgaagagttctccttttcatcccccgatgatgtcatgcggagacagtactatctaatcacagagagaaacatgcatactatgcctattccggataatatatgtacagtatagtataggttcattgaattgtaaaacatgggcagagatcagtcaagagtagtagtggtaggtttgaaaaaaaaaacgatgttatccgcgatctatactggaatgaaggactgaaaccaccaacatccaccctcatgagtactgtgtcctattctgtctgcatattcattaaggacatgggaaatggtttgattgggaaagcaagttcaggtcattgccatatctcaggtgttgttaatattgtctgtcttgcatggttatatagttgctataaatagttattcctattagaaacgacattgggtcagttgtaggtgtcttatgttatgtatagccgacaggctatggagaggtttctattaggcagaatggaattcctaagagtctaatactatgtaaacttatcgaacaagcaagaagcaccatagggcagcatcgggtactccgtatatcgttgagacgtgacaatatgtagactaataaaccaagattacctacgacatccctgtaacttacgggtggtagcatatagaaaaggaacaaaatgaggctagtcatgcacctagatgcatggattctataatattgttggtcacaaaggcattgttcctcatgatatacctctgccatgggctattctctttcttcaagatgattatactactacatagatattgtccatcctgatccccgcaatcttgttcttaagcgaaagtatttcaaataatatcaccttttctgtttttctcttataatttaatcttagaccgcgtccgtggggtctctaacccttgtggatccaggacacgaaaagcactagacgcgcccaggctaggattgagaaattgatgtgtgacagtattataacccttaagaaagagtcctagaaaagtgaagtggaacaattgagacctgaaagacgtggaatcttcaatatcaaaaggttttataggggagcatcgagaaggaaggtcaattttatacgcgtttataggacaccagtctaaaacattctaaaccaagccattccacagtattaacagtatcaaaacacaattgcaatgtccaaatcgaaatgcaaacgcgttctcagacacgcctgtgtggagccccagtccgtgctctatacaaggctagtaagttatcgacctaaacgcgatcgacgcgaggaccgtttttcttttcccagttcgactttctacctacttcctactttctacttgctttctatatcttagcttcccacttaccaattgtgataaccctggaagttgcagttctctttacatatcgtattggttcgcgtcagacttccccgcagcacttccggattctaccatctcaaccttctattcccctcaatactccctcggactcacctgtgcactattcgaaagctatataatgaattcaacttcggtgcaattcagtcctctcaaggacggacgacaaattctcggcgagagagactcaaacgcgtgtctgccccccgccacacacgccaaaccgtcattcccgaccattgggaccccggtcaggcggatgccaattgctacctcacctaagaagctcctcccctctcctatatttgcaggccaaaaacggacacgggatcaagtggatgacaggggagaacttctcggacacgtgcaggcgcgggaatcctctccgcagctcggcgtccaatccaccgtaaaagatgatatgcaaagccaggtaagcccatgcgagacagacaaagaagtcccgggaatgaccagtccaaagctaacactgtaacgcgcgaatgatagctcatccaaaccccgacaccacaaaactcacaatctgaatgcggccaaacacaagatctaatggacatcgatcgatctttcaatgtgcctagcacccccgagcaagacatgcatagcgttaccttagactccgacgcgcgcaaaaagttcatccaacaagtatgcgagccatgatctcagtatcaaacaccttccccagcgggcagtttctaacaattgaacagaaagcaagccttctccgatcaagactacagagcgcgatgcgcaatgtgacagaccaccaatttgaccgccgggtctctgagctagaagcacacagtcgtaaatgcccacggctctcactctccgtcctcgccacgccacccctctcatcgcgcaaacaattcacatctttctcatcctcgcaaataaagacaccccgcatcggctgcgctggcttcatctccaccccctcccacagcacacccgatcttccaggccgaccttcgccattgtcttccagcgttgttcagcaacgcgcaaagtcacatgcccaacgaacaccgcctcgtgcgctcggctccccagtgcagctgagtagtcctccagctacggtcattcgccgtgaagccgatagggaaacaagcatgggcccaagagccgagcttatggatgatgtggatgctatgtcgccgtcacagcgaggcgacgcggtcgatgggctattgaaactcatgagtacgacaggcaatcaaagctcggatgcctggactggatgattcgaccgcgttttctttttttttgtgttttgtctatgctgtctgggctattgcttaccgtgtggagcatgcccgagtggattcagtcgcattacagtggataggagccattgccagagcaatgaattgcatgatgtatagggccatgacaaacatatcgaggtttgttgatatacaagtattggtccgaacatgacggggtaatcccattttggaagcatgcagcattattagaataattcgtctatatgttgcgatcaatgataccatttttgcatttgaacagtgattagttctcgtcctaattctagtatacagatttgaaaccaatagcagtgccacttcctaggcagtacataagactcatattatcaagtcattgaatgttacactacaagtcccaatccagaaaaagatcgctaaatatatcaattgattcaaggccgacagcatctatctaataacacgcccctcagcgaaccttcttcaacttattacgcttccgtccaaggatatcgcgaccctcatcaatctcacccgcagcctcacgcttcgcagcgccaacatccttgagcagactggttctaacaacacgactctcaatattgacaccttcctgcgcgaactcctccatctgcctaccaactcgctcctcaatggcaagaacgagctcgacatcacgctgtccaacaagcgtggtagcctcaccattccgtcccgcacgcgcagtacgaccaacacggtgtacatagtcatccggattccggggcacatcgaaattgataaccagctctacggacgggatatcaagaccacgcgatgcaacgtccgtagcaaccaagacacgggcagcggtggctcggaaacgagccaggttagctgtgcgctcggattgcgggaggatactgtgaagggatgtgatgcggtggccgaggcggcgaagagtgcgttctagcagatcgcatgtcttggtatggttgcagaagacgatgactggcttagtgacgtttatttcggtggaaagcagcgcgtgcaggaaggcctcgcggtgtgtcatgggaaccttcaggtatgtctgcttcagggttggcggaatcttgccttgattttcggtgccgatctcggtcatgaagatcggtggcttattgcctgcggccggcatagatttcagtgcccgcacttcggcggtcatggtcgccgtgaatagcagtgtttgacgttcggccgatggtggaagggctccgagacatgtttccacgtctggtagcatgcttcccggcccactggctagcaggcgatcggcttcatcgagaactaccattttgacgcggcggagaccggccactgtgtcgtctccggacgtcttgatgtgatcggcgagtcggccgggtgttgcgatgaccacgtgcggccggttcgcaagttcaatagcctgcttccgcatatccatgcctccaacgacgaggataggcttcatattttgcggcgcggaaacggccctgaactgttcatagatctggagtgcaagctcactagacggagaaaatagagtcagttaccgaggatgaaataaagacgaaagatagaacctctcatatccactaggacattgaaacataccgagttggggtcaaaactaaagcgtagatcccgaaaggattccgcgcccattgctgcataatcggaactgcaaaggccatggtctttccggaaccagtgcgacttccaccaatacagtctttccctttcaagatctcaggaatgcaagccttctgaatagcagttggccttttgatcgccattgtcgccaacgaagagacaagccaaggtgcgacatctaattccgaaaaagtggacagcccgctctgtttaccaagctcaattgcatcgctaataagaaccggatcatcttccttcgattcaggctcctcctctacctcgcccttcttcttgatacgagagagggtggggagcggcgcaggcgcgacgtatgagtcgttggaagactctgagagacggcggcgcttgggggctcggtcgtcgacatcgggttgttcaacatcagagttatcagacacatcggagtcctcgaactcggggttctctgtgatcgggggcgccatcttctttgcgactgtctatcaggacgaaataattttgtggcagaaaaagttatctctaataagcggtgggaggttgcgggcctggtttataaggcactgtatatgcatcaaatgaccttggagaaaatcccatcgtatttagttaaataagtagggtttcaattaatacttaatagacatcaattggttttgagtctgtggaacaaccgatctatttgtttagtcgctgccggagaaactagacatcaatcaatattccaaattgttcatcgaatggtgtataatagtggtgagaacgaaaacataaccaaacataattcgagaaactttttattgccacataggctatagtagcaccatttagtccgcccgactagctgtgcttctgcgcgaaacccgggaggcgagctcatacgcctcacctcgctctagctcatcctcttcgactgcagacgccggagaagctgaagttcggtttcgtaggactccgtcatctccactcgaatattcctcctgggcaccactagctattgcttcatcgtagtcctccagtccgtgggtgccaccgacactttccatggtgaatggactagctgtcggcccatcgagtgctgcaagctcctggcgggagaaccatttaggaagcaggaatgagcgcgccgggattaggaggagaataataacagggaacccgatggcagcgatggtctgagtgatagcgaaagtcgcaccaaagccaaacaattcaagagcgacgaaggcccagatggcgaaacggcgctcgattcgcttcagaggattcgacgcagaggtaaacttcttgtcctcagcgaggaaaatcagtttttgcgtaatgccattgccttgtagagcctggacacccataacaaagaacagaccagccatgacaccctgtggaatcaagtggagcacgatgaggaggggtccagtcattgttccgagggtcaaaaggccctgtgcgaagttgctaacacgctgctctactacgtggtctgtaatccggatagctttccccttatttgtatcatcttcgtctgcgacctggcgagtgacgcagagggcggcagtgtggaagggggcctggggaatcagaccattggggaatggtactcccagaagtccagctacaaaggttgtgaggccgaggagccagaggtcccagtggaagccagctggctttcgaagaggaaattcggttccttgggcaatgagagatgacactggaagagacgtgtcagccatacaaatctactgtaacttgatcgatgtagaatactcaccattatgatcaaaataaaagagaattgtaagaagaagcgcaaatgggatggcaaggaaaatatccccaacactgatatcccagaaccgcacaagccaagaccggtcacttgtaggaaagaaagctttgctagtagggagcgtagcgacatcaacatctctcattttaccgatgtagacgaaaccggtaaaaaagatgatggtcaaaggtgtaccatagtcctcaagaaatttccgaatgaatcgcttgaaaagatggccgttgcccagctctccacagatccatgcacacattaggacaagtagtgcaaccatgatactcagataagcagaggtctctccaacagagccccattgtctagtgagaacttgaatgcccttctgaatatagatgcaagcaacgtagaatccaaagatgtcgcacgagaaccgagtgacataggtcagggcgttgcaggcattagtgatggccagtatccaatgcataatcaaagaccagctattatggatgtcagcaaagtcaatgatcgaagatgacaaaggaaactcacattccaatccaacacataaatgcaagatacggtgtccctcgaggagccatgatatcatagacagtatagttgaacacagtgatgggacctacaatcctcagttcaactttccatgtccatatattccaggtttcttaccagtgactccgacaatgaccaacggttgggccgcaaaaagcgaaaatacaaatgcaccaagaacggaagcaagtaggacttcattaacgccatagctttgacttgtcttctcgaacatatccaacgagaaggccaaagcaggcaagatactacactgattgttagcaaatgaaacagtgcgccggagaagaagaggttgatttaaccaatcagagcaagcatacttagcaaaatacatatagaccgtagcaggcacgacacgataatcccatgcatcagtccaatcgctccaataatatggtgctctgcgcttgacgtcgttgaccattccacggaacaaatggacgtgccaccatcgttcctgggctgagtgcaaccccgttgtcgacgcaccgcgatgcgagttttcttgcgggccgtcttgtcggtcaagagactggtcagactggtgtgcggtaccatgatcagctctgcctgagccctttgagcgcaccgatgatagctgttgcgactgccaagaagatttccgctgagcggacgtggagtgcatgttgggtcccgggagggacaaatccccgtgtgacgatccttgcatatgcaattgtgggataaatccgattattctttagtgtaatacaactggtatgaatttataaagtgccagtgacttgtattgtacggaaagacatatcatataggaggacatgaagcaggacataattgaagggagcttgattttgcggagaaatgttggggctgacctataagtggggcctgaggcatctacttcgagttaggatctgcctagctggtcaaaccgctactttcatttacgagtgtacaggacaaatacgataatccaacattgaattcaaggcgaactagaaagaattagtcggttactcaaaattgtatagaaaaggacaagtatggcgtttttggaacaatcgttagcgagccgtgggcttctgaaataaatcctcgttggattgtctttcaaagcctccatagccaatttcttcgcgcatgaacaaactatttgaaacgagatcttttttcttcgctgggaaggcgaggtcatcactgtgggggtgggggtgggggaggcaggtcgcttggaggtggtggaggcggagcatcgccaggcgggggcggaggaggaggactgccagcacctccggggtacattggagccataccaggagggggaggaggtgcgcccataccagggggggcagcaccaggagctcccatgccaggaggataagccgcatatccgtatccaccataaccaccaccataggcaggctgctgtccgccaggaggggccggttgctgccaaggagcagcacccggagcaacaccaggagcagcataaccaccttgagatccgtaagcgtagtcgcgggtttggggtggaccttggggttgggcctgcgcagcccaaggggcaggaccaccctggttgcgagatccatagtcgtcacgaggtccgtgattgtcgcgggatccatagttatcgcgggatccgtagtcgtcacgagggcgagggtctcggcgctgttgccatggagccacatcgctttggggcggcggtccacgctgctgccagggcttcacatcacggtcgtcgggacggccattgccaccgtcgggaccggcttcaatgcgacggggctcgtattcgccaggagcaccaccagacaattcattcatcagttgctaaggggttgttagtaccatgcccgagaaagcagtcatgagcaaagagaacttacctccatctcgcgatccacggcatcaccagtgccaacagcacgatcgccacgtgggccgccggcgttacgccagtcactgcctctctggcggtcgggacaatcacgagccatatggccagcattgccacagacacgacagatgatattcgcagtgaagttacgctgctcggggcagtcatacttacggtgtccaatttgaccacctgataagaaccacggttagaattaatcgcgcaacaaaggacgtttgaaaggtgttcacttacagttctggcaagcctggttctcgtcgtcacgaagggtaccgttaagagcagccagctcacgaagttggttgcgcttgagctcgttctggccttcagggatggatgcggcctagcaactgttaataccgggttttgatcaacaaaatgagatatgggaacttactgtttcaatgacattgtggacaagcttcttggccttgttaaccttttcttcggtgtccgccataatcagacagtgcaggtcttcttcctggttgctaccgtgagcggcgtcagaccgaccctttccttctttgacggagcctttgcctcgaatggcaatcttggcaccggactcggtctccatctttttcaaggtgtttccacgaggtcctatgagtaagccaactgtaaaaatagcaagagctaggtgttagtgatcctgtaatttttttaaatatgtgcagcatcaagcaccacggtttagcaagaaacaagctgaggacatccaaagtggtatgccttgtcagctcgagtcgagtagggactcgtgatagacgcaatggaagaatggttaggagttagagggttagttatcatactgaagttaatctctggatagtcattcacggggacgtagaccttctcctgggtcttggtggggcgtctgtagtcagaaggcgggttgtagttagggatggtcttgatggccttctcgaccagtttatgacgttcgtcctcaagacgcttgcgataacggtactcgcgagtgttcacacgtcttccgaagttgtcgtactggggaggtggcgagggagatctgcgatcaaagtcagtatacaaataaacggagtttacaaaggatgaaagcacgtacctgtcaccatcggcggggaccacgtcgttgattcgaagcttctggctgatttcctcaatacgaaggtgaagcgtataagcttcaagctgctcgctggtgaagttcgccatgatcatagttggcaggcccataagaccggcagccttattctcttgttggtcaccccagcggttgcgcttcttgcgcctcttgccatcgccatcggtgttcaagggagctggatcggctttgaagcaaggtcagtcttgattttgttttcacctttgagtttagaagaaacgtacctcgaacagggctacgcccacgctttggaccatcgggacccatagacgaagaggggatagaagaaggggtcacagtgcgactttcctcctctccatcctcgccgcccatgcgtcgccggccaagcgggatgttgttggagccagttattccctggttgcgccaagccatgactgctgctttggatagaaaaatgtgagtagtaagtgatataggtggaagagatgaaagaagctgcggtgttcaagaggcgagcatgaacacgtgatttcagcaaaatcttatttcgtaggcggtggcgaggccatactcggatttgggtatccccggacccgatattatgatgttctccgcttcgtcttcatagatgtacagtcacggtctgtacaatttccggatttttacttcattcttctcttatttcctttcaaaggctccattggtccaacttttagttaggcctattcaaagggtagaccttagcctgatttaactaggaggcagagttagtagagccggtaactattgggaaggttcggatggagattatgaaaaccaacgctttttgatccagagcaagatgatctttaaaagggaaatgaggtttggggggagaataaaagtagcatgctgggatgagagttcgatgaaatataggctgaggattccactcctcggcattagcccagtacctatgcaggtagatggctttagcctctccggttttcaatccaaatctcccaattgcttcttctttttccattgcttcaggtcaaatgttaccgtagctcatcctgttgtccattccacatgaaagaagccccttcaatggtattgtggatgctattgtcattcaaaagctcaaccaagcaaggtgttggctggtacataggccgcgagtcaatgaagtcgcgtctgcaacagcatctcatatgccatgccatggactgaatggagtggctttccatcaagaagggcagggcagggcctcaaagcttgatcacagaacctatcactctagcatgacgcatgacggagggtcgatttgatgatttcaagactgacccgttaatgtcccgtagaagaaaaaaacattctttttggaagggatatctggaccagtcatccttagcagaattgtcggatactgtctggttctgccttaacgtgtctgccgagccattgcattcaaggaatttgcggagcatccgggggtgtatcgctcattgtgtgtgtatgcagatgctgacctcaacaggccaggactcgggagagcgagtcaaggaacgcggataacaacactgtgtattccgctcgtggtgtagtgatatggagagggaaagagctacccgtaggtatctcctctcagtgccatccgactccaaggttccttcccaggttggaagtctagagagattacgtcagcagtagattttgaggaccctgcgatctggactctacacgacgatgaggcctttcggatctatgcttgtaggtttgcgattttttcgatactcagtgggcatgcacagtcttactcggttataaaaaaaaaactgcgaggggcgagcactgaaatggaaagggaaagccctgggatatggcctacaatctggggtatacgtgcccatgtaaagtgttccataacactcatacacaatcagaaaaaaaatttagtttatgatctcttgattggaatttcggtttgaaatcatctgcgcagctatccaagtcatcaatctcccagcagttcttctttaaactttgcctttagcctgggcctgcatcccctgttgaatccaagacctggcttcagcagccgttttatccacagctgccttattctgaattagatctttaatggtatgaggagaagggacatgacgaccactctcagtacctggatgcgaagccataagcttctcccaagccttaacattcgggaattcgtcaatatcgatatcagcccatcccgcagcagctatccatccccagtgtgagatatcggcaatagagacatggtcaccgacaagccaaccagactgacacgtagcaagatgtttgtctaaaacaccatacaatcggcgacattcgttgacataacggttcacgccgtactcaatgcgctcaggcgcataccgtgtgaagtggttggcttggccttgcataggtcctaggcccgcattctggaagaacagccagttcttcatagcgtagtattcccgcgtgcccctggggaatgagatcttgttgtcgtgatcgtactgctctgccagatattctagaatgctaccagactcaaatagccggatctcctttccatcgctaaagaggtctgtcaaggcagggatgcggccattggggttgattttgagaaaccagctttacggtagttagctttgtttgtgtgggtatttgtaaagacatactcttccttttgaacgttcctcgatatgtcaatcttctcgaccctatattgcaggctacactcttagtaccaagcgtcagaaggtcgaggaaactactgtacccaagcatctctagcgctatggatattttgattccattgggggtctgggttgtgtagagggtaatagttggttctggcatattgacaaagcaagaaatggaactgaagattaaacagatgattgagaaagacgaattcttaatagatggtttaagtatgtatacgatgaggtcacattagctttccccgggctaaccccccggggcccacttgtcggatttataagctcgtggaactcacggactccgggaatgttctcccatgtgaagaatcatatcacctaagcagatgcccgggacttcttggggaatagttccgttctattacccctagtcgcatacattgcggcgagtgcatcaaaatacatgccctgcacggattgaagacgtgcgtatccctcgagtgtggattgtggcctatgggaatggcggaaaagaagcagatatggtggatggttgtgcaagattgaaacagacgaaagacctgtgtacctagtcatgtactgcttagtgtctagttaggtctgactgtactattgttatggctatgtagtgaacgagaggcagggctgttcatcaggcaggtcgctacaagttaaaggcttgtttgtggagaacgacgaagtcggcggttattccctggactgctgtttgaatcattgggcctcgatgcttaagttgagaagaatttctaatcaaaccgtgcattcgcaggaaagatatgtacaactctataagcccatgacgacaggaagatcgctgccagaagagaacaaaacgatcaaagtatacaagaaaagccagctgcaaagcaaagcgaacaggcaacaggattagactgtcgtataatcctgcataaaaagatgacagggaccatcacaacaaatacgctcatacgccaaaaaaagacagccacatatgtctaccagtacgtcagtctaccaagagaaactctcttccacataatcaacactagactgagcctgcctctttcgacaaacacggcgaacgtcatcactcagaccgccattgccgcagacaagaacgcccatggcaccaatttgattctcgacctccataccgaccagtgtgtcaatattcggacggccagggaacatctgcacggttgcagaggggctctggatctccttggtgttgcgcggccgtgtaataaagagcataatgcgcaggacttcacggcggcgatccattgccaagatactggtcatccagggccggatccactccaagtgttcgggggactggataatccagacgagggtgacgcggcgggcggcgacggtgccattcgcgaacccggcgaccagatgacggacgaaggggacgtggtgggtgatgccgactccgccggcgaagagcatcaccgtaccgtatgagtccatggtgtgaatgttgccatatggaccctcggcgaaggcgcggagggtaatctgtgaggtcggggagtttgaagcgcgctggaagagcttgtcggtcattccggtccggcggcggacgaggagagagatggtttctttttggggcgcattgaggatgtctttgcttgtgagtgggagagacttctcgtcggaatgactgtctgccgtttcactccagccaacggagaacgggtgtgaggtccacaagcccactgctgggatgtagaggtagatgtgctgacccggacggaaggtccaggggcgggctaggcgcagggtaatgcgcattgcgtcgccgtgcaaagcctcgatggttgcggtggtggattcacgaccgcagttacggtacacaatgattaagaagcgggtggctcgctcgagtgcccagaggatgagggcagcaagtagataggcttgcgctggcagcccgttgagatggacccagaggaaacccatggaaactgccgtaatggcaatgtgcaaatggaggaatgtctcatagaatgcatggcgaataggcgagggcgaatgcagcaagagcgcagtgaacgcgcaagcagccaccaagccagtcagcaaaaagctgctaccacccagagccattccgacaaccttccagcctttcgcttgggctttgggaatagcccatgcaaacacatgtgcaagactctccagcaccacgatgcggccgagccatcggtggagcagattccatgtatcaaaaggcacatggagcatagcaattagagggttgctacggcctgccatcaagatcaatgggatcaagttcaccgttgccatcacgccggtacggttacgaatgacaccagcaagcgtgtctgtttcggttccataaggagttgtcacacagcaaagcgtgacgttcatggcgataacgccggtgataaggaacgcatggaagcggctaggcaaagtacccatgttaatagctgacgagagctggagttcaaggttgtgtcggtttcggaacaatgcagcatagattatatgctccttgatccaggcaaaggtattgtgtgttgagacgaagtaccgttgccggtcatcgttaaagcttgccaggcgtcgaaggtggcgagagaagcagaagacgagctgccagatgtaataagcggcggcagcacagccaagggcaaggattgtatagcgtgccagactatcgttgatggcttcgtagtagacagagtaacccgatcgtttttcgatgtattcaatatccgtcgcactggtcagcccagcgagggacatcgccagcagaaaggagtgcatgatgacagaagatgcacgtcaagtgcttgggactgaacttgatgtgtggtttagcgaggccggctcgctagaaaagagtgtatgaaaagggaaacgttgatatctggatcgaccccacagaaggctcggaagatattgtcgagaggtaacagtaaacgaaataaccttaggttgcttggtcgaaccacagaagcaagggtcaaaggggtttccgttgggtggctggtgtaaagtaaaggacctgcctatatcttatgtatagaaatcagacggaaagcatggaataaagccgtttttcgatatgttgtcagtccaatcgagctcggtgggaagcgaagatgttcacagaacagcgggcgatgtttgttaaaggcttgttgtcgaagggcaacgacaggaatgctagtgatccagtcactgctaaaaaatgggctaaagatgaagaattgtccacagtgaaagaatgaggattgtctcaataacaaagacaaaataaatgagacaatattgattgtagttagaaaaagagaagaaaacgaacaatgaaagatcgaaaatagaagaaaggactgtttccccttgtgtttagtcctagtgaagagagagtaagacagtgccagggccaaccggaccaatatgtagaattccagcaagactctccacctccagcacggcccatatcaatgtggaattcggtcatttccattttggtttccgggattgttctcaaatttctcgaaggaggggggcttgacgctgggaccacaggtgagtgtaagggatttctcatgtgcgtactccgtatggaagatgctgcagatccaatgcagcaaatcaggggcccgtatttgcagataacctcagcagagcttggcaaaacatggacatagaacacgcgacaggtcaagcccgagttgtcgtaagtggcgggaataccgatcaagagctgtgactggccagcactgttcaatagtgaaacagccaagtggatgaagcagatccgtgttgatgcttggcgtctcctttagcgcccacgtcaacccacattaggggctgtgaaacaactccggtcattatttgctccagtcgtcactgtaaaaggttatctcccgtctccagggggtgttttcttggcggatttcatttatatcagacctgaatctcctctcacggagaattatcctccgagacactgtgcttggcctgcatctgatgaatatattcttgccattttccaggttgtcctttactccgtggtttggcgaattggaacgggatgatatgaataattcaaggccttgtgctagagtttcgtttccaatttgttttatcttaggtgccatataaagtgcgcatgtgaattgtctcaggttcatgtccaatcgtggggtctttccgttggcatccgttggcattcgttggcaccgttggcatcattggcattgttgggatcgtgaagtccaaagactagtccaaagttgagaaaaactaaaatcgattacagaggccatgaacaaacatccaaacatccaaacagcaaaaatccctaatccaacgccatgggtatcaaatcaaaagtactaaacaccgatttcctaaaacaaaagcggaccatccatatccaccgttcccaaataaaaatgagccaaggtctcgtaaacgattgatcaaaatcagccatagacagccaaaagatctctttacaatgtaaagtgggatacacatcccagattcatggatgaaccaggggactctggggggtatccgacactgctcgcgaaggtaatctcaactaaaattagccaagaaagccccgggtcaggccccgatcaaaaaaagctgagctcgtcgtcactgtcactatcctgaaaatatggattgaccttttgtcgaggtttcggcggctcaacgatgccgcccatggttgaaaccgaagggcgcgtagaccttcgcctctctactgtacgatggacctgcttcgcagcacgctccaaagggggccgagcaataggctgacgcgggctgcattctttgtgattgacgatcacgacttcaaccttccgtgcctgttgtgttgccggggtcatccgtctagccagattggtgctgcgctctcgcaggatgtcccggcgagtgactagttccacggtaggattgtatctagtcgagaaagtagagcgtacttgaggggtattttcacccttgtcaactacaaccactggagtgagtcgttgccgttttctaggccgtgttggtgaaacttcggtgtcctctaaagtccgcttggccgccatcggcaggggagatgaggtcaaacttgagacagagtcctggaagcgatcagacccaggtgagccgctgtttgtgtctgtagaagaagcgatacaggggaccgggcttgatagcatgcgcatgggcctttgcatcaggatgggctttcccttggtcgctggcgtagatgccacccactcccctatgctatcttcccagcgaaacagacccgtactctggctagatttctcgggttcttctaaagacctttgggcagtctcttcctggcgctgttttttcacggctgcctcctgaacgtcgatggcccagatgtggtcatcgggatctcctgtagcctctgcaaactccatggcagcttccgccgccactcgcccaagcaaagtggacaaagctggtgtatcagctaagcgaacgagttgcgaaatcatgtctcgtatttcgccgccagtatgttcggtttcatcttctgctttctttctgaggcagcggaacgcttggtgtacaaacaatgctaattctctaatcatgtcagaatgagatgctataacctccgcgtattcgtcaatgctagctgttgacaccatcgtatagtggttgtttaataaaatttcgtcgttgcactgtacaagactggtagccagcaagatgcagccacgccgtaataattgatgaggggtattatcaggccgctgcacgacagaaattgagtctagttctcgctgcagagcaatatgaagatagcgtgtaatgcagctcgccttcgttccatccgcacaatcagtgtcttcggaggcacgagaccttgaaatgtgcatgccgcagatcgctgccatgaggcttataacgtgattgctcagtgcatccttcacttgtaagggacaaggccgtgcaatatttgagatttcccacgctatggggacagccctggtcgtacgagcacgggcagtcattcccttctttcccttcacgagtaattttggtgtaggactctgagcaggggtgacagagcggacaccactagctgagagaatcacagcttcaatcagacgcgtagctgcaggacagtcttcatcctcttttgagagggatatcgttgctcgtgtcatccagctagtccacaacttggttcccatccactctggaggtagcactccccgcaagagaagcttcgcaagttcatcgaagatgtaagagcgattggcaacgccatgatgagcatacttgtgtaacaatcggaccggatccgaaaggtcatggccaaccactggccttacagcctgggggtatgggtaatttttgcgtgtggaaagcaatgtagagagcaaagagtcactttcttcgggcgcaaaggaacgacatttctcaatcagcgcgcatgcaatcgaatctgttatccaatgattctgtatcagggtagaaatcaagtagataccctgggcgcgaacagcctcgcgaagtggcttccagcctgtcccataaggcgcataaaatgcttccaattctgtaaaatatgcattacacatatcttcgtccccgtcttcgtccaactcgtcctgcgcctcttgctcgctcgcaataaattctggcaaacttcgtgccaccatgaacagcaaggatcgtgccccacgcctgtttgtttcggataagggcttcacttctcgcgtcgatatcacagtattgcaaaggaaattttggaagacgcgatcaagattgtgtgctatgctggcgaagcccggatcaccagactggtcaagaagttcttgccaagggctcttgtggagcgaatatcgatcacggaacacttgcggctgtggtagttggctattggggttggcatggccttccgggcgttttgacggtgcactcgagggcatctcccacctcctcccagtgatgagtggtgtcgcgacctcaatagcgccgggcagagtgcgtggggcttctgggctgtgtattgatagtctatcgcgctttttgcctgcagtatcttctgctttggacgaatacttgtgtctgggtcgacgtcgctcgggctttttccctggaatccaagctgggtcgttttcatccggatccgcatccgagcctgagcagttgtgccgactttctggtttgtggtcgggttccgaagtaggcaaatcattgctctctgctgtttcttgtagttttgactcggtcgcgatcatcgacaccgtttctttgtgctttgcgattcgacggcagatggaggtcaaggggcgcaggacacggtttgcccattttgcggtggcttgggcatcctccatttaggacaaaaggaataataataactgctactagcatacaaaagaatcagcactgtcacagggttcttctggtcattggggctgcactgtaccaacctccctactaacaaacccctcaatgatacatgataggaacaatgatggcactcaaccaggtattgccaataatgcagcaataagccaatgtaaataagatatgccgaagaataattacagggtgcgttgagtgaaaaatgaaggacaacattggatgagcaaacaaataaaacaaacgttgactaatacaacaaggcgggtaaacacacacatattgcctattatggcgatcttagtctccagatgtatacaatcatgttcctggaggtaaatatacatgcatctattccatttcaaacacttcatatcgacgtaattgattctactcagaaagagaaaatgacccaagtggcaaatccgcataatgcaccagatatgagcccattttaagacaaccgagtcctttccatgcacggcccaggagaccacccaacctggcagatgaaaccaaaaacgagaaaaaaaaggagagaggagagagatctaaaatacaacagttctttttgctcatcaagcctgcccaccgatccccaaaatgacaatggatatagatattaacacatgtaatagccaagaaaataagaacggaaaccaattaatgctgtttaaattggctggaactggctggcgtaggaaatcgtttatgccttgttagactgcttggagccgcgaagcttagggttgctggtggctgcacgcttcttctgcttggagcgcgaagaggtggcgtcgctaccttcaatgaacttcagaagctcgtcgatgctgcgagagtcgagagccgaaggatcggtgggagtactgatttcgggcgcagactggccaacctggggctgaacacgggttcccatggaagacacacgagggttcagagggttgcggcgcagacgacgagcctggatgtccttggcgtgcttggcgatagagacagcgttctgagtgagctgctcgagccagttctcggcctccttggtgttgcgatcttcgggtccaagctgagtgaggaagatgttgtatgcctcgcgcatcttgccgacggcagccttggagtcctggtccaaagcgagtgcctgggcgagttggaagagaatagtggcggtattgatagagtccttgccaaagaggtcctcacagacggagagagaggcctcgaaccacttgcgggagtcgttgtactgcttgaggtgttgcagcatcacggcggcgttgttcattgtggtgatggagtcggggtggttaggaccgtagatgatcttccatacatccatagcatgcttgatgtaaaccagagcggtcttggtgttaccagaggcgtgctcgaatagactcaggttaaggtagctcagaatagtgtcagctgaatcgacacccatagtgcgttcagtgacaatgacggccttgcgggccaattccacagcagcctccttctcatcagtctggtagtacagcatggaaagctggtggtagagcttggcgacctcaggatgcaggataccgtaaatttgctcgtgcagagacaaagactcaaggatgagctcctggcccaactgcttctggttctgcatgagagagatacggccggcctccagggcctcctctgccaatgcgctgcgaggagaggcatcacggaccaaaggaacaacattcaggatgtcatcagcagtgaaagtgacagcgggcttagctggcgctggagcggcacgggtaggggacttgttgtctccacccttcttcttgcccttcttcttaggctcctcgtgtgtggatccgttagtgataggaacaacaacctgctccttgacctgatccttggtgaaggcgaaatcacgggcaccaagctggatacccaacttgatagagatatcacgcagaagctgcaagtatctcagggagttgctccagtccttctcaagggagaagcggaagcggatggtgacctgcttctcgatttcggcccggagggactcgggagtgacattctcaaaagagaaatcgccctcggggaagatcgcacgcagggattcgtcaatctccgccttgggagtagcgttgacatctgaaccgaggagacagttcagcaggtgagcaaggcaaggggcgacgaagggggcgggaacgttgttcaggtagcggttggcaacgtgcttgaaggcacgagtaaccatttcctgaaccacgaggatggacagggcctgcaggcgaggtcccttctcggcggattgcttggccaacgttccgaggtaacggaggttgataccacgcttgtgcaacagctgggtcagcgattgaccgtccatggggaagccgacgtcgccgtcgtgcaggtccttgagcaggtcggggatgaccttggatcgcaagtgatcacaggcatcccggacttcttgctcatcctttgcccattgcttcttctcctcctcagtctggggcacctggccgctgaaaacatcggggttgagagcaaggtggaaatcagagatgtcaacacgatcctgctccgcattctcctcctcaggcttgccctccttggcagcctcggcggcagcagccttacgactctccacctgggccttcacgtactggctcatcttgtggcgccagtaggactcgaccaactcaagtctgagaacggacatgcggtgggggtaaacatcgcttccatcttcttcctgccactcgacatccagaggagccacgcggtagagatccaggacgtacttcctgccgtcagtgcccaagagtcccttagtctcgacgctaccttccaactcgtggcgcttgttttccttgtcccaaacagggtgctgcttgacacgcagcgccttcgagagcttctcgaagaccgggataaagtcagcgtgagtagccacaacctccttgccctcaacaccaccgtagtcaatctggtgctcaccgggctcgcgctgcttgaagataccaggaacaatgctctggccaacaatacgcttgcccaggtagtcgaccaccacggttccgggagtgaacagtccgtcgatatcaagctggttaacggccttgataccgagaacatccttgcccacagccacacgtgcggcttcgtcgccaccctcggaggtgaaagttccaacgccatcggcaccgaaagagtagaagatgttgttgtagacaaagatctgggcgtcccgcgcctcagtggggttcagaggagcaacctcaccccgggcaacaaggactgcaccacgagcggcggcctcgttataatcagcgaacagcttggaagtcaaacgttcccggaacacgcgatcctgaacggtctcgcggggcagctcgcgggtagtctggaactcctcgttccagtcacgcagagtctcggcattatcaacaccagagatcaggtagttctcctgcgaacgggtgatatcgggctggtgagcattcaagcttgaactgctgggggcgatgagccatgggctgttggggatggcgttctggaaggggaaagtggtcaaaagatccttctcattgttgtactcctgcagggcctcgaaggaggcgtcgaacgagggcgagagttgagagatgagagtgagcaaggagtgggcgctgcccttcttggggtgtgttggcttcggggatgggtcgaatctgacgctcgagcacttgttcacgaagaaaccagacacatgggcagtgatctggaattgttcaccttcgttagtagaaaccacgaggtaaagcaagtggcctttctggcggaggttgtacggaacagggttccatgcagacaacgagatagacttcactgtctttggcagaggagcctctgcgatgggcaggatagtttgcagcggtgaaggtccagtgaggtcatatttggagagcgagtgttccttgtccgactcgccggccttgatagcgtctgccgtgatagcatcgtgcaaggacaggccagcggagataccatggaggttatcaacacggtcaccagaagcaccaattagctccctgatccgcacaatatgcatgcgggcttccttttcggtgtagggatcttcgaccaggacgatctcggagtcggcctcgaggtctgggacctcagacagctcaacaaagtcgttgatgcggttgccgttgaactcgaggtggaagcaagtgtattggaaggttcccggtaactcgacaatggattggcggacatcctggacctgttcttggctggagacctagaggaataaacaggtcagataaattttcgctatttgtggcttttccaaacatcgaacccaccatcacttgaatcttatgaggcgcatgagggagcttcacggtgatctggaaaagacctatagtcgggttagaacgccgctacacagttttgcgcctgtctacaaaacataccaccggtgttgtcctcctctgtgccctcgggggcattgccattggtaatctcttgggaagcttgaggagcctctgttcctccgttagcttgtgtgccctgcatcttgttttacccggagcccatgctgtattctaatagaccttgtccagcacggaggttccaaggaacacacacctttcgagtgctccaactccccattggtctctgccattatgtcgagccggttatgaagagagcttcgacgaaagaataacagtaaacccttatctcacaaccgtcacgcgggcgagagacaaagttcgggaaaatggaacgaaaagaaaaaagttgaagaccagtggagcttccagggattcggcagatagaaatcttaggatagtatacaatataagggcaattgagcaagaaacaaaaaccccgtaccccaggaagttgaaaataaggcaaggatgaatgaataggacggtgaaattgggagaccggagagaaaatttctcggatgcggcataccctcggaagtgctcgggcggtgggtttcaaggaagagcgcggagaggacattcattctccacagtgtctatattttggctgtgactttttggcaagggtgtaattagtttgcgattatatatagattggaaatctatattcctgccaaggtaagcctatataattcccattgattggatgttgacttcaatcccatagatctacaagtatgacgctgtagtgcctcaggtatcaatatttttcgaatgtgcattagcgattgtgtacaccgtggcattttacttttcattttaattttattggtaataaatcatttcccaggcaaggtttgtctttaattagtctatcttaatatgcagaagataaaatgtgtatcgtgaagacggtttaattctaacggagctgacgctatatgtactatgtacttgactaaaaagagaggggcgaggtagggatatagatggagcaaaattaaatgtttgaattctaagacctagtgctcgaggaacttttcaacttttcaacttttcaactgggtgaatgagtggattatagactctgccaggttgggtatatatgtgacgtagaacaaaggctgagatctataactcggggtttcaactattctctagtagtagattagttacctagatacatatttacttagtcatcccttctagcagattgaataggaattggatgagcccatggattggatatcgcaattgttagttagaatccacgtacagcatagaggctatggtactttatagacaccttatttactctcctaaagccaactgggttttttcaaggatccactgtcttacacagaccttgaggaaaaccaattagagaaaccccatatattcattgtagtaatacatactctacttgcgcaacgtaaatagatggcgatctgattcgccaagccttccgcgtccctggttcatcgaggctgatgttaacaccacagctcagccacaacttaattcttttcttgaactcctttctttcttctagtctttcattaacctcttttgtttccttgttttcttgtttctcttctgatactcagtcttttcgatccgcaaaatctcccacagtctctctttcaccgacgcgtcatcccctagaggtgtggcttgcgcaaccatctacaagtctagaatcctagcagtacactccttcaacctttgtgatttatatcgatacaggtcctacacagccatctgcagttctggttatctttgacaaagatatacattctcactctcattgcctttcactggacttagcaacccgtacaaacaaaaaggccaatcacgatgctatggagccgactcgcacagcctgcgaggtgctatgcccgacagggcctgccaaggcctcccaggactaacagccgcgttgtatcacacacatgcaagcggttcaactcaacccctggtcaaatgaatccaaacccctccgagcagaatgattcggatgagggcaagggcaagggccagggccgtaacggcgattctgaccccaacttcaaatctactattctgaaaatgcttgaaactgcggcaactacggcagcatcaattgctattctagggtaaggtgtacctgcattattcaaggcatgcgttactgtggctaattttctcccaagcgcggctggttactcctatcaccagtactacaagtacctgatcttggaaaagatggacaatgcgttcgaaccaggtgatcctgccctcgaggtcgcgggtgttgtttctgggaagcaccagtacagccatgaggaacattgggtcattcgcaacgagcaacctagaattgatgatattgtagctggtaaacaaagtggccactactatctaattatcggtgaaaagggcacgggcaagacgtcgatgcttttggaggccatgcgcaagatcaacggcaacagctgtgcgttgttcgaagcgcatgctgatcttgaaatcttccgaatccgactgggcaaagctttggactacgaattccatgaggagtaagcttatactgttatcatcttaaacaaataacgctaatgggagtacccagctatattggcagccttttcagcatccgtggtccgagagacactacggctctcttggacattgagcgcgccttcaacaagcttgagaaagtggctctcaccagaaggcggaatgggtcgactcctcttatattgatcatcaacagtacccacctagtccgagatgaccacgacggacaggatttgcttgagatgattcagcagcgtgccgaacaatgggctgctagtggtcttgtcacaacaagtatgactccaacaaacgtcggttcctcttgccatagctaattttgttttcaagttcttaacagcgatgactattgggtatacgagcgcttgaagcgttatgcaacccgcatggaggtcattcctgtgtcagatctgcctaaggacaaggcgatgagtgctttgaagaaatatcgccagcaattccacaacgagacacttccatatgggatcctcgagcaagtctatgacaaagtcggcggtcgactatccttcttgaaccgtgtggccaaatctaaggatatgacacagacctgcgatgaaatctgtcaagcggagaaaacatggttcctaaataagtgctggatcctcggaatggagatggatgatgatgtgatggaccagcagaagtacgccgtaagtacacactttaagatcttctggttcttgttacttcgatgcaactcagaactaatttaaaccacaacatagtctgctgctatggttctggcgaaagcgctggtagagaaagagaaagagatggagtcaaactaccacgaagagcaaggccacatcctgccagaaattccgctccatgaagcgcgcgagatcatgacccgtgctgacttcattcaatcttacgatcacgaaaatatcttcaccattgattcaagagccatggtgcgtgctgattccgtacccatgcagcgtgccttccaagaaatctgcgccaaggagaacttcgacaaccacctggacagaaccttagagcggattggagatatcgagagtcttggccgtactcgcgaattgaccatcaaagatctctggaataatggcaagtatcgcatggttgtacgggacaatcgcggacgagagagtgggacagttgaatttgctgtggctgaacgtgaaggtgaaggtgaagatgaagactagttattttgtatatgtcatacctagattcacaaattggaggtcctattgtaattacaaatctatactatgtggcagccctggagacatcaagtcgccgagtcctcgaatctggcccttggaaaggcaagagtgacatcatcgtgtgctcaccgccaaccaaacatttggcccgccttctctttttctcttccaagctttaaccgcgtgaacacaattaccagtgatttctactcttgactctgcatttaatttaactcgcttttcacatctacaagcctcgaagcctcaaaatgccgactaagacccctaagaaacgaactgtatcgttaagtgaacacacgcgacccgcgcgtgagctcgcgatcgcggccactgcacagacctctcgattggcgtgcatcccatctccagcgcgcttcatccttgtcgttttaagcagtctcactttgagctccgttcttttcacactcacctctactttgacggttggcgatctcgggcctatcagcaaacaccttgaggaatggtgggaagtgggcggcttgatcgcctggagggctgtggaggtcggattagcttgggttctaggatttgatggtaagtatcaataccatacacatggccccttttgcgtccggactcgaggctcctacagctatatagacgatgcaaaaaactaacctcgtggttgcgattaggccgtgatgtggcatcgttcctattcctgacgcacctaccgacatactctctcttgtcattcttctacggcatccgcccgacttctgcactggtagcatatggagtcacgattgtctccacggcgcttcccttcgcactcctgcgccggccctcgtccgtccacaacctttcgcaaacacctgctggtgcagttgccaatcgaaacattctacaggataagactaccactatattcacgactctcctggcaacctcgattttcagcgttgtgctgtacgccagctatgcgacttggcttcctacacagctggtcattcacttcgagggcctcccggatatcagcgcggcgcatgctggtcccgctggcttgcctgttctcttcctgacactgattcctgctggctgggctgcgcgtgactttttatttgttagctctactggttattcaaccgctaacgatgggtctgcaaactgctgcgagggtgaatatttggttgcggccatttgtcgcaacacttggggcaaactgaccaccaagacgagagttttggtttctcggtccattgtactcgcgcttgcagtcttactcaacacgattgttcaagtggccggcacaatcagtgatgtctctatcgaaggtgctgccacttggggagcggtctggtcattcgcgatactgattgcaggagccaccttcggctggatcgaagccgttgatggcgtatgataatatgtgataatgacagcatgagggattgtgctcccaggttgattttcgtttcagctgcgacgggtgcgcgagaggtagaggcagtgacccttatcctatttcttatggcgcgcttggttttgatatgtccaatggttttcttgaattacgatatataccttttgttgatcagctgtggggttattggcctcattcattatcttcgttttgtaaaatccccgagtcttatcttttttttccaaatgtcaagtactgcttcttcatacttcttcacactcggaacgttcctctattaccctttcgttattgtttgaatctgatatcttgaaaatggcctggaattgaaattaatcataagtctatgtcattggaacgttaatcgctgtataacatccaacaccccaattaagtatctagtatttgctggggcaaatcgtacgtaagaagtgacaggtatagagaagcaagaccaatcccaaaacaggaaacaggcaaaccaagtaacaagcacaatgatcaagcaatcaccagtgagtcggcggccccccgtacctgtccggttgatcaaccgaagtgcgctcggttttatacgaatcagccttctcgttattcaacatccatccaggatgcagcacattaaacacagccaccgaaacaatcatcatagccccatcgagcccaataaagtacgactcgtgagaaatgagataaccatcccatccctccgacaactcgatcgtacgatagatactccgaacatagatacagatgatggaaagtaccatcgccccgaacaggggaaggatcgagccggaccccggctgcagcagattcttgcgcataacgcggcggatgaagtcgaccgcgcaaatgacgaatatggttaccgagaagagctggaagacaattccagcgaccatgatgtgcgtgccagttgcggtgtcgccgccgaccgtattggcttctccggaggccatgccgccgccgatggcttggacgacgagggagattacgtcgcaggtgcagaagatccataggtacaggcttggcttcaggaaggaggattcgcggccgaggatttgaatgaagcggcctaggacgacgtagattcctgctgtgaagaaagttggggctgtggaatgttagggtgggcatggatagtcaagggcaagaaggtagcttaccgatgatgagggtggagatctgcattaggaaggcagttccgttgtatggacatttggctgaccaggtacgaccggcccagccgattacttcgactgttgatgttgttagtattgcggggagttagggtttcaaatgtcataggccttacccaaacatcccacactaaacacacttgcccaccattgtcgcttccatatgaactggattgtatggataatcaacgagaggccaaatagggtgcagaaggcaatgcctgctcctagcgatgggatatatccatatgaggtgccaacgccttcgatataggcaggacagccgtattgcagctctagcacgtcgaccatggcgagaaagaaaacgaatgaccccgaggaatctatcaggggattggcgagaaaattaaagctaacagtaaatccgtagtacttggatggattgaaagatagacagagattccccagacgactagagaagagatttatagacaaccaccccgtttgtccaaaatcgaaaagataccaaaagagagccaaggatcaggcttcagtattatccacgcgcacaatttgaatataagtgagaaagagtacggagtaagagcatggccgagcatccactagccccaccatcgggaaagacctttcaaggccaaagccacgggtctctgaatgcactacggagtacaataatctaccggggaggataagacccgcatcggcgcaaccaatcccgacattcaagttgttcatgtccaatggccagtttccagcgtccaaagcggattgagaaacaggccgactccggttggtatagaaaggcacatccataagatacggtaaaaagcgagcaggcagccaaccgcctgggggtatccctagccgatgagtattgtactttatacacccgacggactactatgatgtggtagattaaggatggcgtcaaagtcaagcctcataaaaaatgggcgcgatctgatagataaccgggccgaactacaacttacctcgcaagcctacactctttgggattagcgtggatgtcgccaagtttgcctcataagggattctatttatctccgctaaaaccgcacacaaagaagagtcttatgaaaggtctaaatgcgtcacgacaatcggtaaccaagcgctaggcagttggagagaatccggcttctatatctccgacttccaacgtcactccatcctacaatagacatagcgaggctatgtctacggttgctcgtattcaagagtcagttccacacaccgcttcaagataataagagacaatcacaatcaaacagatcaagtctggctctggccctagttttgtcgggatatcggatgaacgacaatccaggtccgccgcctcggatggcgcggatgtacgtatgtgaaaaaaaattacgaaaaagagtacgaggatccacatgcaccttattcgtgactggttatttgaatatcacatcttctcatatcggcttatgcatccctggacaacataatagactggcaacgtccatgaatgttaacaaatagccaaaggaactcatacttcgtatacttataggcaagccagaaaaggtaacgatcgccgatcttcactctagcagatcgcaaaagcagtggagtatttaacctcacgaaaagcaggccattcacacttggtacagccaaataaaaaattctccgataccgattctccaaggtccagtcaaccaacagaacaaaggtatttcccaagtatgatgaccaaacggagattgagtctcgcctgcaacattgcggcggtattccggccggacaaatcgagtgagcccatgcaaccatgcatatgtactccgtatagcgagacaactcagacacatgtcacccgattggacaccccgcccatagtcagtggcggagccgggggccatgcgatcgcagagagtgggggcgatgtcatcctctgtatggatcgggagcaacggttttcgtggggagagatgcaggagattgacactggtgcctgcatcagtatatccccatcccccacatccattcgcttcccagaaatcctccaaactctggccgccaagcatggcaccctgacatggtaccaaaagtacgtcacagattctgggcagcttccaatctcgacccgcggacgccgtgttcgcttacgtcatttctggatacctgctgggtgtgctagggctgcgatgattagcccggcgtatgagtgataggctgattgaatatgatgaatcggctctcacgtgtcgctgagaatcgcgcaccttcatctttttgttgactgatcagaccaaggttgatatgaacagacgactcggtgaccttggccagggctctgtcttacctcgttcagctactcttgctaaaacatggctatagtaaacctattcgattgtggatgggcagaagagaaggagaaggtaaaaaaaaaaaatgacgagctttcattttggtaacttttcatgcctgattgctctagaataactgacattgctttaagaaccttggaactactcaagatcccagaatggctcagccggtttgtggaagttgtggaattgtggcgtgtcatagatacccggaggatctatgagtgaaagtcagtattgcatggaaaattgcaaagaggatagagtactcaccgtcgcggtttgccacaatatacctcctcgtgttgacgatactcccctccagctgagcattcagctcctgctgatacacccggatcttctcatttcccttggcagcaccatgaatagcgtgctgagcgacatggtaacgcgagacacggttgagaagcatcatatcgaaaggcgtggtggtgctaccctcttcaatatagcccgcgacagtgacacgctcaagacgcggacgtccaaagagcaagccctgcagctcagttgggtagccatggtaattgaaatgaataggcttatcagcagtgaagagggagtcgaatgcctcagtggacagggcatgtggatgcagaccctggttctcaagaatcatcaagtccgtcacgttaatgacacaaacacgaagctctggtatgagcttacgcaaaagcgccgccgctgcaatgacttcgaacatcacctcaacaccaataccgaccagcacgacatccggattaattccttcgtccgtgctacagaacttccagatcgaggctcctgcgcgacagtgactctcggcctctttgggggtaaggtacactggagttggttgtttcgaacccaccatcagattgacgtagtttctcgactttagacagtggtgaacggttgtcaggaaagtattcgcatccggtggcaagtatacgcgagctgcagtgggcttcagtttcagcacagagccaatgaaagatgggttctggtgagagaagccgttgtgttcctggcgcgtccaagtactcgattcgatgtagtttatactactgacgctggtgtgccaagttgtttccagcgcctaaatatttggtgagcatagaattgacattagcaagggaaaagggaagctgaccatcttagtgaactttgcatactgcaccatcatcgtatgaatgatgccgaggaagctttcataggacgggaaaataccaatgcgaccggtcaaggtataaccctgcaggaatccttgacacatgtgttcgctaaggatttcaattactcggccgccgcgggcgttggagaactggtcccattggaaattgcggtttgtgccttcaaacacctcatcgagcttgttgctttccagctcgtccggtgagaacaatcgcacgttcgtcgggttatccttgaatgtctgattgatgaaactgccaatcactttcatggcgcttgcgtcagagcctttctctacgcagaagggcctccaatctggcaaattcggtcgtttgtaaccattgtaggcttcaatgcgctgaccaagcttctttttgtcttctgtgggaatcacagacttgatctcgtcaattacatcaccggtcgaagtgaacagctcgtctggtttgtaactagagagccacttctgcagcagatcgagttgttccttgtctgtctttgccttgggcaatggcacctggtgcgaatggaacgagccctcgagaaacatgccatgaacctccttgggccccgaccaacccttgggagtacgcagaatcagcatcggccacctcggtttcatgatcggcttcccagaacgggcagccttctggatcctctggatctcctcgatagcccaggtcatggagaagtgcaaatccgcgtcaatattattgagatcctccacgaagcgaacctggtacccatatccactgaagagagccacaagctctttgtggtccatgcacccaaatattgtgcgctcgctgattttgaaaccattcagatgcagaattggcaaaactgcaccagattccttgggatcaatgtacttgattgcatgccaggacctgtccgctatcagcgttgtacagtgcaaaggggaaaataatcgacgaacgtggcggtggcaccggtttcagcctctccgtcacccacgatacaaggcactatcagatcggggttgtccatgacagcgccaaaggacactgctagagcgtatcccagttctccaccttcatggatagcaccaggggtttcagcattgatgtggctgcgcataactgttagccgaagatctaaatagcatggcaaggcaaggcaccaacctaggaaagccagctgttgtgctaaagctcgagatcagtttgtgcaggcctttgctgtctcgcgaatattcgggataaaatctctccagcgagccctctagccatagtgcggctaggattgctggtgcaccatgtcctgggccgacaacgtacagcatgtccaggttccttgtccggatcaggtagttcagatgagagtagaccaaaattaggcccggacatgttccccaatgacctgggggtatgacatcagtcacgatggccgaattgaataattcggggatgctactcaccgagtagtcgaggtttgatgtcgtgaggtgtgagttccgactttaaaagagtattttcttgcaaaaatatcatagctagcaataagtcagtcgcgccgttgcaatatatatagcacataaccacaattacctgccgcaatgtaacaagccgctcggcgaaacttgagcaaggcatcacaagctttttcatctagtttctcatgatccaacttgacgctcagtttctcaagataatctggtagatacgacggcagcgcagctggatttggttggtctataatttctgcaggcatgatgaatttgatatagtagggttttagtgacttgacaggagcaagagaacattgaatgagttcaagacacaataggtgaatgagtgaaaactacaagtggaattgaaagaaacaggcaaagaaacaagttgccatgaaacatgccgtgtacttcgtgttatcgacgtcagcccacacaccctgacatcactacggctaatccttcaccttttgaaattcgtgccgattttcaaaaacacgctcgacgcgataaaacaggttcaaaatgactaaatctatcctagctgttaacgcgggttcatcttccgtcaaaatcaacttctataccctcgagaacccaccgagactgatcgcagatgcgtcgatctccggaattactgcacccccacctacattcaagtaccacaagggagacaagaaacacaaacaggatgtcaaacaaatactcagcaccccccaagatgcattcaagtatctcctgcagcgctgttttagcgaccctgagctttcagaagtcgctagcatcgacgatttggagtacatctgccaccgagtcgtccacggaggagactacctcgacgcagtcctcatcaacgatgagacacttgatcgcttgaagaaattggaagacctcgcacctctgtaagctcatatatctcgagtcttcatatttccgggattttatacctggaatcgactatatacctgccttggtcaataccccgctaaccccgcccgaccaaaagtcacaatttctccgcgctggagatagtccgcctgtgcaaagcagagttccccaaagttccaagcatcaccttcttcgactcttgtttccaccagacaatccccgaagctgtccgcacgtacccaatcaaccaggaaattgccaaggccaatggtctgcgcaagtatggcttccacggcatcagctactcgttcatcctgcggactgtagcacaatttttgaacaaaccgaaggagaagacgaatcttatcgttatgcatatcgggagcggggcgtcgatctgtgcgatcaagaacggagagtcggtggatacatcgtgagtcccgcaaagtttatattgcatctcaatctatctcgagttgagagtcgtgctaacacggtgactagaatgggcctcactcctttggcaggattacccggtgcaacgcgtagtggaagtattgatccatcgtgagttacatccaatgggctttcttggcaatgaaactatggccaactaatacttggtgatctagattggtcttccactataccaacgaagcaggccatctaaacccaggcagcacgacaagtatgcatattagcacggtatgaatacccaagaaccagtgccaaaaaggagagcaaggaaaatactaacccaatccaacaccttcaggctgagaacatcctcaataaacaatcaggttgggaagccctcacaggaacaaccgacttctccaagatcgcagtggcgaatccaccaaccaaagcacataaacttgctttcgatatcgtcgtcgaccgcatctcgggctacatcggcagctactacgttaaactaaacggtgaattagacggtgtagtcttcgccggtgggatcggtgagaagagtgccttgctgagaaaagcacttgtcgataaatgccagtgtctaggcttggcaatcgacgatgcggctaatgacaaggggcctggagatgatgagacggtcaaggatatctccaaggattccggcaaggggccccgggttttgatttgccagaccaatgaacaggtatgtggtctcaaatattgaggattattgaccgtgaccgtaaccttgacctctcttggaggtgaaggtttaggttataggttgttttgctttgatttactgacttgggatttcacttacagtttgaaatggcataccactgtgcagcttcgaggagctgatttctcatgcgcggtgtctagttttgttattagtttcttcttcttttgctattagtagcaacaatagtatcagtatctaccttggtagttaatagaagaggttggggggttgaacatggttggattacgacagatataaggttctctacattgtacacctgtattccgtacatacttaatcgatattccaaatagttaatcgaaatcagatccaaatattaaaaagcaaaaagcatgtaacatagttggctcttgtcactgagggggggaaccctatgtggctgggttgacaggtagtctccgatgggtcatttcagccctggattgccaaccccggtgattgggaatcgggaagggtgcagtcccaggtacttggtcatatatttacgcctctttcaatgcaatgcagcctttatcctttatcattcctggtacgtgagttctgcaacagcatacagtaggtagggggagaagagaggcctgaggacacagtccctacataccagcgctagcttgggttactttgctgtggatcgtgtaccccatactccgtacaatcgaacaggaaatgaaaaatcgaaataaaggggaaatgtaacctgcagcaggagtgaatgtgacacatccaggttgtcggatttgatagcttcggggggaggcacttccccggttctcagagttttcgattgtatgcaggaccacggcaagataggtgattgacgcgatcgagggcgatcgcctcggggaagatcgaggtctcaattgtggtcctggtagctctgatgatctgcaggttagcgggttcagatagcacattgcaattcgcgaagtcaacgagctagcgaattaggaggcgcccctaggtcgactaatcaatcttgcattgctatctagaggatcagacatcaaatcaccagtgatggcgtccaagggctaaggccgcattgcagagatcgacactgcagaatgcgaatgtacttttgtttctttggctcagcagcgtgtcatacagctgcacagtatactccgctacatgtcaacatatctgcatgtacacagtacagagcgcgtgacgcaggaggtatgtacgatgtacttcgatcctcaggcatgatcccccgtgcaggagtacctcggggaacattactccgtatccgttgacacacagcaagtggccgcggatcgcccgaccaaaagccggtctatatcgacgtgggtcgtacctgattgtatctgtgtggctcgatcagtcataatctcctccttcgtgcgtcatgtcgtgacaactaaaataggtccaaagtaccgaagtcaggggttgacccagggaaaaaaaagaaaggggacgatcgaacccggcacactggtgctggagctgtggagctgacgatcgtcagttttggttcttttctgcgagttaatcaggtaacccggtcattgatgtgggtatgggcctgtcacctcaggatccaaagagtccagagaggtctaaaaggtcagtccacttttttttccccttctttgttcggctgtgagctgccgtcgtgtctcatgtttcgggagtcgaataggaaggccggaacttggtggaggcgaaacgatttaccaaataaaaaggagaagctaggaattgaggcggctgaaaaaagcgtttgtctcgggacggggaagcggttccagttccaactgattggactttaatttgcgttctatttcttcttttgtccttctattcgacccatttggtccctaaatgccattgaataatagcggagtaccaacggaataccgactgtggacactacctaagtatagcccgttacaaccatcagctatggagcacatagtgcttccagaattttccatctatggagccttcctttgagagaatcggaaaaatgaatgaagatcgcccggcttcacatccgcggcgtcctagtgcgctatttccctgctcctatccatagtgacatttggattgtacgttgtaagagacgactccaacgccacacacccagaggaaaaagtaaacaaagtcgagtcgatatcccaatttcaggagcgataacacatccacatctgtcaaaaagcaaagagtccggctggggcccgatgcatccggaccgggaacccccctgcatcctgatgcgctgcaaggcaaatctccaagtcaatgcgggtggtgatccgcgaccgttttgtctcgatatctcgacgccacaatcaaggcgtatgcgggtagctacgatttccagattcaaaccaaggaatgtacttttgagaaagatcagtgcaagataaatacaacatacaacagtgtacgtaccatggatcagccccgggaagactaagacgttccggaaacgatggaagccggttcatgcaatcgccccaaccttgttttcgaactaatgcaccctccctagactttatctcggcttagtacatcatctagaaccttggaacatcgacaccgtatgaaccgtcgtcttgggtcatgcaagatccagaatccgttgggttcggacgtcattcccaacgaggaaaaagggggagaaataccgaccaaggctattaaggttgactgtgagaggattgagctgatggagctgatggggtcgatggagtcgatggggactgatatggggactcttgtttttctcccggttctagcgcccttctagctgtaattgaaacggcttctttccgtacgataacagttcagttccactataggaagctggatcataggctttttttctttttttttttttttttttctggattaggacatggaaatatgtttttacacattagggtatgcttgtgacttcttttcctcaaaaacagttgatccacacgatgctctccagtacggggggaagtatggagtagttttcccctattttgaacatgtggaaacgtgtcactgggagatacgcctgagataaagacacgagagagaatgtcttgttccaataatgagaagcgtaacagagcaagccacaatgctaggatgtagaggtgagatcgatcgaacatggttacgttgagaactctgaatctcttaacggtagccatgtacggtagatcttccagcccccgatttccacgaggaagacccagattcaagacccgcgggagaggaagttcctccattcggtatggtgtggacacgggctgaaacacgcctacgagtccctttcacaagcctagaaggtcgttaatgtgaaccctgtcagctgggggtcactataccgcaagagggtgattgtggctgaccgtggtgagatgtgtcggccccagtgtggcaaattatgagagcggatgcagatacccttgattaccttccagagcctagattatggattatgggggtggggcttcctctccgaatgtttctagatgttatgtgtgatgtacggaggacggagtacatcctgtacaacacctgcggacaccaaggttcttcattgtctctacccagcgtgccgggaacgaaaagaaaggctagaaggcgaaaagaatgttcgtacgtaaccgagacgggattttactttttcgatcattacgggggccctccttttgcttagtgtatctccaccccctatgatggagcccaggatcgtaaagataatcctcttttcttttttttccccttcttgattggggcgtagggaatcatcagatagacacgccgggaatgaagtcaaaattccgatatgttggaattgcttttgataagtcttgtgtctggttgattgcgaattgtaggcgaatcgacgaggatttgatcccaagacttccgggaccagacccgaagtttgcgactggtcttactaagtgaggattgcacgggaggccgcctgaaatacggatggccttaattaatagccgaaatacccttggagggttggattatttgcatcatatgtcataatccgttcgctgttggggttgtagtttcttgcctcttgaacaacgcactctggactccatatacatacatcatgaaaacgaacaacaccgatggagccacgaccacgcgagaaatatagaaattaaaaagaattaaatccaatgctcggagtgatccgtttctcgttcctgcggctgtttttcccttttctgttctccacttttgcacaaaggctgcccggagatttggttcctagctttatagtggagagcttctatggctagttgatacataatagagagaggtctggacttctgggacctgacagtagtgaagacctgggttggatgtatctcgtggaattgtgatgaatccaagggtacctttttagcttgttttggtgtcataaaggaccaaacaggcgctatagattagaacgtttggagaagaaaggggggacaaatccgttccctattccccgggaccagggacgggagagccgctgtgctaaacaaagaaatggaaatatagaaaaacatagggaaaatcaacaaatcaacaaatatatgaattatatcgaatataccgaatatccaatatcaattatatactattattttcttttcctctttcgatttattatattattaaaaggataaatctaattttgattccaatgcctaagggaaaaaaaaccgtgtatatcaacgcaaacccccctcccttcttgtttcctttgaacatacttgataaccatctttctacacatccacccccctacagccctcctttgctctcccttctcccttgcgatacgtcgatttgaactttttccggatcgaccggagccagttccggagcactttctccttggctcccttgccgtcttaaacctcatatcccttctgcccgtttttcttggttgggattgcgactttttttttttatggattcgctgcagccaccctcgcgcgcatcattttgaatatttcgattattccttgatttaattctccatctctctactcataaaaagcaacgagctgcgacctgtccaccgactcgcttctctccccaaagactccattctcatttgttgggcttcgtcacattcctgccctacgatctgttggaacccgcactggtgccagtggtgattcttcaaaaggaccgacttttccgatcccgactgcatctgcatctatcgcctgcaccgctggtttttatctggatctgattttattctgttaattcgattttctcaactgggggttggattggcatttcgtttgtccgcgcttgtttccccaagggaaacatctatataagatcctggcgtcgacgtcgtgtttacttggtaagtctttctacctcattccccactctctgccattagcgccttggaactcgcacatctcttttctaccaaaattcctacctttcagcatctaaccatgattgcctctgcagacctgaacatgatcctgcgggacctatctgctttcaacatgggaagaggagcttacgatacaactggcgtgaagaagcccggcgtgcctccaccaccaccgaaataaatccattcggaaacatacccttcgtcatactcaacattgctttctacaccactcggtcatgtttcggatggtctggcgcccaacagcggctggagttctctcttttttattttttgacacatgcggtttggagttttacgtgattttggtaagacatgtccactccgagcacacctttgggcatcaaaactaaccgaattgccagagatctgtaacactatcttgttgttcttcgccccggtcacgggtcatacgtttttctcgcctattcgctacagacatcgcgcgacaatataccctatttaattttgctcgactttcgccagcattttcttttcggataccaagcgttggcacattttctccccctctttccgaccttttgatctttcgtctccgcacatgagccttatccttatttttcgggccctcgaaccttattccgcctaacctcacgttcttcacctcttgacacgaatcgataccacggtcctatttctctcaaaaaagtgcctttgtttttatttgtttttatttgcatctcttttgtctctgtttctcgttatcgaccggcgttttggtatagacgggatggaatgttgaatgggatgggctgataccaaaatctagagcctcgacctcacggtcaatagcatgctttgattgctttcttgttttactattggatgggtacagctcccgggtttatttgcatgagtatttgtacttttttattttgacgttgatgcctgtgtataatattttgcgcacaaaaaccataattgtcagcgccaatggattaatttttctctacattctctatctagccagtctagaccaccatcgacttcacttgcagtcatagatgcgctctgtaaccccgagtttgcaaactcgcactcatctcacgtcgtacttcgcttgtacttgaccgaccgcggttgcgctagcatcgggcagatttgcttgccgactaatgccgagacaggaacgacagcccgattgttgatgcgggcctagctagtgcgtcgggatattcccgagcctgaccagggtctttgctaactggcgcccgacatcatcttgcaggccagctaggctagtgcccaatctgcgacagctgtcaaggtgccaggaacctgtttgtctcccgctagcctactttttatcaagtcatagtacacgtatttcgatgcactctttttcaaatcttcatatccatgttatctgcatgccatcggtgcagtgtatccaatgagatgatatgaaccatgctggaaatcctggaacatccaatttaggtctgctgtgagtttctttaattagatacgaagataaactaagcctcaatagaagtatgagcaacgcaaatgcaatgctaggtgcatatgtcagttgtatacttcaaccttggacaggcctccccgtgactggtgactgacgaccgcgctaagcccaatcgaggcacccatcatcatcatccacctccgcctctctccaacttcaggttcaatcacccttgtttcgacaacgtctatactacgctttgcatttctcattcctcgaccaggatttaactactttaccaatactaggcacaagcaacgcctcgtgtcccgctgtcctacccccagacagccccattcctggcactgtggctactagctgaatccacctgccacctcatccggtcgcctggtcgctgatcgattgacagtgaataacgcacagaaggacgcctaactgtcacctttgctcttaccgtagtttcgttgtctcagccatgtccgaatcagcgaacgcaaatgccccgaagccgagcagcagcgtcaagcttgtgctgctcggagaggccgcagtgggcaaggtactgctctattcgtcatgttacatgattttgacagctaaccgtctcttgttattcgcccatagtcatcgcttgtcctccgctttgtcaacaatgatttccaggagaataaggaaccaactattggcggtaagatttccccatggacttagccccccccccacaggatacaaggtactgttcctggcagatcataaactttttggagaatccagggacggtgtgttgtatccaaaattgagttgttccccgcaaacggggcaacccggccccttaataatactttgcactagaataaccatctaacgtcgtctttccagctgcttttttgacgcaaaaatgctcccttcctacgcgcacgatcaagttcgagatctgggacaccgccggccaagagcgattcgcttcgctcgccccgatgtactaccgcaacgcacaggcggcgcttgttgtctacgacgtcacgaaaccctcttcgctgacaaaagccaagcactgggtcgccgagctgcagcgccaagcgagccctggaatcgtcattgccctcgtcggtaacaagctggacttgaccaatgacggcggagatgtttccgaggccgttggcgctacacagagcgagcctgagtcggcccaaggtggagatgaaggtgccggtgaggaagacgaggggcaggatgtcgtgtccggcgatgctcgcaaggtatcgacacgagacgctaccgcctatgcggaggatgagggtcttctgttcttcgagactagcgccaagaccggaaccaatgttgtggaagtcttcacggcaattgcaaatgccatccccgagagcagtctgaagactggtcgcggtaccggtgccggaactggtcagacttcgttgggtaatcggtcagcagaagactcacgggtcaacctgggtgatcgaaatgctgctacggctaaggaaggctgcgcttgctgatttgggtcttttttttggcagatgtttttgcaattatttccatggatacgggcgtccttcttgctttttttgttgcttgttccggtttcgatggagactccgtgtgctcttatagtacatagtgtgctactctccctgcagcacctcgtttcagcaatgattagagtgtaaatttttgagattggcattggcaatcagaaatcatctccagcgtacctacataccgtgaagaataagacaatatggccagaaagagtcccggggtagagttcttgactaaagacgagtcggatagtggatccccttcagcggcagccccccaatcagcaacgagccctaagacggacacgctaaactaaaacaggaaatagcgcgccctaagcgaatgcgccgatcccacagcaaattcccattcgattcaatctgcgaacctcccctccgtcgacatcaccaccagcacttcccgcagcaccccgtcgctcgcaataatggctgccatcaacaagatcgcccccaactcgccgtcccggcagaacccctccgagctggagaccgcgatcgccggcgctctcttcgacctcgagagcaacacacaggacttgaaggccagccttcgtcccctgcagttcgtctctgcccgcgaggtaagaattgttgtccgaggctcccgacatacggattgaatcgttctggaatggcgtctgtgaattttcgagggattcgatgctccggggtatattggttgaatttgtggattgatttcaattcttatccaccaacaccaaaaatcatcaatatgcagaggaatcatcaacaaaaggaggcaatatacaaatggatatgaaaattcgcagagcaagacgccgttccaagaggaattctgtttctgtgtgcaggacactttcaaccggacaacgctctgacattattctcgctatctaggttgaggtcggccacggcaagaaggccatcattgtcttcgtccccgtccccctcctgaacaacttccacaagatccagcagcggtaagcaaccaccaacccttccaaccccaatgggccaaccgaaacaaagccactcaaaccaaagaacaacccggactaacacccgcctccagtctgacccgcgagcttgagaagaagttctccgaccgccacgttctcttcgtggcccagcgccgcatcctgccccgccccaagcgctccgccaactcgcgcaccacccagacccagaagcgtccccgctcgcgcactctgaccgctgtccacgacgccatcctcaccgacctcgtctaccccgtcgagatcgtcggcaagcgtacccgcaccaaggaggacggctccaagaccctcaaggtcattctcgacgagaaggagcgtggtggtgtcgaccaccgcctcgatgcctacggcgaggtctaccgccgcctcaccggccgctccgttgccttcgagttcccccagagcggcgctgagttctaaatgcacatttagaattctttgttcactttgactttttttggggctagggggcttggaatgtgctcggctgatgcgtgggagaatggcattgtttctaggttttgaattgttgcttagattcaacgccattgatgggttccaaagagatgatctccataaaaaatgcattgacggttttttctcttttctttttttgcccccagtcactggttgcattgctttgtgtgtccggtgtgagctctgggtgaggcgatggagttgagttctctctctatctcccgatctaatgagggtgggatggaatatctgatagtattccaattcaacgattccgacttttcattgcttctttagatgttttgtctaggattggatctagcctgctggtagattataggcttgattacccctggacaactagatattgttggataagtagctcatctgctgttattgacttggcagtatcagacccaaacgtcactagacgatatgtattatgcgatgcttcatgaacgggaaaaaggtacactcgggggtatgaaaggtatacaacgcaaaccagtcgacgcaaaatatgaacaaaacaatgacatcccctatttatctacaacgaagcctgaattcttcccacaccaagcaccatccaatatgccaactccctggtaaccttatcatcaggcttagatccctttccgacattctgctgatcaagctgtgcatccgcatcccaatccatatgcacgaacaccggaatctcaagcacatcctcatcctgcctggaagccgcaatcgccgagacatccacatcattagtctcggtatccgcatcgccattgccgttttcagcactactcccaggcaaggtaccagggacaacctccaacacgacggtcgtccagttccggcccttgtcccacaccttgcctgcctcggggactccgcgttgagcgccggagcgagactcgctcgttaagggcgcagagccaccctgcaacgcctcgtcccagacatcgctgttcgcgccaatctcaaactgcggagagagaactgtgactttcgttgcaacgcggcctggggttacggggggcgtggcgagggtgatgcggacggggtcgaacatgtggttttttagcgtaagaaggacgtggattgggcgcaggggtgggagggagttgaggtcagaggttggggccatggctgggagggctgacgtggaagagagggccagagggcggagggttggaagggggatgtagctgagggcaatgaggcggatgcggaagcgagtagattgcggcttgctctcgggcttcacgaggatgtgcttgcaggacttgcagcgcttggctcgcttggtgcggagaaggactgggagtgggaggagatcgtcaacgaagcggacgtccggtgattgggttgcgcgctggtctattgaggccatgccatcccagccacattctggagactgaagtcgtgcaataatgtccgcttcgttgttttctgaagcgatcagaaggccctcgcttgcagtcagagcttcgcgcataacaggtggcttggatttgggcttcttattgccgccatacagtccgcttagacgcgacgaggtcgtatacagagacataagccggtttagggcgcctggcgaagagaatccaaattccgagctaagacgatcatttgctgaatttgatgtctccgcgatttgtgtacgatagaagttcttcagggctgcgaaccgggcatccatgcccattggaggtgcagccgggtcttcttttgatgcagcttgctctccatctcgctcgcttgcgttggattgcccatcaatagaggcatagctagacaacggatgtttcagatctccataagagcgagaagcttgcctcgagcggtcgaaagaagcaggggcagtggaatctgtcatcttttgcagttggctgcggatattagtcggcttgtcgaatttgatgccaatgtctagtgttgtccaaagacagtatccgcaagacaacacccacggaccctgttgaggcccgttcccggtggcattctcaatggtagtcacagccagcggggccgtacagacaggacaattgaagcaatttcggccacacctagtgcgtgttaacggatagtcgaacacaaccctttacaccctagtacataccgattgccatcactccgcaccatactgctcggcgtttcaaacaagcagctaggacaataccagctcacaatctcctccgtgatacatcgggggcatttgatctggtgacactcctcgcagtagagaagctgttcaggcggatacagcgagaagttggaccgtggagagcggggatcaaatgtgtgctcttcatcttcgtcctcttcttcttgttcgtcttttgctgacaatttcttgtcctgatctgtattcgcttgctccggtggtggtttctgcgtggactccctcgaccttcgcttcctagccggatcggggaccggggtgtcggcgcagggacatgatatgtatgtatatggaaaaggacgtgacattttgatattgacgtggaggagcgagcgagatgttatgtggtagcttttgaggtgtgtacttgggtcaattcatgactcgtctctgtggggtcgagagcttcgtaatggagtaaacaggttgactggtagcaaattcgtatcttttcgagtaaaaatattttatttccaggatcccgactttgttgcgccaaatcagaccctgagcggagcgtgttggcgcgtgggaacttgttggagcagggggtcacaatggctctgccacgcccaatgtactatgcacaatatagtcaatatgcacaaagtagaaattaaaaataattccaggccaactgtctccaaagcgccaattttcaagaagtccacagtttgcggagagggagctcttccgcatcaacaaccgacgtcagatcccgccattttctgcccgccatcgccgcaaaaccatggacttgcatgcttgaaggtgtagaatcctccatatccattccacagccacaatgatacccctacgaacatttcgtgcaagtctctcaaggcaatgctctgctccaacaagtactatccgaaaatatgccagccagacgcctggtaacccaatgcttgaggtcttcaatcgcaaagccaaacacctccaaaaagatcgggcagcccggaatgtcgaacagagtcggaatgtcgactacctgaaagatgaagtagcaatgcggctatgcgagcgcttactggtaagccactcaacgaagcaagcgcggacaatagtgcaaaagtagaaataggacacatcaactgacaagagcttctatcaccatgaataggacatcaaacgtgactttccaaacgttctagatctaggcgcaaacagctgcaacatcgcccgagctctcacatcccccaatatcgactcagccatgccggaaggaaccatcacaccaccactatcaaacaagatctcaaagctcacatgcgtggagacatcgcgcgcactgctctaccgcgacgagaacgaaccgtttaacaaggagatcaacattcagcgggatgtgattccggacttggagacgttgccgtacgcaccgaacagcttcgacgccgtgctatcgtcactctcgatccactggatcaacgacctgcccgcgctcctggaacaggtgaacacaatactgaatcccgatgcgccgttcatcgcggccatgtttggtggtgatacgctgtacgagctgcgcgggtcgctgcagctggctgatatggagcggcgcggcggtgtgagcccgcatgtgtcgcctctggcggatgtcaaggatgtcgggagcttgttgagccgtactgggttcaagatgctcactgttgatgttgaggacattgtggtggagttcccagatacctttgcgctcatgcaagatttgcaggcgatgggcgagggtaacgcaatcatgaaccgtgaatcggcaccgctttcacgggatgtattgttggctaatgaggctatatatcgttccatgtatatggaagaaggtgcgcgtggtatcccggcaacgttccggttgatctacatgattggatggaaggaaggcgagggccagtcgaagccgttgcagcgtggcaccggcgatgtcaacctcaaggacatcctcgagggaggtgactttgataaaccataagcaatggaaacaaaagggcaaatagaaagggcccaatattttgtcacaatatactaatgtaaaaactacgcttaaggcgacacttgagagatatcatctacagacatgtatggaatgcaaatcaagcttctaccaggaagacgagaacaaaaacagtcagaatgtatatcataagaaacgaacctccatccgatgttgtttgctccgctcaaaccgtcctacgatcagtcatgacccgcacaatcgatccagtaccagcaatatccacaagcctctcgtgccagctcagcaaaacgctcatctgctgcccaccgccaccttcacccaagttgcgagcctggatctgcgagaagcccgtatcctgaggcgaaactggcttcttcggcgactgggcaccgctaccgggagcagccgaggacattcccttgtacctgtaatcaataaatcagcaatcaaatccatgactttccctccgacggttcctctcctggcaatcgagatagtagttccacgtacaggtatttcatcaagcaatcagcccgctcagcccctccatccccgctgcacacgccctccaagatgcgtgtcatctcgccctgtcggataccctgcagcacatcgataacggtagcaagatgcacctccttggcacggtcgtcgccgcccagcggcgcggtgtcgaggacagtccgcagagcgccctctgggtcaccgccgcgcagcatctggcgcacctgtgttgcggcattggcggcgtcactggcacttgcgggttgggggagtgtggcggggaggagggattccatggggaagttggccgaggactcggggtccagggcgtcaatgttgatggtgcggtagttgatttgcgacatggtagcggttggggtttggttgagggttgaaacagagtagcgttgggtctcgatcaaattttggctaagccagtcgaatgggtttggtgttgaggaagctttgtggggagctacctgtttccgtttggtatatcggtgcggtgggcggaagcggggagattaggttgaacaatgggaaggcaacaatgtccagataaaaatgtacatgagtataattgtctgtgggagctgatcgctctgagatctaacttctcctatagaatctttacataatcatggcacgtggctaaaatgtgccatttctagttaacaaccccctgggccggtatagtcgcctaaatgtcacgatgcagttgtacggatcatcgtgatgttgactgtttgtcttgtttgcttgccatttgcagagcggccagctataagcagattctaatatattccaatgattattttaatgcatattcaataagcagttcatggagcagttgatgaagtagtcgatgaagtattgataacaaaagggacttaattttgttagtggcttacatacaaattgcaggtacctaatgtcattgcatagggagttcgacacgaaagcggtgtataaagtaaaaggcggtgtgaagagggataggcagaaacagggtagttacccaattaggaatgtgcatctgaaaagtcaggcgggggttaaataaatcttcaatatatattgggagagtgctaagatatgatactaggatactgggtagaattgcatgtatcatatattctaggtacaacccatattggggtacagcatagaattggacccaagacccaaagtgggctgggctgggctgggttgggtcgtgggttgtgccgaagtctagttacttcgtatttaggtaggcttatagaaggaatagttttgggattacgtactaggatctagcgagaaatacgtcttatacttaggggtacgggagcccatgatcgtatttagatactctcgttgaataagatatatagacacatcttctatcaaacccagtgtttttttgtacaaataacacaataaaatatcaaacagccagcccaacgctaataacacaaacgctaaaatgacagctaaggagacgtagtaatcgtgatagggggaatgacgacaggagtaggcgtggccagacgctcaggagagggcttttgcgtgttcagttgtagtctctcaggagcttcttcaggatcagtagactttggtttcaactcgagttcatcttctgacttccgcttgttgaaaatacggcgagtgaaacgcttcacaggcctaaagaaagacctgatgcctcgaccgattaccttgcaccccttggaaagcgggcgcaaaacaacagccataccgccaacaacggcattgaaaacaagcccgaaatagtagtctgggataagtcggagcacgatagcccagggcaagcaggcaatagaacagatcaaacacacgccccagagggtgccgttcaagcgagtcacgttgaatgcctggccgcccacgaagacgatcatgacctggccaccgatcatgatggcgttgattcctaagaaccagtaattgcggaacatgccttcgaagatattgaacttgttgtcgaggcggcgattgttgaattcgttgaagatctgcatccacacgaacgtgttgaacaccacggtcgagagttgtttcgcgcgcatctcgggctcggagctgagatgggcgttgaggagcttttcgcctgcgaaataaagcatgaatgtgatggctagctggtatactgcttggccaagaatcatcttccacatggtcattgtgaaaagggaggcgtgtttggagacaggcttgcggtcgagaatcttttcagtcggggcatccgtggctctgattttccaaaacattagcgagaggtccaggggaaatataagaggaaaaacacgacaacttacaaggcgagagcggcgaatgtgtccatgatcaggttcacccagagcagctgcacagctgtcaaaacactggtgttctcgctgctgtacacagatgacacaaaagtgaggatcacggccgtgatattgaccgtgacctggaattgcaaaaacttggcaacggcgtcattaacagctcgtccccaagcgatcgctgtgatgatggacttgaaattatcatccaggagaataatcgaactcgcctccttcgcgacctcagtaccagcaatacccatggagaagccgacatctgcagtccgcaaagccggtccgtcgttggtaccatcacctgtcacggcgaccgtttcaccgagggccttgagacgttcgaccaagattcgcttgtcttcgggggatgatcgtgccagcacttgcaggcgcggaaccacttcatccatctcctcgtttgtgagttggcggaacttgggaccttccatgaccaatccatcttccgtcttgattccgcaagaagttgcaatagcagtggcagtggcaacgttgtcaccagtcaccatcttgacctggacgcctgccgagtgacatttgcgaatggccgatgggacttcggggcgaagagggtcttggatacctacaactccaacccaagtcatatcatggaagaaatcctcgaagtttgctgaaggatcctcagaatgtttggcttcgatcggtggccagcttgcgaagtccttgtagactatgccaatcgttcgaagagacttgtgggcataattgtcgatgatctccagaaggtttttcttttgttcgtcagaaagctgctccacatcgggtctctctttggaaatatcaatgttgacaatttctgcggtgcagacgccgaccatcaactcggacgctcccttgacaagcagtcggtagccagctccaggaacacggtaaacaacacccatgcacttcctgtcggagtcgaaaggaatcaattgggtgatctcagcggagccacgctccgagacaagatccatgcccatataatccctagccaactgaagcatcgcaacctcggtcttactaccgacaaaatcgatggagccgtccttttcccgttcaaacgcagttgagttcaaagcgatgctcttgataatcaaatctttgatgggagctgatagtttctgggagatggccgaagtagtcattgaaccttccacatcttcatcttcggttctctggctgaagttttggttcgagccccaggttccggccacaacggtcattttgttctgtgtcaatgtgcctgttttatcagagcagatgaccgtggcgtttcccattgtctcgcatgcgcgaaggacgcggactaggttgttctccttgaccatacgggtagtagcgaaggccaaagccagcgttactgctagtgggagaccctctagcgaagaacatggatgtcagcagggctcagatgattgtagacatcagcacttacctggaatagcgacaacaataaccgtgacagcaacaataagaatatccacaaactctttgcctttcacagcaccgttcctttccgggtgattgggcagatcggctacaaagcggaatagcaaaacaaagaacagaataccagcagctctgtctcaccatcagtaacctgtacaacaaaagggaagtatgaaagtcaactcacgctgtacccaaatacccaatccaatccgccaacttacccagcttgacttgaagcggcgttgggtcattaggagtctgcagcgacaacaagatccgtccgtaggtagaatagggtccaacactggtgacaacataagttcccaacccttcaaggaccttgctaccggagatcagaaacgggtcgagtttcttggttgccttgccgtcgacaatttgctgccagacttcatggccaggggtcttcttcatttgatccgactcgccggtggcggaagactcatcgcacttcaccccgtagcctgaaactagaattccatctgctgggatggaatcgcctgcctcgagatggaggatatcgccgaccataatatcgtagattgaaaccatgtcgggtttgcctgagcgggtgacttgaacttgacggtcatcgttctgttggcatgttagctgtgctcagtttctggattgataggggaagacctgcccgtttattgagcttggcaaattgtctctctttttgccaatcgttcgcagctgtaacgattgtaacaatcaagattgctacacagatggcgactccttccacccactggacgcctgtgccttccgacacggtctcgtatatccccagggatagcgagaccacggcggcaatggtcaataatataataattttgtcattatatgcagcccaaaataatttcaggaacccggtcgatttccgagcaggtagtttgttctgactgaagacacgaatgcggtcttcgaatggtgaaccatgaccagatgacaccggcgccggcgccgaggtgacaggttttgatggagatttttctgtagctgtgtgttgcgctgaaggtgccacatcctggaactcgacattgccctccagacacccttcatcaattgacaaaccggccttgagatctgttcgcagaccccgctccagaccttgtaagccaccaagagcatggaatgcagccaaggactttgggttctgcattttgttcagttgacccggggagaacgcaaaccgattatcctccacctggaaatcggcttcattcctcgggtccggtttcaaagcatccgacagcgagacatcgtcgtagacatctttggaagtatgggtcgggtctacctcggagttcgcccgcgaacgaactacggtatctgctgaagaagcgaatgaatccgcccgcggacgcaatgtatcgccatcgatcgactgtgacagtcgatgcgaggcattttgaaccatcagccgagctgggtctggtgggttccacgccatatctggtgagacaggagaagtcgggctgtgatttagatctgtaggacccgaccatgcagaagaggctgtagacatagatcgctggaagagaaagaaaataaaacaatcagcgacaaatttccagatgtttatagaatgatgaaatagcttgagtggcctacctctctgcctgaaaagtccgtcactataacaggactcaatagcgagccctgataggaggggtcattgtttgaagaagacatcgcacggagttgattccgaaaaggatatgcgaattaaatgtaaaagcggctcatgaagatgttcatgtaatacgatctgatatcaagaaatgtctcgtgtgccgccggggttgcgagaccttgttatctcttcccctctcaacggggctgtgtattccaaggatgaatgcccagagacgccgaggttttcgtcaattttccgctggcaattcgcgacgagcgttgtcgagatgccaagtataagagggaatattttattatccacctcagaagattggagcgatccagaaaacgcaaaataatatagactcttgaagtggtgccaggttgtgccacttattaccccgtacggcactgacacagcccccttcggaggttgcaagcggttatcttgatcacggagctccgtgtatgatgtagcggcagtgtcaggttataggggagggcgaagctcataggcatccatacctgaaaagatgaagaatataagcgctgggcttctttcctgtaactatgccacaattcttcatatccatgctacgtgaatggcgaaacgatgggatcagcagccgtcgaatagcgttacgccaagcgcaggtatccaatgcgagggcgttgcgcactcattgtggataggccaacagctgctgcgcctcggagatgacccaatcatttggcacattctcaccccgacatattggcattattgtttggccgtgagcgcaagtaaggaggcaaagacgagtctcttggcgtcatggtgtctgttctaggttgttggagatggggtaggtgtccacttgatgagcggctagactgtgcgcatcatgaatacgcggcgccgctgtcagaacctatcaagcacacgagagaaatgattattatttactttcgcaactcattacctaggtagtaatttgttgaggtttctaggtgaaaggggcggacagggatagctttcgtggagtattgtggcggtgcttaaaatatgtatgtggcgatcgcctcatactgtggctggaggctcatgagctctatgacccgggaggcaagaaataacttggtaagggcagtgcgataggtggcattcataatgggctcacatcaagaaaggggctactccgaggctcttgagtagctaggcagaagcagtacagcccgattttggtctcaggagtcaggacgcgtatgtgcgaattcagttgagcaaagacaatatcctaagcctcatctgacacaaatgctgagcagtacctgcggctgctttcaaatgtatgtcatcaaagttcgaccttcgatttaatgcttgaaattgttttctttggaagtatggctcgtttttgcgacgccgaggaataatctcgttcaactcatcaagcatatggtaatatctaatccaactgcagtagctagtctcagacaacaacaagatggacgtctgacatgtcagatgatgcagtccttgatattggtcttgccacgtggtcagcatgcatcgttggccatacagtggaatccgtgccccaaggcaaggtgttacacttgtgtcagttacatgtagtgaccagtccaagactgattcctcttggcagaagctatctatacgtatggagaatgcgtgacgtttcatgtgcgaagctcgatgactttagattatcttgattatccgagctgatagtgtttaggtcttgattcatacatgtatcatactaagacgaagtaatatatccacaatgatgcaaatgtcagaggtaagtgagaaaataatgaagagaaacgaattcgaacaagaagaaagagaaatagatgaatagaagaagaagaaagaaaataaagatggggggtatcaatagtgaaaaagagaatataacgacaaaatcacaatcaaagacagtagatgcgcttttacagcagcataaagaagtagatcagtaaataataacaataaaaaggtacgatcggggacaagccccggagtccaatgtcacagaaggcctgcgaccccacccatcacttcatttccgtcatttcacatgtcccatatcgcaacattgacagttactgatcaatgacctcagtaaagcgactgcttcgactcccgtcgaaactatgaagactgcggccgagcccatccggccgcggcggcaggaacggcactgcactctggggttgtgcaacggggtgagccggtgtcacagtgatcggagtggaaacgttgaccgtattagagactgggaggtgcggaagtttgggccgtgtcggcggggtgtgttcctcgacctcgcgggtgtagtttgagtccaggggcacgccatatggcgaggttggtggaggagcatagaaggagggtgatccacttggcccggttgctggtgagggagtagggaagcctggtgcagtgggagaatcgccgtctactccgcccccatatccgtctccaccatgtgtgaagacgggaggaagctttctaccggaaatcttttggaacccacgctcgctggagccagagtcgacagtgcttccagagcgcgttgttgccgtcgactggcgccagcgctttatgaatgcgggggcgaggtatctggccgtgaagagcggatcattgctttcgcgccgctcgaccatttctctagacccagcaccggcccctaccccagccgcagccccagccccagccgcagctgctgcgtctcctaacatgttggggcgtcccgctttacccacaagaaatcctcggcggcggaggtagtaaaataaaagaaaaagaatgagagcgagaccggcaactgatcctactacaccacccacaattttaggtgtgtcgggattgcttgtcgaatcctgccctaaagcgtgcgtttcgcttgaagttggcgcggttcctgtgccagttgctgagccggttgacccagagcctccatatacacctgatgaagaggttgtctggcttgtgctggaagccgagctcgtcgaggagccggcgctggaactgaagctggagctggagtcggtgccggagctggagttgatgctggagctggagacggaactagaactggcgctggaactagcgcttgaactggcgctggaaacagagccggaactgaaactgaaactggaagcggaagcggaagcggaagtagaaatgtaaatggaagtggagttggagctggagctgaaagttgagctagagccggagccggaggagcctgaatatgaccaataattgtgcgcctggggtgatgttgtcgtaacagaaggtgtagagctagaagaggtgaggaggcgagtcgaagtccctgtaagcgaactggtgattgtggctgaggcagatgctaatgatgatgtaagttgactcgtgcagtttgtggcggtcaacgatgtttgagtggagttcgagaagcttgaaagcgacgttgcagatagtagttccgatgtcggctgggtaggagcaggcgtcggtgaggttaaccctaaatctatagaggcactcgcactcgcactcgcagtcaaacttggactcgcagtcgtacttgcaatcacgctcacagtcgagctatccgagctcgatagagtgtcagtggcgtaaatagaacccgatatcgtcgtcggaaagtaactagtagtcgaatgaaaaggggtttgtgagctagcatcgactatctgcaatacagtactgatactagtcgggtcgacggaggtcgactcgtcccccnnnnnnnnnnnnnnnnnnnnnnnnnnnnnnnnnnnnnnnnnnnnnnnnnnnnnnnnnnnnnnnnnnnnnnnnnnnnnnnnnnnnnnnnnnnnnnnnnnnnnnnnnnnnnnnnnnnnnnnnnnnnnnnnnnnnnnnnnnnnnnnnnnnnnnnnnnnnnnnnnnnnnnnnnnnnnnnnnnnnnnnnnnnnnnnnnnnnnnnnnngtcgacggaggtcgactcgtcccgcttttcaaatattgagtcggattcgtccatgtcatgctcaagacacatagagtttttcgagtcgcaatcttcatccgcggggatatccgatgcggggatgatgggggtttgaaaggaatcatcctccagtaaatcagagcctgcatcctgtccatgaagctctgcttctaggcggcgcctggcgctaattagattgccgatgcgcgagtgacggaaatgaccatgagacatgttgacagttttccatacacgtcgtcaattgtcaatcacatgcaagtatcaagcaagaccgaagacgtatgatcctcacagaggttgagattcgcagtattgcgaagaacgggaccgataaggtttgagtaaacgaaagaaaaacacgtgctagcgtgcgcaaagttggggtagaaagattgatagatcgtcccgagaaaagaatgacccggctgacagtatgaatgaatggatgttggcaaagcgtagccaagcgatgtgtggatcaacaagaaaagcgcagtatggacagcaggtcaatgatctcgcgatatatggcgcacagttacgtggagggaatggcaatcgaacagacgactaggcggagttagtatgggatggattcaattgaggccccacgccatgtaagcaagccagaccgaagacgaccaacacatacctggagtaaacgagtgacgagaagagtggaataaaaagcaagagcgcagtctcacgtcctaatccattgtgttttggatatctggtgaaaccagagcaatatagagtgtttaatatgccgcgagagtaagcagatgcaaatcgacagctctgaggggcacactggcacgatcttcgtcgagaggaatgaatatacacgaaatggcaagcaaaaaaagacccaaaagtaaaacacacacaacaagaaagagaagcgaaacgggaagatgaaggaaaagacccagactggaccaaacaatcccctatcgaggcctagtctaggcgacccgtgttagtgacgaactaggctcgggggccgacagatcctttcttctttttattttcttcccttgaaattcggggaatagtatctgcaattgacttctgacgatcttttttttttataaaacgaagaaaacaaaccccaagagcagaaaaaaaaacaaaagccaggtcgctctccacgcaggtaccgccaggtaccgcgggagtcgacgaataaaaagtgacgaggccccgatgagcttctgaccaagggcactaggctgttctgggattagcctaccatgcaggtttaattatcatcggcttggccatcgaatggttgtatacataggcaagggacaagggcgacgtgcgtcagtgaagagattatatctttgtataaatgtctcttggtccattcaatctttcgaggaaaaataatgtgccatggtgtacggagtaactacggaggcacacactatatggagcacttacgttgtgctaacggacaatcattcgccgatcccattctccataaacctattttaagcctaggtgtcagaccactccgtgaaaaaatgggatgtatgcatttgactccatatctacgcgctcagctcgtcttatttgacacccgcaatggaaggaagacaagaaagaatagaagggggggtatttagtaacgggctttcctcctcacgggcctagaacacattttttcgcttagaaagtctcgagctcgtcggctggaatctcctctccttcggcagggatctcgaaaccgtcctaatggggggcgcacaggcgtcagttgggggaatcctcagggaataggtcaagggaacggacctcggtcgagtatagaatgccctggatgtgcttaacaagcgtgtcttcttccttttcaagctcggggtcggcttcaatggcgctctggagcagcagctcaatgtcgcgtagcttggcgaagtagaagtcgcgctccttctctagtcctgcgatcgcttccttctgtgtggagatctcctgttgcagggcagcggtggccgccnnnnnnnnnnnnnnnnnnnnnnnnnnnnnnnnnnnnnnnnnnnnnnnnnnnnnnnnnnnnnnnnnnnnnnnnnnnnnnnnnnnnnnnnnnnnnnnnnnnnnnnnnnnnnnnnnnnnnnnnnnnnnnnnnnnnnnnnnnnnnnnnnnnnnnnnnnnnnnnnnnnnnnnnnnnnnnnnnnnnnnnnnnnnnnnnnnnnnnnnnnnnnnnnnnnnnnnnnnnnnnnnnnnnnnnnnnnnnnnnnnnnnnnnnnnnnnnnnnnnnnnnnnnnnnnnnnnnnnnnnnnnnnnnnnnnnnnnnnnnnnnnnnnnnnnnnnnnnnnnnnnnnnnnnnnnnnnnnnnnnnnnnnnnnnnnnnnnnnnnnnnnnnnnnnnnnnnnnnnnnnnnnnnnnnnnnnnnnnnnnnnnnnnnnnnnnnnnnnnnnnnnnnnnnnnnnnnnnnnnnnnnnnnnnnnnnnnnnnnnnnnnnnnnnnnnnnnnnnnnnnnnnnnnnnnnnnnnnnnnnnnnnnnnnnnnnnnnnnnnnnnnnnnnnnnnnnnnnnnnnnnnnnnnnnnnnnnnnnnnnnnnnnnnnnnnnnnnnnnnnnnnnnnnnnnnnnnnnnnnnnnnnnnnnnnnnnnnnnnnnnnnnnnnnnnnnnnnnngcccctccactgggcgcggccactcggggacggacggcgcccgttgttggggtcaccccacggcgtgcgctgcttgcagacggggcgcgcgaagcgggggcggcaccaacagcgccggaagccttacgccggccgacggagtcgtattcaccaccgggatagtgctggtcccagtatttcttaacccactggaggaactccaggttgtcctgcatgcggcacttcgtgagggactgaacgggaatgggcttgttgacctggtgtcgggcgaagacgtctggatgattggatatgttaaaagggggatcgttggccgatttggaatccgccttcacatactctggagaatcttgaagttctgaaggtaggcatattcagtgttcacgttgaatttgacccgggacatgggaacatccactgaacaaagagagaaaccagtcagtatgtatcccgcaactcagtacgggcccgtttctctcgactattgcgccggtcgtattgattacatactgaaaatcgaatcgaagacctggcagagggcagcactatagaggaagataggaggtcagcccagctgatccatacaaaagagatcgccccgcgggccttttgaaagtcggggagaatctcgatcaaaccatacccagttccacattgctcaatcttggtaaggttcagctgcagcaggttattaagccatgcgagcagttcctgtctgaatcataaagcgatcggcgtcagtaaggccatatcggtcgcgagatggcggggaataggagaaaagtcgaacctggattcacccatgatggtggggtagaataataatcaatcgaaacactagaggagaaaataagactgggataagcgctaagcgggaaaagagctggatgaagatatgacacgcgagaccaggacttcttgtcagtctacgctcgtgtggttgatgggaaacagcggagggattgttttgatgctaaatcccacggatcacactggcgctagcccactttttctggcgaatcatagctggattagttaagcacttactgatgcctgaggtgtctacttgtacctgagctctcacatcgtagcctaagatattacctcggtgcatgaaactattatatcgtcaagtgaggcacaactccattacaacaggtcaaatttcatatatcgtatcacccaccatgctgtcgctcagtgtatcgagttatcacctctacttaaccactgaccgccctttctaccgtcttccccgccgccatatttgaccggcagaaacggtcgatctattgatcttgtagctgccttgtcgcctcaggcgggtagccgcctcttttgactttctgtcaaatctttaaacagaaccttggaatgtgtacagcttcataatatttctcgtactccgtagcatgtgtgatgtcttccacgagtgacagcgacccactacaatttaaccgataaattaagaataaagcgaatatacaatgagtccgagtatacgaataataactgtaataatggttcgatatatatagatgattgagtggtatactaaatatataattttgcaccagttcatatgcgtataacaaagaacaagaattcattctgccaatattccaggccctgatccaatttgtatccaagacggaaaacctcatatccaactcccataatcctagcaatgtataatgataatgacaatgacaatgaccaaacaaacccacaaagggaaagaagcagcgctgaaaagggggcatgcggtatataaacaaatgcaaatagatcactcctctaacaggtcgatcccgtctatgccatatccaaagtccataatgacagcccgggagtcctggctcgtcgcaacaatgcgtctataatcggactgtacgctcaacatccagcttgtagtccagccagggaagtcgatggacatattacccgtatcacggtcgaacaccttgacgctcatgtcatagctaccgctaatgatgcgcttattggcgctgtcgagatgcagagatcgaatgagacctgaatgcccgtgcagctcattgacgagctcgcccgtgttagcatcgaattgatagattatgcggtcgttgccgccagtgaggatggtccggccatcgtcactgaattcgacacacgcgaggccacggtctttgctggtgaactccttgacacattggcctgagatcacgttccacatcttggcaacaccgtcaccgctggctgacacgataaggtcaccgcggagctgcacagcattcactggtccttcgtgaccgttgagttgcctcaaaagcgcaccggtgtttcgatcccagacacagatggtagtatccttggagcatgatacgatgtaccggtcatcaaagcacacatcaagcacaccggcttgatgaccggaaagacgacgaattggtcggtagtcgtccttgacgtcatacatgatacaggtaaagtcagaagaccctgtgaccatgatctcttcgtcaaactgcaggcacaggattgatgcgctgtggtatatcgattctttctctaatggtgttgtaattgccgctatttcgtccggcgtgggccacggcggggtaatagtcataaagggggcctttcccgtggcctggaaagttggattgttcactggaccatcacggaaagttcgagccgctggtggcccaataatcttcttgcatgaccacggatagtgcgcgtcccatacacgaactgtccggtcacgggagccagtaatgattttgttcctataaacttgtcagcagtgcacggcatcaacataataacgttaacttactcgtcaaattgggaacaataaacgctgtcctcgtgaccttgaagataaatggctgcagccttgccatccttccagcgctgatcgagagcgcgccgaacaaggaacttcttcttccagtcctgattcgggattgacttccctaatccagatgacagcttcaccttggaggccgtctcactcaatggccgacggccatatgcattgcggaatacatgcctccaaacatgagaagaggatgcacgacaccaggcgcgggagacgagctctgcgtccatgagggaatcaggatccaaatatgaaaaaatgtgtgatgtaatctcagccggaagtagagccacgggatctgagaaaaaaaaagagaagttaacaaaacatgcgcgttgcccatcagagtgttcatccttaccgagtcgcgtcatggccagcaactcgctgtctgacgtatccgatcgatcgcccaagtcaatacaaataccgctctccgagtcctggggaactctcaaatcaagcattttgttctctaattccgcttttcgcgcagcctccatctgctcattttgagctgcggctgcggcacgcgccgctgcacctgcagacatgtgattcggcagaactggaggtgcctgcccacggcccgggatgggggcagggatagaggcagtgggtgcatagaaactgtgcagggcagacacactattcaaagaagggcgtctattgacgctatatccctggtgccaaagggtttttgttgaccggagatcccagctaccggaagccatgcgcttgtgattcgcatggttcgaactatggtggtagtaacggttttcatcgttatcaaccaatttagtgtcctcggtgagaggagttgtttgcttggaaggcttgcgaagactgacggacaggcgatggccgagagcgaccaaaccatccacaggatgcttcaaactcgaaaagctcttggcgccacggcgtcgcggagccacgttcgggaacgggtctatctcttccacgaccgatgtgtggtcatcctggcagatttccgtcaagcgtggctcatcccatgtgtccaaagtcatctcctttgacgtcgggatagcatgacctgcagtgcgtgggcgcgaacgaaacgacaacgaagagcgtcgctttgcggaggtggcgttggtctctcgtggcgacatgactgaggttgttggtgtgccgagggcgaattaaacaggaattggatgaatatgaacgcaatatatgacggcggatgttaagacaaagaatgtcgacgcttttgtctattttatcgggtatcgaccgatgtgatgcttggtcttggggggtttctgtgagataagtctaacaaagtatgtatatcaacgaccattcgcaaaactccaaggacccaagagaatgaaaaagagagattaatgaatgaactatacagagacaaacaataggaaaaaaagacgacgcaaggagaagataaaaagggcggaagaattccagaaagcagaacggatgggcctgggtcaggcggtgaatgaattagggagtgattggttcgaccaccgagttctcctaagagtcgctagtactgggattcaaagtatggttggctataaggattaagtaccgaataccttgagagtactcgcccctgcaaggctcagacttttttaggagtcgggaggcaaatcctggggggaaaacagccggacggaaaatgcggagtaactgtgacttggatcgccacgataaatctactgcggatccaagtaccgactacactctcacggtggcaattattaggctttcgaaggaaaatccgagacaatgatgatgacaggctctgataggccgatattggaagaacaattgacttcaatctattcagataaacacccctaaaccccctaacccccccagccctctacctcctcctggattttgtatgttgacaccgactatatacataattcttaatactaaacatcatatctcctttatccaaagatcttctcatatccggtcaaagtgaaccgatagtgaacatcacccttcttcatgcgcagcatggcctccttgagtccttcctctccaatggggatctcttccacccaacccttaagacccttatccgcagccagctgcaacatctcaagcatctcccgacggctacccaggtggctggcaccaatgagaacaccgttagagattaggttctgggccttaatgacctgaccctcctcctcaggaagaccaacactgatccagcgcccatgaacatccatcatagacagatagcgcgcaagatcgaagccctccgaggagttagcgcagttgataatcaaatcaaacgagtacaggtgatccttctcccatccctcctccgcagtagcaatgtaaccgtcagcaccgagcttgcgagcgtccgcttccttggcgcgagagcgcgaaatagcccacgtctccgcacccagcgccttggcaaacatgactccgaagtgaccgatgccacccaatccaacaattccaaccttcttgccaggcccagcaccgttgcgcaccaagggcgagtacgccgtcaaaccggcgcacagcatcggagccactttgttagtctccagtgcgtccgggatcgggaacacccagtgctcgtgtgtccgcacgtgcgatgagtatccgccctggctaacgacgccactgtcggcccacttcgaaccgtaggtgtccataggctcaacctggcagtatgtctcgttgtcgttgaggcactgcttgcacttgccgcaagagtaggactgcgcgccgactccaacgcgctcaccttccttaatcagagtgaccttgggtccgacacggattgcgcgaccgacgatttctaggatggttattagcacgagacagtagccctttttttgctttttgaatacgtaccgtgacccacgcacagggggaacttttgttcaccccatcctcctataggaatacattagtcggtatttctgcttggtattccaacgggattaccataccgctgatagtgtgcacatcacttccacatatgccacaggcctcaatcttaatgtcgacgtctatactcggttagaagcaagcataatggtaccgacagcctaactcaccatagtcgccgaaaggcttcagcttgaactattcagcgtaataaatccagataagcgtatatcctaaccagaacacagaaaagagcacatacgtagcgcttgtggaactgggtgaagctgttaggtccatcgacctggaagccctcagcttcttcggggtaaggcattgtgataagaatgagtgattggtctgaagaatagaacacggaccaaaaagtaagaaaagtaaaatagaaacaagaagacaagcggggtgagggggatgtatatctacaagcggggatcgcacaacgtgccctattcatcccacgcgggatatgctacgtattgttacaatctagctgcttctctccagtcggacaatgtcccgtggacccgctccgagaaaattgacaacggagaagattcagagtgatcggagcggaggactcggaggtggctgtcgcccgagaggccaacacgctaaacagaacggaggtggtccgggcagcgtggggtggttgttctatttagtggggtaagatccgctacgtagccgataacgttaataccaagtggtttttccacctatgagcatgccaggagaaattatatgccggtttggccttatcgataaggggtgatatagggctttggcttagggcttgggccttttacatgggtttggtctgtcaggggcaagtatgtagatctgcaagacttcttcatttggtaaagcctacattatagtttgcagaggggtgtggcactcaatcagccctagcaaagtcgacgtagacagagaatttccccaaataaagatcggatgccctcagatagccatataaatgagcctttcaaagctatactgggacagcggagctaaatgatggtttccatatagctataatttcgtgttcttagagctgagcgatactggtgcgataatggtcaagaggccacgcccaacgaagcagtgagtgcatcatatcgtagtacttcttcctgtcaatctgacccatgtaagaatccaaggtgaatgatttgacctcggtaaattctttaaaattcaagaccggggtaaattgaacctgaaatctaccatcaaagtaggcgtatagtacacgggcgcagcatctttggtcaaacactatgatcatggtctatatcgctcgcaatatatcagtatgaaattctttcggcacaaggcatggggttaggaaggacctgaacgtaccgggaaaacttcactgaatctatgaacaccctttgacccaagtgcgttgacgagcgattccaattcacggaacatgcctctcaaaccccagctaattaaggctatgagctcagcagccgaggggcgatcgtaaccgcacgaggttacatccaccagagcccatgcatgcgacttgtatgggtgatctatctccattgatcttgtgatattgattccgtgtattttgtctgggagatcgaggccgtatagtcttcggaacctggataaaattgatcagcctgaataatacaaatgtcacatcccccaatatcaatgtatcactcaccagtagactgaccagtcatctgtctcgtaattcgggatatccaagtcgaaagtattcgcaatcaccatctcatgatcattatctgcctccttctcgcttttatcgtgactttcatcacttggtttgcgattctcgtcaccgctctcttcactcttgtcgccatcttgctcactttcatcatattttttatggttcatactttccccttcttttgccttgtcactgtgtatttcctcgatatcgctttccttcctatgatccgattcgtcctttccatcgctcaccttgtcgcctccagtgctatcaaggtgccccgactcatgaacagtaggatcatcataattatcttcttcttcgcctccatccagctcgtatggccacaattccgggatgctgcagtcctgatagtccatgaaaacacgtcgaagtagatagtctgcacggtaagtccctttgccgtagttgcctttttgagatagaaaccagtcccagcttggatctgcacatatcttctctatcctaggtgtacctcttcgtggcatgaaataatgcgtaaccgaaggcgaagttatcccagaagcaatgtctagatgattgagatcaattcgcagaagctgtagattccgctgggggatggaggaggttgttactttcttcatggagacaagcatttgttcaagtctttcccatctcaggaaaaagcaccaaaattggggggttgtatttacaggggtatcgcccattttggtagtttgtccgaggcagagatgttgaacaataaggatatatggcaggatcatgaggagaaacctggtgctagtaattataataagtagattgtatgtttacctaggatcatatctagttggttgagaagaacaacttatataggattgtaagactgatttaatgtactaagccccaaccaaaagctcgtccgtttccttaaataccaggctgaactgtcccagtggacgtactccgccgtggaattaagagtaaagtatattttcatgaactatgccagtttgggaaatcagataaacttgaatgatgcagggctttgtaatgtcgaagcgcctcaggccacgataactatttgcctctacaatataagcaaccaacgttggaaaatatggcaacaaaagagatgtcatgaaacttgatatatgcattggaattattttactagactttagatgaagctccttgcgatttcccaagattatgccacatcgggcaagctcaattcaacatccatagcaggcttgatcttatcggcaacagcctggtactgggcatcagtaagacggctgagaggtcggcgagggaacccgccgtaaccgtagtatgactggatagcacccttggtaccaggaatagcagcctttgtgagaacccagtcggcagcactgagttgctgctgggcctcgatggcctctgtgagacggccctcggaccaaagagtgaagatgcggacacacaggcggggaaggacgttcgcgccaccggcaagaatggcagagccgccagagacgagggtctgcagactgaaatcggcgataccgccgaaggcaacgtatgggtgcttggcgtttggcttggagactgttgcggtacgctgggccggagccaagggggagggaggggtgatggcaccgagagcggtagcgacacgagtcagcttgccggtattggcacaggtgaacttggtgccgacgatgttagggtgttcggagatacggatgatgaggtcggagtccatgtcaatgccagcgacggcaccggggtagttgtacaggataataggaacaggggagccgtcagcaacagctgtgaagtattcgtacagagtttcatcattgccgactgcggtgcggtagtagctaggaggcacgatcagaacgtactcgccgccagactccgcaacctccttgcacaggtcgatggttccgcggatgctgttctcgctggcgccggcgatgacgggcacgttggtgaaaccagcttcatcgagagcagaccgggtctcccgattgacggtcttgcgctcttcgcggctgagatgcacagcctcaccgtttgagcccatggtgaccaggccgactaggccagccttggctagacgaacagcgtgacggcgaatagaggggatatcgagatcttcggtctgggcatcgaagaaggtcattgtcggcgcgtaaacgccggggcggagtggggtgggagacatgattctgagattattggattttggttgatgttgatgttgttgatattagagaaatgacctaactgatctacttgggacttgaggggtatatagcaatgaaaacatcattggccttcgggtcatacttctcttcccccacgtccggcaaatgccccgaggtacattgtatggtggagaatcaaattccaccaatcagcacaagcacacagaatgtgggggacaggaggggtaaaagcgacgggtaaagatggctaaagacgcacttcagccggcgttgaaaaggccattagtctagcgggtgataaatcgcttgagttcttgagtcgtacgtataatagtctatatgcgcatggaaatccctatgtcttgaaaggaaaaatgagcttgaaaagtgatcaactggcgtcaaagccatggtggatgacgatacggctattgaatttaccccagggctatttcaaatgccggaagaattatatccagcgatttaataccccggcttcctgtaaattagtttaaaatttcctcttccccttagaaattccccggaattcaatcaccatttcggaattaacagacatcatggctcctcctagcgttttgatggtacggacaatggttccccgcagtagatcctcaagctaactgagctcgcaggtcggtactggtgaatacaccaccggtttcgtcggcggtggtgcatctggctcagacaagaaggtcggtgtagtaggccttagtctatttgacctgcgtcggcggggtaaggtgggcgacttgagcatggtgggcgtgtcgggcaagaagttccctggtatccgtaagttgagcgaaagaacaagcaattaaacaggaagctaatcgcgagaataggtgaccacttgcaccgtaatatctctcaagtctacaacaacctcgatacctcgttcgcttcgttccccgcggacgaccagaccgaccccgacgcatacaagaccgccattgatgccctccccaaaggatccgccatcaccatcttcacccccgactctacccactatcctattgcgctgtacgcaattgagcgcggccaccatgtgctcatcaccaagccagcaacccagcggctagaagaccacctcgctctggtcgaggtcgcgcgcaagaatggcgtcttcgtcttcgttgagcaccacaagcgctttgaccctgcatactctgatgcgcgggctaaggcaaagactctgggtgacttcaactacttctatagttacatgagccagcctaagagccagctcgagacctttaaagcgtgggctggtcgtgattctgatatttcctactacctgaactctcaccacattgatatctgtgagagcatggttccagattacaagcctgtgcgggtctcagcaactgcatctcagggtaccgctgccgcgcttggatgtgtccccgagaccgaggataccatcactctccttgtggagtggcgccgccgtgataacccggcgaagattgccactggtgtctatactgctagctggacggcacctcaaaatgcgggcgttcactcgaaccagtacttccactgtatgtgattctattttccggcagtaaacagacatcttctaacattggaacagatatggctgccaacggcgagatccgcattaaccaggccaagcgtggctatgaagtgaccagcgacgaccagggtctaattcattacaacccgtaagacccccattctcatggtaatgctgtaacatggttctatgctgactattatctagattctatatgcgctacgctcccgacgaagaaggaaacttcagtgggcagacgggatacggctacatcagcttcgagaaattcatcgatgccgtcacagctgtgaacgagggccgtgtgactctcgaccaactggacgcccgcccgctgcccactctgcgtaatacaatcgccacaacggcaatcctcgatgcaggacgcaagtcactggatgagaggcggcctgtggagattgtctccgagggcgataagtgggaactgaagtaaagagtaaacacgatgtaaatggatttaaattataccaaccagtgtattattttggaatgaccgtatataatacatttagtgctgattctgtcatgcgcaatgtcttaccttgagtcgactaggccgcaactttaaaaatagtaagctgatggaatacgagtgcgactccaattcagccttgtacttttagaattatcatcccccctcggcgattttttgtatatatcagactaaatcattcagaatgatgcgccgaaaagaggtttataccaatatcacgcccatcccctcgtctgtgccccgccaactagccctcgacatcctacacagccatagcgaaatcatcacactaaatccactcgtcctctcacatcaacccatcagggctccacgcaatgccgtcgccgacgagtactactcgacgtggtacgagatcacagaacgagtgcaatacgtcccggggctgggcaagataggatcgggcaagatcagcttcaaaggctgtttccacaatgtcgcatggggtctacagacgcacatgtacgcgccgatgggaatcgacctccgaagcaaatggcgcattggaggcaaccagcgcgacgaaccaccggaaccgcaagacaagcgcgcagacggcgccccgcaaaccggactctatctgcgcgaggatatcgagatcgaatgcaaccgcacgctgatttctttcgtcaagggtcagttgaaggtcgcttcgaaggtgctggtagatcgcctgattaagaaagccgagcttcttgatgctggtgtcttgcaggctatgatggaggatggcaaattgacgacatataatccggccgaccgatcgagcagaattgggagggagctgtcgctttcgtcgcgaagacagtcagatcaaatgtcgaggtcctcgtcgtctcggggaccgcgatcgccgacggattcgcagttggggccgatgtctcctggatatgcctttccgccgcagtacggacaccagcacagtagaagctttgctgtggaattaccaggggattcttatcatccacaacctgcacctggtgcatatcaagagttgccggataccagtcgatatccgaaatcatcacggctggataaggggcataatgaactatctgttatggaagaggctccagagcgtgaagatgggttactttacagcccttacaaaccaaagggttagttggttttaattttttatgtcagaagcagacacaactgctatgcattatgtattctttaagcttaatacgaacacgtccattcttcaagttgtctactgtatatcccgacatcgttcgatgagatcctgaatcctaaactattaccttcatattatcctaccgatgcgtgacaataattctatcgttcggttccagtgagtttcgacgaactgcttcgggcatgatctgtgccaatgatgcttccaatgcttccaaatttatgaacatctgatttttgaaagagaaagctagaaatccaagaaacggcgctactccgcacacaaataagaaaaaaacaaaacaagacagctcgtggtatcatgcgagaagaatcattcaaatccaattaacggcgggatccacccttgataatgccatcttcacccttgtggagcttgatacggcactgggggcagtaccacttggccgtgcgagaggggacttcggtcaggcccacgcagctgagatggaaccattcacggtcacactgcaacgaatagaatatcagcattctgctagaacatatcataatagggatagcttacatcttggttctcacagcagatcatcgtcccaaaactaacatctccacagagacagtatcggggctcattggcatcgatctgttcgaggacgccgtcttcgtctacacggacatcctgggagtcgcggatgctgaggcgcttctttccgggcttggctttgcggcgtccgtagcttactgccgcgccgccgtcttgaccagtggaaatgggacctggtgccggacgcttgcgccggcgggcagggccgggaacacttggcgcatgtgacggctcgcggatgggtggtttgtgcgctggtgttgcgcttttgatacggcgatcgcgtccacttactgctattgcggtcgggacgctactgagagttcctccttcgattgaggcggcggctacagagcgccgcgatgagggccgggtcacgggtggtgtaggtgtggtgacaacttggacaagtgatgggttgggtccggagcctgcggggctggggagaggaggggagaacgtggcttcaagtgcgggggacgtgtgggtcttgattgggagggtgaggtcgctgttggtttcagcggctggaacggcccctctgctagatctgcgtcgagatggaccagtcctagaagaaagaacagcgacaggggcaggcggtgcgaccggggcagcaacttgagtcggttttggaggctcgggggcaacaagttctgttgcttcagggataacctcttcgcgtttcctcttccgtgatgatcgattcgcggctgggggagcttgggcggggcttggcaaaggtttgaccgagacaccaccttcaccttccatcaatgcttgttcacgggccaactgttcgcgttttaatttctttgcttcgtttaatttcattccgcgattgctcagcttcgtctcctccaaatctttggccgcctcgccacgccgcgtttcctcaatgttatcacagtcaatgaactctccgcccgtctcttctgccagggccttcgctgcacggtatgcttcccagcctcggttcgccagggccagctcacggtgaatcattacttcactcggctgccagacagcattctttttcatcttcttccgcagcctggtcatctcccattccgtcaatcgcagccatggcaggtcctcactgcccaatttcgcatcagctggtggtggtttcaacagcgcaagggcctgtgctgttgactgtgcggtacccaggctcgggcgacgtgctttttccttctttgggggtcgcgcgggcttgggagcagatttaatgagttcgccctccaagtccgattgctcggtactggcaagcggagaatctggatcaaaggccccatcggcacctagaagacgcttcctgtttttatctctccgattgcgattgttatccaaccgcagggtgatacgcgtcgtggcatccttgatggctttcttgcctccgcgcgcacgcttcgataaaggttcgggcaacggcgacggttcctctgtggcaggtttcggcagtgcttcgagtttctggcggatgcagcctaatcggtcgaagtggcgatctacaacatcgtagaggcgacaggcctcggcatatgccgattcacgcgcatttatggcacgatcgagctgagaggatatatctttgcgcagtgcaattgcgcccggtcgggtatccgaaggaaggtctggaagctggccgtagatatgagtgagctcgtgcaccgcttgcgccgagtcgagatatcggtcatcgagcccgcggatgagggttaaggagcggattaagtctgcggggaggtattcagtgtaatcaataaagtctgtgactgtggcctgcgcgtcagggtcgaaggggccgtctaggatgacccctccgctatcgtctgtgtcgtctgtcatgggcattttctagcacgatagtagttgatgttagaatgtgtcaaattaggcgcgttctgcgatgataagtgaggacatcgaggggtctagacgtcagataacagatggagctgaatgccttactgcacgaggtcctacaacagcggatgatagttattccaatgcagctcttggtcacgtgaatatatccatagcccagatataccgatttggagcccgcatgtaacgaatatgtactcggtttttaccatagagttagtgcttcacttatccaatatagtaataacgaaattgcccttactccgagctccattaataccttcttatataaaatcgatcatgtcaaagctgagtcagtcggttttgaccaattaaaatggcctatgaagccccacctctccgaatatcgacactttaatgatacctatactccgtactaagaggtctatatggaggatagacgagggaaaagccacggaagtcaagtagtattaaagctgtttcgggttgtacaattgtaaagctctatacatctatccaaattgtatatagatgggcacctcagtgtagaatgcgctacatgtacacatagtctgttctatatagtttactgtctttattgaaagctatctcatatctatactcagccttggtctctttaatcaagagttgattcaatttcatctgacttttcaaagtcagactaaagtgctaagtgtttgctaatgtaggtaggatattgattgccaatcactaggcagtatcacctgcatgtataatattgttataacgtgacggcctgttagagaaaagagagaaaagagagaaaagaaagagaagaaagagagcaaacagagagatatagtgatctctttatgtactttactatgagctacatcgttctttcccagttgaaatcgtccctatcgtcccttcccaatccgatcgttccttcctaattaacaattctgatcccaaaggctcgccgtgcgcatcctggcgcgtttgtttatattttatattttcttatcctacttcctcctctcctcttcaccctacactcctcaatcttgccaaagcttttatctcagtcttccaaaatggatgttcgcgagcgtctgaagatgcttctcgaaggagacacgggtctcaatgacttgaatacccacttgagccaggctgaagccgtccaacctgcccccagtgcggatggagctgatccaggtgctgggtttaccaaagctaagcaagatgtaagtcaatcttaccctgagggtggccaatttcctttgtcgtacattcgtacctatgtggttggagacataggtgggtcgagagacaggccgttgacccagatcaaccagcgtcatccccgtcgtactccgaagatgcacattgatatcccgggcttgaacaagcgcaaagacgagggtggcggcggtgtttctgacttggattgcgacgaggagttggttactgcaatcccggtgaccaagtcgttcactccggccaccacaatggctcgcttccctttcaggtatatccctcagaatgatgcccagagcgtcaatgagcggttctatgagggggatcaattctggaatcgaacttgggatctgtttgtgaaatctaaaatcagttagcaaagtatcttgtcgctaatcctcacctaggtatcatctgtctgtcccaatggctatttctcaaaccccatttcttttgattcccacttcccaagctcaagcactgctcgatgaaatcaattcggctctgaacctcaatttgactctcacgggcgttgacaaggatggcctcgtgattgacatcgacaatgagatgctcccgcagcctatgtaccttggccgaaccagcacccatgctcggaagaagaaattggagagtattgttccctcgcctctggagaactggggaccccacgcacatctggttgagccccccgttttcgaggattttgaaaagaaaatcaagcaatccatcgccacaaccaagatcaggaagagctgcaagcaggcggtccgggatgcccgaatcaagaagtggcaggagagcttgggtcgtgcgcaagcctactttgggctgcgccccccactgaagccaaatgatacacaaccgtcgtttgccaatggtcagatcagaccgatcgatgttctgaaacctgtcaattgggcctttcaagatgcccccattttcatctgtattgaccttgagtggatggaccgctatggctctctgactgaggttggaatttcgactctggacatgatggatttggaaggtgtcgtccctggtgattatggccatatgtgggtgaagaagattcgatcccgccatctgcgtgtgaaggagcaccggcactgggttaacgtgacttacattaccggatgtcctggtagatttggatttggggagagtgagatagttcccagcgctgaaattccgaaggttgtggacgctgcgttccagcccccatacatggtttccttggagggagaagatatcccccgatacaagaacgcgaagcgcaatgtgatcttggtcgggctcgatctccacggtgatatcatacatctccagaaagcgggaagccaagtttttaccagtctgaacgaaccctcttcggtcatccgtgagaccatcgacgtggcagagctgtaccgtgctgatgctgaagagaaccaaaagcggggccttcgagcactgctgggatcactgaatatcttgagtttcgacctgcacaatgccggaaatgatgcccactacaccttgcacgctcttgtgcgattgatgctgagagtcgccggggagaagccgtgggcatacgagctcaacggtgagcgcaatgttgagagcaaggatgagcgcaaggatcagcaaggcgaccccgagtctgaacccaaggctgcagtgtaacgacaacattgatggagacccgttcaccgtcaactcacgaaagtgggagtgactgaggggctggagccatgaggtcaagtttgagaatctttaaacatacctcgtgggatgctcttgagaaggtgaatgggcgcagtgaattacaacagaatgcgtgagatcaaaaatgggtgaaaataaaaaaacaaaggggatgtatggctagttctagctttctatggtctgagctgaatgaaaatctccgctgattttatgtcaaagctttctcgtgctaagtagtccataccgtataaatgtactgtatactacgaaggtgtatagtataccgtaaaaagcaaatgatataactccgatgttatgtcctactgacgacacaccatgttcatcccactatcgccccatcccacacaatcttaatctccgatctccccctccaacaaacacaaacaccgaccatctcaaccaatatatatttccccccaaaatccagaaaatgaccagtcgaggcccctttaccgcttacctgctcggaagcaaccccaatgcactcaagcgcgcaacaacccaccgcttcctcgcctccgcaggccgcggcaccctccccaagtcgcaactaagccaatggctctcccaagaccgactctacgcgcaagcctacatccggtacatagggctcctcctctcaaagatccgcctcccaacccaggacccgaaatcaccgaccacacacaccccaaccccggaacaaagcgccataaccgtactcatcgacgcgctcgtcaacatccgcaccgagctagccttcttcgagaaaaccgccaacgactacaacctcgatctaacagccatctctgccgaagagggcggctgctcgctcacctcctgcggccaaggctcggacatcaccgtctcggccggcatctgctccatcggctctggaagctgtccggggatcacgggcggcgacgaggaaggcccgccagcggacggggagggaaatgcgggcggcgagcagagcggcgcgcccggacacggcctgtgtcagagccagggagagtgccagatgccgtctggtggggggctttgtgtgcccggaccgcagttcagtgagtatgggcgcgatatcgacccttctccttcgggcggggaggggtgtgggactcttttcttctgcgcgagtcgcaccaccaggggttacattgatatgttcatgtcggcggggagtagtggggtttcgatcttggaggggatggcggtgttgtgggctacggaggtttgttatcttcggtcttggaggtttgcggcggagtgtatgcgggaggatcggaatacagattataagaaagatgcggatgggggtgcattgagggagaagtttattgggaattggtcgagtgctgagtttgaggagtttgttaatcggattggggacgtggttgatgagatggcggggcagattaagggggcggaggagttggagattatgcggggaaggtgtttggagtggtggaggcagattgtttggttggaggagaacttttggccaaatgctgctaaatgatgtagagttatctgatcaactctagatcgacttgaaatgtcactatctctagggttgtgcacatgctgtcgcggttgaaaaatattgtatgtagaatatcatacatctgacttgaatcccatgtgcacaaggctatctagaacgggatgacgagcaaaagcaaagacaaaaacaataacgccgtccacagaccgaggcaaaatcaaatcaaaactccgaaccggtctctgctctcaaaccaatgacaatgtcatcgagcagaccgtcaaaacacaagtataaaaatgacaaaatccaccaacaccattcgtaatgcgaaagcatgaagcatgaagcaagtagtaaaacacatggacacagtctggaaagtggacatgttgtacatcacagaataagacagtctgcaccaaccatcgtaggcaacatcacgtagcagccgcacgggcagcattgcctagttgtcgatggtatgagccgataggttcgaaacctctgaaaatagtattagtttctgcgtgccgaccgagtgtataaaagaaaacctacctagcaagatcaaaccccgatccattatcatcatcatcctcctcttctcgctcttcattcctcgcatgagacgtcccgttgggtcccatatcccccgaatctgactggagcgggggcagagtccgaccggagccaagtccattcgacgtcccgggtttactaggactaacgagattcggcggcgggggagagctactcgggaacccgccgataatgcggtcctcgacctcacccttcaggggactcatgtccggcggcggacgggcaggggtactcccgatatcagcgaacttccagaactgcgcgggcgagctcatgggcatgaacttcgacgggatctgcgcggtactgggaggcgggagacggggctgttgccgttgcggggcgggagtaatcatcgaagagggctcttcgttgtagtaggatgaggagaggactggcggggacccggctacgttgtcggacatgccgtacgcgcgggccaggttgttgctgctattttggacctgcgtggagatgctggagtggtggttgtgtgagcgcgacgggagcggcgagggttcatcgtagtcgcgtgggttcatatgtcgcagtgggtggtcggagccgagccctcgaccgagccgggaaccacgctctggtgtgtatgcttccaccggggctacgggaaacgagctgaagcccggggacgaaacgggtggcgactttctcgctgttgctgagaacgaggtgtcgattttgctaacgtgagtcccgcgtgctgatgacgggggctctttcgtcgccggcgaggacggggcagatgactgcgtgccgcccttgcgtgtttgcttcttccggtactcctcccgatactctactgcgatctgccacttcatacccttgcccggctcgtcggtccggcggggaaccttttggaacgccttgtttagcgagagattgtggcggatggagttttgccagccgctttgggagtgtcgatagaacgcgtatttatccataatccaattgtagatactgttcaacgtgagcttctcctcctcactcgagaaaatagcctgagcgattagagtcgcatagctgtacggcggcttcaggtccttggaagaatccttgctgtaatcgatttcctccgtgctctccatcatcatgcctcggttgtaaagcggggactgcttagccgtgcgctggccggcggtatcgggcgatcgcggtgggggcgtcacctggcgcttgttgaacttcggagcaggcgccaacgagggcccgccggacgaagatggtcgtgtagcctcgctgttctgggaatgctgaggatgggcatgctgcgaagcatcccaggcaaccgaagccggatccggctcctgtccgctcgcaatgcgctgcgcacgctcgataaagctgggctggatattggcctcgtcgccgggcgtgacaaacatcatttgtgtattggccacctcgatgatgtcgccacatgagagaatcgcatcggtgccgcgcttcacaattgcattgttcaagcgcacaccattccggccattgacccggatgtgccaggcaggggtttcctcgccatcataaaagatctcagcatgcagtctcgacacgaatttgctagggcccaagtcgacatgaacatctggcagcgcacgagccgctattgtgacggggctagactgttccacagcccgctgttcgcggtccggttcacggccgatattgacatgcagtgttttgacgtaatacgtccaattgcggccggcaatcttagcatacgcctggatgcgctgtgtattctcggtcttggtgttggagtggtcgcgcgagacgcgcagttcctcgcggggggtgttcagatatgaaatcactagatcgacgaggtcttgattggtagcgggttcgtgttcgcccgttgagtcctcggcttcgtcggcggactcatgtttgacgtttcgaggaggggaggtacggcggtcaacctgaggatcagaagaaatctagtcttagctcctgtttgcgcgaggatctatttggtctcaaactaaacgctccgttgttctaactcaccttgcgcttcttcgcggatggccggctgggtgatgagtccggagcctctgcgtcggaggtttcttgcagttgaatttccttgcggcgcgcgcggcggcggttcgtaagcggcattatgtatagacgttcactcttcctggtctctggtatgatataatagacaaccaaagccggagtattttttccctcccgttgcgtaggcaatcaagtccgagtcgaagtactccacaaacaagcgcggggcactagagaggaaatatgatgacaaggcagaggcgagaaaaggcaaaacacagtttaaataaaaacaaaagtcttccaaggttggaatcggatttcagcgcctccagaatcggaagaccgttcagaggtagaaccagagaacgaagaacgtcggagcatagatttgccaccacggaagaaagggaaaggaaaaaaggaaaaaaaaagaagcccagatagactgtaaacaagatcaagaggctggatatctttttttttacaaaaaactcccccaatcgaaaggttgatattgtgtggctggatgttattatcgataatccctaggccgatcgacacgcgcaatggcgtctgtttgggtgaccgccttgtcgcgtaacgtgtatgacacagcagaaaaggatagaaaggagaagggaatgaagggaatgaagagagagaatataggaaagacaagagaaggaaaacaaagtgtacaagtaagaaaagaaaccgaagtgcgattggggatgtgaccgtaaacagagtggtggagtttgtggtaataacggtgtatggatacagggaaagctgccggaaaggctgagatagaactgaaataccaataccagcacgtgctcagcgtgggattgggatgcttccgagtgcagaaagtggaacttcttcatatccagatgcagagatgttctatgttgatgttctatgatgcctacataaggatgcagttggtgtagatatcctgtttctttgtctttattgttcttactatgcacatatccatgtctaacacctgtcttaacagctaatttagatttccctccctcatacatacacgaattctcagatcaataaaaatgagatctgcccgtttgcgtcatcccccggatctggcttagcttggaatgttgatttgcctctttgggtttgacatgtcgatctaaggtcacatcgctttggatcttctcaccttgaaagggtctacaggaaagagtcaagacgcaagcaacactttacgtaaataaacactttaaacagttcaaagggtttcatggagcgctacctaatattcatacaaacaggaacgacgcacgatgaaagcaccggaagagtatcagaaagaaagcggaaaatttctccgtaagaaaaaattaaagccttcaaagaacaaagaagaccaggtagaaagggggtgtagagcggaaggcaataaacaaatgtcgtcacggcgtgaaacaagctacggccaataaaggcagaaagagcggaaagatttactgaggcatcttggcgtccccatcctcgtcctcatccacaccacgtaacatgggatagaagactctctcagctgcagagttggcgtgctcttcctggggcttatcagaagcggcacgtgcactggcagtctcaactccctccatggcatcgagtccgggcggagaagccgaagagttctgcgctccatattccgcagtaaggctaccggcctcaagcaattcagaaaccaagcgacggaggttctcaagcaggcggaccttttcgacccaggcaacgttgacatcgcgctcggcgacttcagtggccgcttgcgcagtacgtttgacatcctcctggtcgggatcagacgaggtacccgacagagcggggtcaatcaagctctccgagatgtgaatggccttgggagtgcgctcgccgtcatccttgacatcatgggagatatccatgcggtcctcggtggcagcacggtcggccggcctggcgcgttgcaaggtaccaccagtgtagcggcggcggtcgtcgtggtcatacgcgccgctcagggtagaaggcggtgcggcacctgaggcggtcgggtaaccggcggccatgctgtcggcgacggtggccgacggcaagcgggggtacatacccgggccgctctcgtgagggggggacacgcggtgagcatggtgcatggagataggagagcggttggaggtgtatgactgtgcgctggaaggcggggtcaaagctggggtgccgaccgatggggagtgggccgaagcagccatgggggctgagctagttgcagtaacgtggcttggcgggagctgggtcgggggggagtgagtggcgcgatagttcatgccaccatgcacgtaatgcgcgccgggctgggcaatgccggcagccgccacattctcatcgctttcgtagatggtattctgcatttgttcgaggaattgatcgatgttgattaaatcgttcttagtccgaacattggacatggggggaaggtggtagcccggagcctgggaaccaccagggctgtaaccaccaccgccgccgaccgcaacagacgcaggcatttgctgatattcaggcacgggaccattgaggaagggaagctgaagggcctgcagacccaacagacgctggccgaccgcggcataggaattagggtcgaactggcggcgcttcaagtcgccaaaaaactcgttcaacgcatcgtatccacgcttacgatcataggggtggcctccctcttgtccttggctcagggcatagtacacattgccgtaggaatgcgggttgggggcctgaggtggggggtgtggctggtagtactgtgggggcggtgcgtgcgaatactgcccattgatgccgttgatagggctctcgaagtaatgtgtggcagcagcataacccttagggttctgagggaacatcatatccggatgcttcatgcccggttccggagagcggatctccgagtcgtcggcatgggtcttgacatgcttcttcagatcctgaggtcgcttgaaagccttaccacagaagtcacacttgtgaggcttgagcggcacgtgaacacggatgtgggacgtgatatgatcacgcttgactgtggtcgtgttgcaagtaccccactgacaggtcaggttgagattgttggtgcttttacgtccaacatgtcgctcacaaacatgctcctatccgttattagcatctttttttttctggaattgattgatcccacttacatagagagactcagcattgggtgacttctcagtgcatccgacccactggcacggcagctgctcactggcggccgcagcagcggcggcgacggtcgctgagaccgaggcggaaggaggtgaagtggcctgtatggccgcctggatggccgccggctcagtcaccggcgccggcacggctgcttgggtagaaggagaatggttctccgtcatgatgccaagaaattggattagttggcggaaatcctagaaagcaaatgagaagagaaaacagaaaaaggatccagcgactacgaggagaaagacccgatatgtatacaagaggaaagagaaaaggagagaaaacggggactccgcagaagaggaaaaggagccgagcctttgcccagaaaataccgcgttgctaagcctagcggaaagacaaggagagaaatgcgaagaccaagaccgggccaagagcctgtgcgggcctccagaaccgaggggcgttggcgccatggcttttgactggtggaccgagggggggacgaggggctgtgggtgagcattccagggctaacacgtaccaccgtagggtacagtacgggggggatggtacgtggggtacagtacggtatgtattttaataagatttgatctctggccgtctatcactggcctgtcctgtctagtaagcgaggctaaatcagttagtgcacttgctgcggagtactgaaattaaccagtgcacggcaatgttgcatagaaacatcacgttgccgagaaagaaacagagttgccggttcatattgccaagccaacgtccaagaatcatcctaataggcagtgcttcttggcagccaagtgattcctcttgccaataattcccgctccggagcaccaagactcaggtcttggactcttggagtcttggtatgaccatatccctttcgtattaactttgtctctggtgtgacgagtctgattaatctggctgcctggtgcccttgttacggccggcatgcatgagtcggtcggtttcggatttagatcaccacatctgaaggtattgccatgtaaccatatgttctggcttctatattgtctatttcctatatattctatacttctctagtctagttttctattctattctatccgtaacattggacctgacatgtcagaccccaactatacaactcaccaggatcaatcatcccgaggtcttcacaagggcctagcccaagcattccaatcctccttggagcatggcttggccattggcttggccagccgaacccgaggcaaccacgtggacgtctgagctccgcacaagtaccacaagtgccaccttactttcccgagcggtacctccgctttggctgataccaactccaaacgttcaacccaaccttcgtcccctttgtcacagggaacgcagcgtgccaagtctcagggtaccctgttccatccgaccgaaggttctcccaaaacaccgcattacccttgataggcttgaatgtgatccccatgtcattccccttctcatcccgctgctcacactccaaaaactgacaccacttctccccagccggcatcctcaaccgcgggaaattcgtccccccaccttcacagtccgcgtcgatatacaccataaacgtgctgaagcggtcccccccgcgcgccaacgacccggcccagtcatagtggtgacggtagtgcccggaggcattgtagcgctgcgcccacatgcgctcgatgtataaatccgggtgccagccctggaagcggcgggcgcggtcttccaggcagcggactgtgtcgtcgcggtcgaggagggcacggtcggagaggcgtttggtcgggtctacctgttctgttttgccgtcgtagacaattgaaggggtgtatttgttcacactgggattcaggggagggttacccggttagcttggttatattgtgtgttttgtgtgggtatccgtgttctcggggatttggttgcggttgagattggtgagttacctcatgtccaggatatggtttgcttcggtttcggagatgaagttctcgatgtatatgatcagcggttcgcgtgaaaggagatgcacgcggtactcctcggcgctggcgcagcggaatggcacgccatcttcggggctgatgaagctgtcgtcggtcaggttgatgcccggtcctggtgcgctggactcatcgaagagctcgtcgctgtcgctgggtggtgccactaggctcgggaagaatccgcgcactaccgggtccaggatgaagatatacaaggggacgaagtagagggcccaggtcaagacggtggaaagctttggaagtgaccccattgggttggctataaatagtcccggcaatatgtatgttgtaagccaagtaaatgtacaggaggtttggactgttagctctccatgcgaccggggtggagggttgcatatgccaattgatctgtctttgtacaaagatgaaggcccaagggcaatggaagaagaatatgatcaagaaagagtgttgtattgcaaggccatcttgcgaaggaaagggtttggacgttgaggtggaaatgtcgaagtatgtgggtctaggctaggctctagcccgaagttaacgatgagcaggcttcattggaaaaatagctacatatgtaggtatacggggttagggcgatcaggagtgaagtctggtgtcaggtagcctattccgtaggctgatttaggaaaagagctgtacggagtatatctggatatgtggccaagagattgagcctacaactgtcgaaatgcttatctggttcgtcattacccagataggcctagtcaaatgtgatattctatatcgccggaaatcgctacatagtccttcagagctgccgaaaaaagagtgaccaaatccgctatgtgtggagaatgtatccattagatccattatgacatacgtaggccatcatagctagttatctcagatagttttaggccacatacaccagatatgacgtcccgacgataccctcgccaacaatatacaacaggctcacgacactagaagttaaatattgcatactctcttctattgcctaaaatgatagtattttcccgattaagcgaagatctacatgattttagagtccagatctccagggaccaaggatccgagcaggggtaagtggcaaatgcatccaaagaccgaagagggccaagtcaaagtgcatggtagttctgaataccactgcaaattgaggccaattggacagcacttgagcattagcaagacctcgggaagaggatgtctagtgtctagtaaacacagacccagagatggtaggtatgtatataaacgggcaaggtggcaagaactagggatagaagttaggggaagtctcagactctgattgcctatcatattcctacctagtaaatttagtatacggttaccaatagaatgtctaataaatataaggcccagatatctcggccaaaaggagaaagtaaaacattccattcctccgtaaatattcaatcttcatcatgcattagaacttccgaccttcttggcttcggagtcattgatgattgaacaattcatgttcgagttacctatgtacttaactgtaactacgaaatacactgtcgatagaatcaaacagggctagctaccaggtataagacaccgcaatggagcccaacgagtcttatggcgcgctcgactatcgccgtcagggtcggagtcattgcagcacctggatctcaaaagcaaggtaatactagcagacatccatggccaaggccgtaaaatgtgaccgctcgaatttccctcagtcttggcccggacctatctaacagcgaggtcggcaattatcgccggcgacgggttgaatccccacatattgcccctgagaagtagaagttagcgtcgtgattttctgtcgatgaataaggagtagaatgtttgctcgggtgagccttactggttctacgctggtcccgaactgagctgctcagcgtagagggatggagcgtgattgaaacattgggataactttccatgcggatttcagggtctcaaaagacatgttgacacgaagtcagctttacaacacgtgcagcctgtaggctcgcaagtattgaaaggggaaaactgagatttgagggctggttggggaaggaacgtcgtcggataagggttgatccagtacttgatgcaactataccaaagcacatagaatgttcacttatctcgctcttactcccattgaatcaataatggaccaaacaagacacatcagggggtatagaaatccggtatacatttataattgcaaaagaaaagcgagactcctaaccccaaccaaatatcaacagttgttacaccaagattttgggcatcataatagcatatcctcgtaaaaggcacagcaaacgaatatggcaaaccagaccaaggttaaatgctgttagcattcatccactgagcccaatcctcagcagacgccccgctgcccggccgataggcagcattattgccaaacagatcatcaaaggttatccctagatccatattcatgcctatattctcatcgatgcccatgctgaaaggaggcaatccatttggagcgggcatctcttgctgttggggtgcggtttcaggtgccatgtcagttgcgatgttggcctggaaattgtagccctgccagacgaaattctggttcgggattgagaccaggtctgaactgctgctcgcatctgtcggagtctggctctgcgatattggggagtggacgcgggacgaagttcgggagtgggaggggcggaggtggcttggcactgatgacttcatccctgcggaatttgtgatggggtagttcggtatgtttttaaagtcaaaggtgggagtgccccctgcgctggagggatccactggtgtggtgggccccatgcctggggctgaatcgaaggaatactgtgacggcatacctgcagggtcgtgccggaagtgagcatcttccaaggtggacatgggctgtgttggatacgcgaatggatcgtccgatgggaacatcattggcatgagatctgggaggttggatggattggtgaattgctgagcccatgctagacttgatggctcttgattgggcatggaggaggtcatgctggaggaagaaatatgttccggggttgtcatggtttctgttagtaggtcaggcgtggttgaaatccatgtggactggtgatgaatatcagccgcagggcgattggtcacaggctggacattgtccacacttcgttgccggcgattctgatcatcggcgacagccggctgtgacatcatttgcactggaaaagtgcttgaccgaactggcagcgtcttctcgaaggatggcttcggctgaggttcggcattgttcggctcaggctcggcggtgttggatggggcggggcgcttgagattgacaggggtctttgagctctggcgatttttcaacatctcgggcaatgttttgaacaggcactgcattgtaattagtcaaggacattccaaattagatagaagaacttacgtttaagctctgagagcaccggtcggcagcaagactcttcttggccaatccggctagagtatttttgccctccatggcatctttcaggacgccatctttggctgtgggcgaatccgggttctcaagcacgaagaagatcaaagagaggatagcgaaataggtcgtatacatggtaaaccagaaggatccattgagcagtcctctcttttgcattccggtcgtgatgtgaacaatatttcgggaaacgctgacgcaggctgccgcgcaggcatatgatcgcttgtctacgccacgcgcttgcgaaccgccggtgacgtagtggaggaatgggcggtacatgaccatctggacgtgggcgtagcttatacgcagcaattgccggacactagttatgttagctaaattagttccgagcaccactgtagactggacttaccgttctagctggggcgacacttctgtgcccggtcgcagagcagggggtaattcctccatccaattttgcagatctcgttcgatctcccggattttggagtggctgaccatgtatcgctggtctgacttcgagcgatagcgagcattcttgactgggtagatatatttcaccacctttaagatgatgttggaaagacgagtgtgtgcattgcatccagccatcaacggtgtatagttagacgggggttgagtaattccttcggaagtgatgaaatcaccatcaacttccattgggtactcttgatcgatatcgtcgtcactcaggatctggggaagacccaataatgtgctcacgtagatgtccatcttccgaacgacccagaagatgcgctttcgaagctctcgttcgaggggattgaagtctgccgcaacagagcgatggagacctaatcgcagtgctgaacgaagtgcaattcccacatatgaatagcatgtgctcagcttcgcggatgattggaggaagagaaccataaagcagattgcttgtagagaaaccaagtcacggcagtcagtgatctccagtagttgtcgaccggccttgaagaattggaacctgtcaaagaaattaggcggtgccaaaatcaatacagattaaccatgacttacccttggcctattgcgccttcgtagccagccaaatccaaggtaccctgtcctgattcatcgtccgagaacaagcagccaacggcaatggcaatatataaaagcggcaagaaggagtgatcttggtttgtgaattgttccgggggagtatcgtaaatgcgctccagacttgcaaaaaaagagggtatatgcacaaatttcatcaaggagcaggcatgatcgatcgcattgtggcacaaacggcgcgcagccgcccgcggcggcaggtcatgtgtgggaggtaatgttgaatcttgaggcgactcggacacagacttcggactatccatcatatgcgcacttatcgaggggcgcgatcgagccataggcgctgtaatatccgcggcgcccagctgtttgcgcaaccggcgaacaaagagaacgcccgaggtgtgaccgtgataatcccaatggccttggtcatctcgatctaagcagcccgaattatcgaccatggtttcgagtagtccctcgtctgcgccttcttgcgccgggtcaagtgcgcctgacggtctgacatcttccgtcgcttttgatttttgcgcggctgtgaatttctgttctgtcgcatgcaggtctagttgtggatcatcgaggtcgacatttggaagaacgattcggagtagcgcttcggctttttgaaggcgattttccagggcctcgacatattgcggggcgggattccgacgacggttggaaggctggtcatatgagcaatctagaaagatttgttagggcaaatggaaaaatttcgagatataaacatatggggcgcataccataactataaacagtgcaatgagtacacggctgtttgccatcgcacttgattttcttcctacgacactcgtcgcatgcgcggccaacgcgccgtctcttctgcgccggcagtgatttggagtccatgatggtggcatcaggggtaggagtatcgtggtgatcgtcatcatgcgaatacttcaagtcggtcatgggcgcgggatcctcctcattctcgccagaaagagggctcgtcgtagtcgccatgactggatatctgaggtgcgtagaatgcacggagtcatgtaaagatgaatatggatcttggcgggcaattcaaagtgaatactatcactatatgaccaaatatcactagggcatggacggccctatattgacagttgtaagataagtagagtcacgaacgaagactgaaaattcctatgccaagtccgacaatgtcgatcgaagtctcggtggtgaaaaaaaaaagttcgctagaatttggagtagttgaagggtctgagggggactagggtcttgagggggggaaatggagatcgacgatgatgaaatgattattcccgagggcggtgtgaggaaagattatatatcccaagagtccaggatatcccaatgtatatatcttggagaaaaagaacggccaagttcccgaggtcaaaattcaagcgagttgacactatagtttagtcattcagagtcgcacgccttatgactggttggtggatatcggcggttcatatgggcgacaccgatcaaataaagttccgccgtcattttccttttttccagaattttcgctcttttccctttaatttgaggcattttcggccttttcaatgtataacaggccgaatctcccaggtcttagcccggctccactgccccattcgtctagcccccggtcaattcgccgacttccatgtatgtgttgtatatgggattgcaaagcgaacggcagcgtttgaattattaataggcgtgctggggctagttcactcatgactacctcgtatcagcctcagatgagcctgtttgagtaagatattaccggttctggcatatatcatccatcgacggagtatcccggcacagaaaagggtgatcgtctgggaactaataatacttccaaggttcctcatttctatttgtgtgattcgactatcgcgacaatagtacggagccctccgtttctattcttgttccctgcgtaacaggaattgccgttgcaaggtacaaagtacacgcctggacccttgaacgcccttgcgctgccatcacgaagggatctgccatgcaaaggggtccgttgaaacaaggcaatatgcggcaaatagcttcgacagtcctggaacgcgaaacagggggaatgcgaacctcgaaatgacctataaacgacaatctattttgaggcctccgaagttcgggtttccgataagcctcatcatagtgctccacacggagtatataacattgttcgccaagtcacctgcgtcataatcgttcagaattatcaattagcctattattaactatccacttccttttagccatcgatcctggcgatccctcgcatcgggcatggcattccatttgaaattagcccctgtggcacgtcccactttccccaaggtggatcggcatgtataacaacgccaacgcgactttctcgcgacgttcgctgcctcggccttatatggctcgtctcgtcctatgccgatttccacaggctatgggacaacgcgatacatactatgactttctacctcgtcaccttctgctgcgccttcgccgcgctgggatcattcctgttcggctatgattcgggcgtgatctcttctagtatcgagcaggaggcctttctgcgccggttcgggtctcctgctttgtctgatgccgtcgccgggggcattatttcctcgtataccggtgagacttcatcttcgttgcatcttgccgcgacccggatctaatcttagtgatcaggaggcgcaatcgtgggctcgatgctcgcgtcatatgtctcggactactatggccgccgaatggtcctctttatcggtggtctgcttgccactctgggtgctggcctccagggaggcgcagttagtatcgccatgcttatcgccggtcgatgcatcgcgggtctggcaattgggcagatgtctgccattatccccgtttattgtgtaggttgatacacggcccagctgctaagcctcgtctgacgtgagcacagagcgaggttgccccgccacagattcggggaatgctggctagtatgcaacaatggatgcttggcttaggtttcctggttgctgtgagtaatcgccgggattttgctacctagatacgatccagctgacagggtttcaagcgatgggtgggatacgggtgtactctccgaggtggagccttctcctggcgttttccactctcctttccagtcataccagcaataattctcatctgtggcatctggttccttcccgaatcgccaagatggctcatcgaaaagggtagagagggggaaggtcgctcagtcctcgcccgactccacctcaaccgaaacgcaaccaacaaccagctactcgaacacgagctcttccaaatccaagagagcctagcatccgagaagcacttcgccgtaaggtcctggcgccaccttctcctctccccacggtggcaatgccgaatcctcctagcctgcggcttgcaagtattcacccagtgctcaggcacaaacgtaatctcaaactacagcccgcgcctcttccaaacgctcggcctcacaaaatcaacatccctaatggtaatcggactctggagcgcgctggcgcagctctggaacacgctcttcatgctattcgtcgacaaagtcgggcgccggaaaatgctcatcccatcccttttcggcatgggcgcagccctatgcatcgaagccacactcgcgctgtacatcgatttcaacgaccccaacgccaacccacatgccctgcgcgctgccatcgccatgttcttcgtcttctcgttcttcttcacggctctaggcatgatctcctggatctaccagtccgaggtcttccccacgcctatccgtgcgcgcggctcgtcgatggcgaccgctgcgaactggagtgttagtcttgtcttcgcgcggtgctcgcctatcgcactgacgaatatcgggtctaattatttctactgctttgtcgcgtttaattgggcggcgatggtacttgtttgggccttttatccggagactgcgggttgttctcttgaggaggtcgaggatgttttcacggcaaagtttgttgaggagcagtcggagcgctcttttgttgacgagaagacgccggtggctattacgccgcgctcgcagattcggcgccaaggactgcatccgctgtcgatgaatcctacttatgagcatcctacttatgacactgctagtatcggtagcagtcacagtgggtctgggaatgatattgaaactaaggcggtttagattgtacgatgtaagatttatgatatgaattgatgaaatgaagtattcacgaagagaacatcttgtgttttcgatgtgatttccttggaaaataaaatcgcgctactccgtctacttcgcaataagattagaaaaggaagatttcaaggttccaccaaattgcctctttgggaataccaagacctacgtccgaaataggcaactagatccaccagcattttcagcagcttgaatgcattattgatagcaaaaattgtctcaattaagaccaaaatgactatcacaatggataaagtcaatcaccaactaggtgtagtgtttcgtctgtgagggctttgctttgatgagtttgggacttcggttcgagtgtggggtggatttggtgctgacgatcgatgcgtgtagggtcaagtcgaatgattgcactcttttgcccagaacttggatgtgctggactttgatggggggattgaggctatggatctggggtttaatggggtaggtataggatggaagatagaatagcatagggctatcggctgctttggttccatagatccgaatgttgacgcgtcagcttatgagaagagcatatgggttcaagttgcatgggcaaagcgcgtgtggaaattcagtattcaatagtctatacagtataccacttctacctctatgtggccgtctattttttgtgagtcaaatcagaccgtctaaatcacaactagcgagcagcaaatactttaacagcaagttatacaaaccccaataaaacatgtggtaaatggccaatattgcttaaataggctcgtcacgaggctcaacaaggatctcgttgacggagacatgctcaggttgcgtcagggcgtaaacaatggagttggcaacatccgaaggatcgaggatcttggctccggatggctctccgaatttcttgacggcttcagcgtccgtcgacatgcccagtaggtcagtggaggtgttgccgggctggatactcgtcacgcgcaagccagcgcctgcagtctcgaggcggagggcttggagggtggcctcgacgaagaacttgctagccgagtacacacctagaccagggaagacctttcgtccggcatcggaggagatggcgacaatatggccgcggccgcgcgagagcatgctaggcactgttgacgaaagagcgtgcaaaaggcccttgcagttgacgtcgactgtgcgctcccactcgtccgtctgcgtgtttgccatcatggtgaagtacatgacaccagcgcatgcaaccaagatatccactggtccgagctcctcacttgctgcttggacgagagcttccacctgagacttgcttgtgacgtcggttgatcgaaggatacacttcacgccgtggacttcgaccttgcgcttggtgctctcaagagcatccaggcgtcgagcgccaagtgctacagcacaaccctgcttggctagggctgctgctaccgccgcaccgatgcctgaagaagcaccagtcaccacggcgacttgaccgctgagtggccccttcactgaaaccccgttgggtcggttgagggcattctgacgagatgggggccggggtagccatcctcgagcaaaccagtgccgagtgtaggtctccagcaacaggctgtccaccttgggacgctcgataacggcccggaaaggcctggtcaaagcgttatcaaggaccacgatatctcggaggaactcgacagtcggcatgccactgcgaagaatatcgacggtaaacgaaccatcaccacccttggccgagcctctcttctcgaaccataaggccacccattgatcccatgggagaggtttcgtctcataaccaagctctttaaggtcctcaaagaccgaccgagtatcgaccggcgtagggtctccgagatggaacactgtttggtctgcctgggtcagagtggcaaggtgcacaatggatttgctgacaaagttcacaggggtcatctcggcacgccatccgtccacctctggggcgtatccaagctggatggattccacaatcaatgcagtgagcaaatcccacgcattagcggagcctgtgacactgtgaccactgatggtaccgcaccggtgaattttgactggcaatccacgctcaccagccttgagaacgagctgctctgcaacccactttgtctggccatagccatcgagtagctttttggggacatcttctatatctagtatagtagtctcgggccagcctttctcgccagatgggggcaagacaccattggtagagatatactgcacggtcgcgccacccttagcggcgagacgcagaatctctctggttccaccaacgttcgctccccgaagtgcagcgtaggggtaaacaaggttgacagtggctgcagcatgaacaattacttggacacgagccgcgatgttgtcaaattcctccggactcaggcccagtcgaggccgggaaaggtttcctggtaagatttcgagacgctccaggatagaatcgcgccagagtcccatatctaggaggttcctgcggattcgggccacacctccggcttgatcatcctgctcggggtcgctgaaacgcacaagacagatgattttagcagaggtgttctcaatcagatcattgagcaagaaagcgcccaggaaaccagtcacaccagtcagaagcaccgtctcagccgagctgattgaagtgaacgcagtattcgtgggcttaatgtcctcgtccagtgtggaatcggaaagcaagacagcgggcagatttgcttgcacttcttcagtgtggccatctctgacagcacgcacagtctccaagtggccggaaagagtagtgttctccgcaagacgaggaataggaacacggaagccgaaacgtctggaaagcttggatgacagatcagccagagacaaggaatgtccacccagatcaaagaaattatcttcggccttaatcaggctctttgagactttcagaacagcctcccagattgccgcaatgtcatggagaccgatcgggtcttttcctgtgcttttctcgctgccattgggactagagctacgaggcgaagggagatttttcatatcaaccttgccagagacctcgttagtaggcaactggtctagtgcaacccagagagctgggatcatgtattgggcaagacggttctcgaggacacgacgcgagctgggggagtggccggactcgttgatcacgaccgaagggcgatcggaggaagcctccttatcggcaacaacatatgcgaccagttgtcgttccagtccatcgccgtacgcagtgacaacgcactgactaacagccaagtattggcagatgtcactttcgacctttgccggcacaaccgaatatccgcgcagcttgatcattgcgccgacgcggccggtgatctcgaggaatccggaaggcagcttgcgggctagatcgcccgttctgtacatacgagcaccgggtgtggaatcaaaggtgtctggaaggaaagcctttgcagtggtctcgggaaggttaatgtactcgcgggccaacaaaggacctccaatgaagagttctcccgatgtgcccgtctccacctcctgtccatcctcgtttagaacgtaggtgtgtgcaggaacaatcgatgggccgactgggcagtaaatggagtcgccatcaaccatctcacggatatctccgcaggcaatctcatgcgtttcacacgcactgtagcagttaagcaagcgggcattaggaataattttgatggccttgcgggcaagatcggttgtcaccacctcaccgttcagccagatgatgcgtaaatcaggcacacgagtaccgaaccggggatagcgtgaaagaacggtagccaggagtgtgggtgtcatgagggtttcagtgaccttcttagccgagagcaggtcaaccagagctgcggggtcatagctcgtttcatcgggcacgataaccacggtagctccgcgcagtagcggccgcagcatctcccagatgaagaagacattgcaggccactcgatcgcccggttgtacgtcctgcactgcaaatctcaaatcgtatgatagtaccggggcgcggtgtggattggcgattcctttcggcttgcctgttgtgcctgacgaataggacacaaacgccaaacggtccaaatcgtcatctgcgggcaacggagaaggttccttggcgtgtccattgatctcggcaatgggtccatccaaggcaattacggggacgggcgccttgattttgtcggtctcagatttgtgggtgataatcacggcggggctagcgtcctcgataacatccgccaagaggtccgcggggtaagccaattcgagaacaaggaacgcaccacccgcacggagcgctgccagacaggcaatcacgtaatgtgcgctgcgaggtaggagcacacccacgagggtgtcccggctcactccataggtccgtaagcgactggcaagagcctcaacctcttcatccagctgggtatatgtatatgtcgtggtctcgtcttccagagcgatggcatctggggttgcctgtacctgtcgcttaaatagtgtgggcaaatccttagtgatatcgaggatggccattgtttcggaaaaggggtatacaggacaaaataaggaactaaaaaagatatgattgtaaagttgtggtcatagggaatgtcgatgtacgtcgatggtaaagagaagaacgaggaaagacgaaattttgttgagattccaagagcttcgagcaatggaacctattaaccttccagggccgtattcgcgtggggttctccgggaacgggcttcttatcgtgactccgataccgtctacttccatgtcaaccatttaggtcttcttctaattagaatattgaatatcccgttaattctgctatagtcctctttctacattcctcttcatgtaagttatatgatgtcaagcctcaacaaatatgaagaaatcacatgtgacttccaaggttggccccacttaagccatttgcatgtgaaagggcgcttttcccaacactttggttggaggcgtaataaccttggaaccttggaaccttcgaaggcgccatgggcaattggaagaatcttttttatttttagcgttggcccaaggaaattaagaaaccgccgactaaataggcgtgaacatctacagattcaggcatcaaacgcacagaccacttcaagcagatctgtactaatgcagacccttgtcaaagtatcagtctcatcttcaggcgcaaaggaaaaagctcaattgccgctgtccgatacttgaagagctctcgacaaaatacattaacagaaccgttgacttacagatatctcaatagccaaaaaaagttcacattcattgtcgctaaaaagattaaaccacgtatccacctgggcacgtgcccacttgcctacctaggaatagtggcacggccgaatggagcttcccgagattcatctggaaccaatcctgcgatattcatacataagtcatgttcatccatagatgtctagctgttgcaaaataaaacgttgcactattaatgcgtattctgatgctacgtcatctatgcagcaattgatcttgtccacggtttccattggcttgcgcatctcacgcagaatgggtgatggggtgcatgctatacttcgagggataccatggggcgaatagtgctcacgaccatcatttatgattaacacatatcctttagccctgtcacttcacaatcatctaattccatcgatagttcacggtatattataagggatagcaagggtatatacaagacaagaaaccgtgaaagagtgatacaagagggtagaaaacataaacataaacataaacatgaaaacataaaaaaaacacaagtcatctggtccaggccagtgctatacattactcaatgaatgagtgcatcgaggatcccacgacgaagacccgcgtcccagagtcgataagtacccagagaagtccgagagctcctctactgaggcagcaggagcaaagccggcggcactggtgggccgtcactgcgttcaagcagggcttggagaatggcgtcaaatgcagccattcatctcgacttcgctgtcatccacggatttctcgagcgagcaagattgctacacgcgctagggtattgcagtactcttactaatcccacatcgcggtagttgttgagtgtcattaacgctgtgaaatgggcgaccgtttgtgtttggtcatctaatgtgttgcatcgggcgcttggggtgccgcgaggatttgatggaggatggatgtttcttggactgccctgtgtcggatcatgtccaatgattgggggttgtcacatcaatatacggcaagctgctcacaggatcggagaaagtcgaataattcttcatactggatctcatccgctgggatcgcttctgagtaaggtgggaatgttggttgaggttcggggctgacttctgagaagcccgaggaggtggaatatagcggagatagcattgagcgggggcttagagtgggctggggtgctggtggtaaagtctcagatgaggctggcgcatgttggtcataatcatagaagaaggtctcatctcccggcaagatatagttctgccagttggtcatctcgcgtgcgtctcgcatgtgcacctggcttatttccttatggcctagtcggggatcagaatcctccaaggctgcggtattcagacaggaaatgattgcatcatcggagatttcgtgagggttgtcggagcggtgctcctggagcacggagacagcaggatcgctatgaacaaggggattttgggtttcgtcttcatcacgaagaattagctgcatatactagaaagggtaatttggaatgcaacagtacctttgattatcccagacacaaaagtcggtgtataacagtcgttggccatgggtgactggtaatgggtttcataggaggaggctggcatatcgtccacataggagtcaaatattccgtgtgcacctcgctccaactctataggaagagtattgaatgtgtcgaattgcgcatcgctgatcatagtagttggcgatggcacgaactgatatgggagcatggagggtggtggccatgagaaattgttgagatgtagatcatagctcggacaactttgtggatttacatcaataaagtcgtctagtagaagaggaacatcgtgagattggacagaagatgaccgtggaggaaaccgaggcatatcattagattcaatcaacggaggatccgatgagatagaatccaaaacaaacatatcgcagttagcctcaccattgagatcttctctgcgtgtagcttgctggatcctggttgatctcctcactcggggttcgatgttcttgttgtcaccgtctgaattcgctttcttctctgaccttcgttgtgcaccccgagtcttcctgcgctccccacgttttgcttgtggtgcctcttcttcactttcactttggcgagtgccgcctttcttctggcgcatatattcttgcataacgtgacgcttcacttgggttaagttggttcgcctattcttcgaagagtcgatgaattgccaccgcccattgctggcagccttatcaagaaaggttgacatctttctggcagaagaaacgtatatgagccgtgcgtctccttgtggggcaagggagggatagcatggagaggtttgaggatataatcgctggggcgagtctaatgtccgcccttaaaagaaagagatccaagaatagaacaccgaaggaagaatggggcaactctgcaaatattgatctaacgtaaaaagaaatatacaaacgcacgatcaggataactagatacagagcattaatcgggatatgcttctccactcatcgtctttagactagactagaacggtcttccagcacattggccaacaagtgtggagatcagcattacagcgggccagggcgcaaatagccgtgtatgagctatgcacctcttggtagcttgggggtcaaagtactagaattgggaccccaactggggcgtcagggtcgataagatcccctgaaaaagctgtgacaaaaccaactttccatgttgtctcctccatattaggcaaagcttgatctaccaggtccatatttcacagcaagtaaactggctccactacccccatatgtcgaatcatcaattctgtgtgtccgggtgtctacccggcattctacccgatctgcagtctaattcccgtaagttgcctgtgagttacagattgaaggtgatcatatagttccctcgcttagagcataatcacagctgtttcgtaccttgcaatattttgtaattgtatcttgcacggcgtgatgtgtcagaacctttcttcggcggaagcattgcatgacgtttctagctgtttctaattcgttgcggtagaacctgcagagttatgcacatgaatggatatagaggacctcgttggccacgaaattaaattgcttttgtggggttaaatgggagatctctgcagaaggaaagttcggaaacttttacaatctcaacggtatctgaacctgctgatcatctcgtctatattgcattatcgaattggctatggatactagatttgccgttgcggtgatacaaagcaatcataagatcgtagaatacccatataatgactctttgtagagatacaacaagcccttctgttgactctaccccagtggagtatataaaagttggattgacgtagtacgccacaaaccacaggttctacagaatagaatgctctaaatatcgttgcagaccgaacctttgagatttaaactatgagactatccgagctctccgcccccacgttttacgcttgcgacatgccctcttgggtatccttttagtcgatcaccgaccaccggaaccaattgctatattccgaatatccgttctccaaaaaaacaattaagatacgccaatcccatgccatgggcggtaataatctataaaacactgatgggttatcaggactggttgcatatgtgggggacatcctctaggctgttagtatgctccagagtgcgcgcagtggcttcaaaaatactgtactggtcaagacagactctacctaggcgaacttgcttgagccaccattcggtgagagtttcagcgtgagataaaacttggccggcgttctccccgggaatgccttttaccggcaatgaaaggcaatagaaccctaagctatgcaaggcacaatcaccaatgatgacattcccaatctggatcctgcatagtacaaggttcagaatctcctcgtcgctttgtccaccacacgacatactctcgggcaaatgcgctgtaacccagcaataatctggcatgtcgtcgtggggatctgcgattcggcccctgtcattcatgaacacactggcttgaagtttacaatcggacgtcatcctgtaaaatagtagaaaagtccttcttgattggctgattggtggtaaaaaaatagctccctgtggattatgagagaaacgtgagggaaccacggccttctatacgttggcaaccgagacaatctacagtggcctttgccagtctttgacaaagctccataacaatgaggtctttcatagccttatagatcaagtctatatatgctcgatttccacggatttgtcgacaaaggccttgcttgttctttgttatcttatgacagatgagtatggcatggttatttaaggatctacccgctttcatttcatactcatccttcaggtttcattaatccgtatccacagggacaataatactatgatactactagtctagatcgtacatcggtcgttccgtagatttctctactttgttgccactaaagtcccacaatgtgtatccacaggttcgataatgcccagaagaaagcaaattaaggtgtgtggaaattagagtgcacattgcatagggcggaatgtgattatcttccggtcttggagtacttttcaggtacaagtaagattaacccccgctgatcgtcgaggaccactatattgtagttcgatctgaccataaagcaaggaaagccaaccccatcggtctcagacttagataatctaacggtttcgaaataggaaagagcaaacaagttacgtggcattgtataagaatcgacgcatatactccttttggtcatgatcgccttggtgcacctggacaaattcccgttgagagggcttgattgttcgctttgtcaaatactacttctatttgactaccgcacgtctctactttttatacgcatgagcatctacatgactagacccttggatagttacccctctctgcccgaaatatcagtcaccatcttcccaaccgggtgcgaccatagattctgccataatttctctcaaacctcctgacatgttgacgagcattgtaaatcgcggtttcgcttttttctcgattctgcaatgtcatctgtatcgtctcgttctctttaaaatacctctgctcttgaagattcgtcctaggtaatgttcagtgctatagaggaccgttaatgggaaacaacctctaggtatagcggacgagacacaggcaacgtcagtcatggaagaccctggtgccataaatatcgataacctggtccggtaaaagggcgtctcagaggacccatttggactgttatttgccgaagcaagcgatggaaatctacagaactacatcgaccagcatcatactagcattaatatatctctacgacttaaatggtacacacaagccgcggaggcgatccaattcatttatcagaaaggtgtgatacactctgatcttcggcctgagaattttttgctgcacactgttgccggaaacgagctcgatcttctactctgtgactttggggggtcaacaaatggagatatagatggtcggcatctccccgatgccagatttttcaatccttgccttccgccggaatcgacgataagcacggatatcttcagcctagggtccatctactatacgataatgactggccattggccctacaggtctccaggtccattcgagtctctagaggagatggagaaataccaagaattggttgacgatctatttgcctctaaaaggtacccgccggttgacggactggcggctagacctgtgatacaaagatgctggacaggagaatactccgatttgagagctctcattgaagaccagagttggcagtttgagaatgatacaatttcaatgcacccataatacatgcggttctactgagccaagacaatgctatctgagctagcgcgtcataataaatgtcctttcaatgccctttcgagatgagcctacggcctccttatcgtaaacctctctgtcaacccaagctcgaattccgatgctggtcatggagctgattgactatgggttcgtgcagccagcctcctctgtctatttgaggccattgggctggaatgcatttgctgtagttgcccgattcatgtatagctggctatacatagtactattgaacatttctgggggcttgagcgctcttaggtaccctttcaaaacaattgccaattactacacctctcagaatccagctgcagctttctggtctatatctaaagacgaaggtgaccgccgatatcagatctcgcactcttccctatatcgttaccggaatatagaagtgccacaatgacattcataatcctttttttgaagagatctctgttgaggatactagtggcaatcaaagctccaaagagatttcaaccaaagatcttactcgtcctaggaagtatccgtggaggaacagaagtgaagtgggcgtctgtcgcgtgtctgggatctgctcaccgccttcgcgctcttcgcgcccagtccgcaactccgacaatgtccaatccagacatcaaggcgctggacattgaaccaagctggaatcgagaattctatatgcccaagagaatgtttcagattgtttagttctctcaatcaccacacaagcaccctcggcgaagacattggaccagacctcatctcttcgatcggcggtggtatcgcaacccttcaaccccgtgagaattcaacagtcaacgcaagaccaccaaaagcactttcccaattgtataagtgggatcgcacagaccggaaaaatcccgaaaattcatctgcaagactctacaccctcgatacaatccacataatgtgtccgctctcagtggaactcatatcggtttagttttgcccgcgcgatcttcgctcgcatatttgaacctcgcaggagtccacaagcttcatagctcacaattacgaacgggaattagtcgggagctatcatctcgaccctccgcctaacacagctatccgctccacttgtgaaagccatggcggagatggaggcggccgtcggcgcaaaccacatgaacggctccgcgaccaaaaagtccacaaccgacccctacgaaaccaaccccgatcgcattcccagcgatgacctgtttatctccctgagtgcgcaatacggccgctacacaccccgcgccgacgatttcacccctcgctttatgaactggtatcggtctgacccgaccgtgaactctttctgggagaaggtcgcgcagaaatactgtaccccagaatactcactaaatatttcaggttcgagggaggcattcgcggctgggagtataattatccgggttgaccgcgaactggccgacggagcggcggctgcgagatactcatctgctaatgcgaatgaactgttagccgcgcagaaggcagaggactcgctcagagagatcggagttgcagtcccagtggtatatttttgcgggacgattgaagggaggaatgtgacaatcgagtcgcgcattgctggtgtctcgctggaagttgcatggaggtatctcgacacggaacagatcgaagtcttcaaaaatcagtgtcgccagatcctccaacggctcgggacaatccattccccctcagacgaaccatcctatgtatgccgtgaactcaattcgcaaattcccccctctgtcgacactcgcgaacgagatatcctatttacagacaaaaccaaggaggaagaactatctttgacacataacaacctcattccaagcaatattattgtccaggatgatcgggtggtggggattgctggctggcgacaatgcggatattttggcactgtcagagccgagaaggtccatcgactcttcagggatcttgggcctgcgtctcaaaatggcgtcgacacctccgagaatggagtgacgtggtctgacctctatgataatgcctacgaccccagtaaaggcactccgctggtcgcaaaccaagatacaccccttccgtcagtcaaaaccgagccaacaagctctaccctcgacaaattcccagctagcaacgacttggacacaaattcactaggtctagatggcacgagcgactacgcgacgtccaaaacagtggcgaatctcaagcatgggctgacgtcgagggcgtcatcatccgaccggtcctccccagcaaattccgtcaaaccagcaaacaaaaagcccacgacaaacactagcaaaaagggaactgcgaagaagccagccgccaagaagcgcaaggtaaatgacccggacgcagacagccttgatgggcggcgttcgaacacacctgtttcccgggccagcaaaacacctgccaagaaacaaaattctgtctcgatcgcagggtcacccgctcccgaagagaagaaaaagccgcagaagaagaagaaaaaagggcccaaaccacctactgcccaggagaatgacgactccgacagcttcgatgaaaacgcgatcttctgtatttgccgccgacctgataaccatacgtggatgatcgggtgtgacggcgactgtgatgactggtaccatgggaaatgcgtcaatattgatcctcgagatgcggatttgattgagcggtatatctgtaaatgcccatgagcgacggatctattacattcaaaactgactttatacactaggcccaaagtgcgcaagcgaaggaaagggatgcacaacatggaaaccgatgtgccgtctgatcgagtgccggaaaccagcgcgcgctaaaacgaagcccccgagcaaatactgctgcgacgatcacggccgggaattcatgcgccaacagattcagcatcttaaaaaacgtaccggtcaggctaatggtctttttgaagatttgggtagtatgggtggcattcttacagctggggacttgaaagctgccgttatgggggtgacatccacacaagaattccgaaagctcggagatcgcatcatctccccaccaccacaggtagatgacaaagaaactgctatggctgtgatcaaaccggattcaaatccgcagaccggaagatggttgggagtcgacgtccatgccaagggcttggaatattcacccgatgagattgcgaagatcgaaaagctgcgcacgcagcgtgaggagctccttcatcgcaaggagatgcttgccgcacgcacaacgttcgtctctcttctcaaaccccgcgccaagggcgtagtagagaaactgaaacagcacgagccgaagggcggatggaaagatatctgtggctttgactcgcggctctcgtggtccgacgaagaattcgatgaatggcgactctccgacgctggaaagaaagctctcgcggagggaacagcggaagctttggctgtgagctcctcagctggcactgatgcagacggggacacggcgatgaacggcgatggcgacgatgatattgcattttggacgcgtggcgtgtgcactaagaagcggtgcgagagacacaagcagtgggtcaaagtgcagcaacaagatattctctttgaggaggaaacggcagagcgggacctcgccaagtgtgaggaggaagctcggtccgtggtggagcggggtgtgatgagacgatgggccgagaaggataatcaggcttgaatgccaaatggattttctcaagggtcttccatggccagccggatttcacaaaagcttgataccccttgacaaaaaaagcctcatggactggagttggtattttgcagattataacatagcaggatggtacctagtggctgagtttttgggccaattgcatacaaaacggcgctttgcgaggggatctgtcatgtttgagaataattttttgtaagagtatgaacaattgcatcgagatcgatcaaggtcaactttttctcacagtgatatgataaatggtttatcgttcattgctcgttccatattccccatttgcctagactcgtgccaactcgatctttgatcacttcgactatctgagctcccctcaaatcagaaaccaacaaatgggtatcgatgccttggtctgacgtcttcatgagcaaggtggggaacaaaggggggatatcagaatggaagacggagtggatgccatcttccaacggctgcctcgtagcatcatctccataggtagtagtatttccagtcgagggttgatttttatcccatcctggatacatagatcccagtccattagtattgacaagaatgatcgagagatgagaggcgtgcacacgagacaaatgcgtcaaggtgcgaagtgtagctgtcagaacggctgcacctcgagctgggttggaggctcgaattactccttcggctagagtatcgagacccgcaataatgaagacaatgggattgctggtggatgggcttgcctcggccgattttctctgtttttctctattatcttggatgtcgcgcagcgcttccgagaccttaccgatggcctgtgcggcattggggaagttttgtacaggaagtaactgcacagagtcaagtttacggattgcatcatctcttgatagaccaggctggtcatgggaagaacactgcagctcattgagtagagtcctcggggcaaaagcctcgaaacttcgtgggtggataatgaacgcgctcggctcagatgatggatggatactccgcaggtgatttgtgagaatgtatcgagggatctattgtaatacatgtattagtctcatggacaatttccgagtggtattgagtcggtcatacctctccgatatactcattgctttcgctgcttctcattcgcagcctggagaagccgaggacaaccccacaccgaaagaccccttccttggaggattggatgccctgtttccaatcatttttgaggttccagtcactttttgcggttgtctcatttgaaggaggagcttcactttccgttgactccggcggtcggagtagagaatcagcaaggaccggaaatgcgggctctgccgagtaaacatccattgtgcttgccatgattccgcgtatatacagccttgtccggttgttacagatctgatatcaggatataagtagaagaagcgaagagtgagcggtgggtggagacaaacgcgaaggtggatattccccgatgtggtctagcctcatccagcctatgagcttcctctttttgatcgactctacttgaacgttcaattcatgttgcttagatactaggaatactatgttggtcttggccatgaagtagaaattgcatatatggaaattttgatagagaacaagatgctcaaggtacattgctgtaaatatattatcaagctcgtttccatattccacgcccatcatgcacccagccaccgtctccaatgacatcgtccaaaatggctagcagatcctgccgcataggctccacatgcaggtcaccgctccggaactctttcaaacagggcagattattcacagtatacccaaccagggagtacgaggttgcgagttccatccatggatcattagggtccatggaccctcgttgttcaagctcggtaatatgattatcctgagggggagccagctgcacatcaaggcgtcgcaggtgccgcattctcacaaccgcatccagtacaatttgcgagtgattgtaaaatggaaacacagccgtgtaggaaaagtatgtgaggccatctaagagggctggcagattggtcgggcgttgaagcgtacgagttgaatcacgtatcccacttgtgccccattctgtaagaaccgatgggacacatgaaaggaagtactcgtagtggttgtatgctttcagagaagatgactcgttaaaagtcatcgatgtccaagctcgtgatgctagaagactagtacaaggctgcaggtcaggcaggtgggatgggtcccgaggtgtgcactctcgttccaaaaccaagatctgtaggggcatatcaaatgcccagtggtgtccatcattgatcggggtagctagagtgtttccaatgaagactggcggccctattactagaacacgacaaggatccaaatagcggaggactcggcgccaccaaaatggatcgatctgacgatctgggttttcatccgcaatcgcaacaagagacttcacatattgacagaggtctgatttgaccataaacgattggaagttgggttcatcatggagcttgagtcggacgtaactgaacagtttcggtctcacaagttgagataggcgccgtgagcacagttcgaaatgcttgaggtcttttgttggagactgggtgagttgcaaactgggtgcatgatgtagttgtccgaatgatggtggctccgtggataagtaggagataatctggtctaggagctcattggggagaagttctaatggagatgccggcacagacatgccgaattgctcatgtcgaggacctcgccccacattactatgaacaattggatatccagtaccccgtactgcccaatgtaacagtataccaagagtgcactagtcgactaagatgggggtagtcgtcggctgaggggatgaaagtgaagtgccgggcttccccactccactggctccactgaactctttgtaatcggtgactcagcggatggtctttcgaatggtttttgaaaatgagagttattatagatgtgtgggctcctttagaaaggaatatcagggtgttagacaaacatatacaattaaagggactacgagtataaaaaaacttatagaagcgtgcaacctcgtggtccgtgcactataatagattcgagacatgtccgatacgcaagagtattaggatggtattagggcatgaagatagtattaggtgggtgtattagcattagaatagtcggaatgacgtggaacaatggcactgtccgattgccaaggatcccccctgtacttacagaacaattgcttcttgaaatgacccaacaaggaaatcagcatagaatctactccgtacaaacaggggaaacccacagagtcaccaaattgtggagagcctcagcgttttgctgtggggcatgtctatcatggctggatacgatgtagagcacctcacatgagatgcaatggcaatgtcatgcccctcttttgatttatccgtttcacaaacttcccttgctttcttctcatgttcattttctcagtagatctctaaagtaagatactgtagcatcttataagaacaacgctcatcgtctctcgcagttatctatatactcccttcacaatggctcctcaacttcaccagcgtcctcctttccgcgcagagcatttgggctctctcttacgtccacaccagcttctggaaaccaagctcgcgtatgaggctggcaagatccccgaatctcaactgactgcttgcgaggacaaggagattaaagccatcgttgagattcaacaaaagcttggctatgccgctatgtctgatggcgagtaccgccgtcacagtaagagatccggagagccattgggtgagtgaagttgacagatatagtgttctggggtactttcttccccggtttggacggcttcgaggaggtcaacaatgtcgatgtggatgacttccgtccctatgcccccgatatcgccgcatttctggaggccggccacaagcccggcgagagcgtcatttgtaccggcaagatcaagcacgtcggtagtacctatgtcgaccaattcaagtacctcgctagccaggtccctgccaacgaggtcggaaacctaaagatcactcttgccgcgcctaactggtaccacttgcgctaccgcgagggcaaggcttatcccaagtctgtatacaccaacgacgaggattactttggcgacatcgccaaggcctaccaagccgagcttcagatcctgtatgaggccggttgccgtaatgtccaattcgatgaccccaacctagcttgtaagatgtacctacccatccagccaatatcgattgacgaaactaaccttccaccaagacttctgctccgataagttcctcactggcttcaaggaagaccctttgaatgtgtactccgccgataccatgttcgagaagtatatcaagcagtacaatgactgcttcacaaacctgcccgccgacatgcacgtcggtgttcacctatgccgcggtaactttgtcggcagccgccacttctccgagggtggctacgaccgtatcgccatcaagctcttccaagaactgaacgtccacacctactacctcgagtacgacaccccccgcgccggtggtttcgagccgctcaagttcctgcccactcacaagaacatcattctgggtgttgtcactagcaagttcgccaagctggaggataaggaggatatgaagaagcgagtcatcgatgctgctaagttcatcgctgagggtaacaacatctccctcgatgctgcgcttaaccaggtcggtgttagcccgcagtgtggttttgcttcccatcgtgagggcaatgccatcgactgggatggtatgatcaacaagctgcagctggtccgggatattgcgaacgatatctggcccaaccaggcttgaacttggtttttaagagtaaacaataaaatcacttttctgtccgtttttagttctaaattctgcacggagctttttaacataccttggatgaatgttttaaatagttgtctgaacgagcatttgctatctttattcttgaatatggttaacgcttttttgaagtccgattctctgtcctcgtctcattgtaacacaagaagcaacaacggtctctgtctgcttacatgaagcgcgaggagcagcactagcttttgatgccccccgatctcacacaggctgcatcagggaccttgccacttcaagcttttgaggcataacaatcttctccttaaccagtctagcgatcacacgcacagtccacccctggcaattctccgtaacagatttccgattctccgcttggggaggaagctcctcctccgcagcctgtttcaccagcttggctactctggcctggtcttccgacacaacagccagggtgtagatgttggcagtgaagccagcgtcaacgacattgatcttatcagtcgacgggtcgtacttcatatcctgtgcatcccccgtgacttggtacacatatccgtagtccggctcgttttcgtcggcaaggaagagtgcccaatggttgggctctccgggggcttgttcttcttggacgagatagagatagagatggggattttcggccggtggcttcaactcctcggggttggaagtgtcctcagtccaatcctgcgcaccccgcttcctaatgaatgtgcggccgtcgacctcgcacacttctctgagaccccttgtcttgatgggagtccccggcggaggaaagacgctcgtctaggcgaatggggtattaatatcctgtttcctatgggtatgagccgttttattgatacctgctgtaaaatctgccgcatagtgtcgatttggtcgaagttcattttgctggttttgcgaaagtagtggtcagtgtagtgtggtagttacccaggtagatatcgtcagatgacgaaaccaatcaaacacaacaaatatgcagggatcattgcctttaaacacgagtcattcaggcaccgttgaagaatatcattgattcaatcaatctcagagctatttccttgcacaacagccccaaggaactcttcttccgagtccagtgattcttggtatacagtcatcattttttcttttcccttgccttctattggctcttttgggtctgctgtatgtcttgaattaagctcttcaaccaatttttcgagaccctctcctataccccttagattttgcaggtcctcaaacaccatagtctcttttgcttctttctcccatttatccagctcacttcttttgatgcgtatttctttgagttgcacgagcaacctaccttctaggagatctttgctgcgtttgagctcttcgattgttgatcggatttctcttcggagtagcataactttctcagatcggagtgaatcattcagagcttcgagaaagatctgagcattttcggcaagtcgctcaatgccagctgcagtctttcgaagtctgtggacggccgagtgcctcagctcccgaaggaggctgatgacctcatctaatggcctcgtcaaattttccttcagccgtgtggaatgccgacaaaataacttggtccattgggtaagctctacagcctctgtacagtcccagccgtgttctttcaagatttggggaaagtcctgctgagcgaactcgaagcaaccttcctccaaaagtctttgaatggctgtcaggacaacatgttgaccacggtagtgtatgtacactgggtagagcgatggaactgcaggagttctgtccgaatttaggctcgcaggatgtactgggttgggtcagcgctcgatgcagaggaactcacgacaatcaaagctcaccttcagtctccacgtctgtttcccgttgatgagtagcccgagggacaattgcatcttctcctgtcgtctctctctgggaaattttttgaactgtgtttgcctcatctctcgctgcttccgcctccgaagcttccctttcggcgctttgagtaggcgaaacatcgaacaactctgggaagcgaattttggcttccagtgtagagtcaaacacccgattctccaagagcttcttggcaacgttgctggttcggtcgacgttgtactcccgcagaatatctgccaatgcggttttgttctgttctatcaatcctttgactgtcttcaattttcgcacctgagagttcgagtcacgaaagatatgctggcatgcgaggtaaaccaacctctcatcagggtcatttcctgccatgacgtagcagaagcttgttgtgtcctaaatatttgcctaagtgccaattagcgaatatttataaacagtagtttgctggaatttctgtgatgtagacgcaagcagcgtctccaatcagtggaatacacctgaaattgtaaccttggaggcaccttcgcctcttcaaccagtgttataatgagactgtctgctatgctttttgggaggtcttttcacttgatctcagggctgtcttaacattgttcttccgtgtttggaactccaggaatgcttagttggacacaatacccgcaaccaaccgtttatcttcagcatcttggcctacgcaccgagaccgatcgcaggatcacggtgcattatataaccgtcgaatttttgattgctttcatcattatttttataaatctcaagaatgacaatgcacatattccaagcaaatagaccgaagctagtttacattgtatacttgcatggtgcttcatgaagaacgtatcggctagactagctagtactagtaatttcagtgaaacttctcagaagagaatcccactgaatgtcatcaatggggaatatgccgtccaagtcgccatatatcgacggccaaactgtaggtgccatagcaacatcattgggaggaacttcccccatagacacatccggccttgcatcctgagatagcgcattttcaatgatatttctgacttggtggggataaattcgagcaagctgccgcattttattgcagagactgcccacaacatctgtctctttttctgcagtagacatgccctcaaacctcacatccaacgtgttggcaagctctgtgacaagactggggtaatctgccatatcgataacagcttgggcttgggattcggtggaagagtcaataggaccagtaatgagattgagcagggtaaatactaaagtgggaatgtagcccactccaatacataaacgagcacttgtcgatattgtcatttgactgatttctgatattcgcaaatttctgatcgtgtgaatgagctctttgctccgttgaatcatattcattaacatggtgatgcggactgcgtgggtagattccatagtccacagttcttctcgaagacatagttcctcaaggcgtacctcaatgtacttgagttctgtgcgtattgcattctctgcagagatcggttaatcccagccaatcatataacttcaaataaggtccctgacatacccgttgacgaaggaatcccggcgaggtctttctccacggatgctttcaagttattgaactgttgcagcagacagccatgcatgacctgggcttgtactgttccaccgcttggctgtatcgaagcatgaacgtcatccaatgttgccaaaaatgattgtatgtgaatgaacggtgcgatccatcgatctgaaatttgctcggttgatgataaattccgagtgcacctatcgatttgaatatctcggctcatgctagttagccgaccgagacttccatggaggctgagatgcagttagttagagctgcatctaccagtgcagacagtctcacctagaagacagccaatatgtgccaagtaatgcccgctgctcatctagagttaaatcggtctttttgtgtagccccaaatcctgtgaaatagaaacaacaaattgaatcaacagcagaagccgcgggtgatgtttctccccaggatatgagtaccatgcgctgtgaacaagcagaccacggagtaattcgaggtttctctcagatcgtgccacgattctcatggtgacatgcttcataatttcatccgcgacaatcttgcgaagaggggacgcactgccgatagtggcagctacaacgcacaaaaagaggaaaggctgtgtacgcctcagactttcagccgtctcaccgcgtccaagcagaacaaaaggaaatttaggaataaagtcaagctggaaactcgaaactaagcgctcagcctcggcttcgctcaaaataccccgatcaacgatagtcggctggccctccatcgcagaggtagtaggcggatcgggaccgtgtgacggatcttgagcagcagcatgcagcgcgtcgatgtctaccgaatccaagtccgggtcatgactagaggccgagtcgtgggtgggcgggttgagagtatcggacggggtcatcacggtgcgttgggtcaaggtagccagctgtgacatcagttggtcgaccttcttctccagtacatccacacggctgcatccgttattaataaaactagcgctttttgttttgggacgaatcaccttggtgcaaccttgtgctttcgcttcgtctgcgggaggtcaaggtacgtgcatgccttgcccaaacgagcgcaccgttggcacaggtcagcagcctgcggtgtacatttcgccttagcggccgtgcaggccacacaggctcttcttttgacagggactgtggcgctcatgatgtcgctgcgggaaacggagcggccgatcaagatgtataagccgattgctgagcaatcggagggggaaacgggaggaccggagcgtccggtcggcgccgatttgtaataatccatagattcaccgaagtatataacacgagtcaatgtcgaatatcgaaatagaatcatcagcatagcaacttattccaagtaatcactggatatagttcaatcaattcaataaaaaatggcctcatacgcaatcaccggagcctccaagggcattggcctcgaatacgtgcgtcaactcgccgccaacaaagacaacacagtcctggctattgtgcgcaatcccgagtcgcaaggaatttctgagcttgccaccagacatcccaatgtccatgctattaagggcgacgtcacagacccaaagtccattctcgatgccgcttcggccgcagctgccatcacaggcgggaagcttgatgttctcatccacaactcgaacgccgttgatatggctgccatgggcctcaatccgtcccaaattcccttcgatgctgaagccactcggaagatttttgagccatcgcttagcacaggggtttatggaggtctatgggcgaccaatgccttccttcccctgatcgagaagggcacccagaagaagattgtacatatctccagcgccatggcggacttggatctcatcatcaagtcaggagtcagctacgctgtcgcgtactccgtctcgaaagctggaatgaatgtgcaagttgccaagtacgcagcggagcttgcgcctaaaggaatcaaggtgcttgctttgagccctggatgggttgatacgtgggaaggcggtaaggagtcatatatgccactgcattagagataaaatctaacagccttgcaacagagaaaccggccgaattaattcaagcgcttgccggtatgctgtcgcagtttcaggcagtggagccaggactcacggggcaaatccagcccgaggaaagtgttcgaaagggtcttcaagtaattgagaagctggatgctgaatctagcggcttgttcttgagtcagaatggaaaccagacaaactggttctgagcactgatgagctgtatcagtggatgtacagtcatattcgaaatcagttttatctccaccctcttgtgacttgattcccgaaccctaactccagacacgctgatctacattctgtcgatccccaattccaagaatagagattttattttacatgacgcgggtgggaccccatgtacggagtatattacaagacagaaatccaaccaagatatacaggtggtctaaacctcgatgtagcaaattgatgctacaatggcttatactggaattctggaaacctctagacaaagcaattcagctcaatttagtatgctaagtcaatatacatctcccaccggcatggaaagacatcggtttactccgccggtccctcgatgtttctctcctttatggaggaggtcttgtgggtgtgcaagttctctatcgtatagcgtgtctcctcatctgacgaactgcggccccccaggatttcacgaacgagtccgacgctcatgctggttctggattgcgggcctattggactttgttagacagtggttcatttggacatgcatataaagggtgcatcataccgccgaccggcttgtaattgaccttgtctccttctttgaaatgaggcattgctgttggttgcaggcgtgtggaattggatattccgagaacatgtattgggttgtacaaatttgcgtgaacaggtagagtcttccgtatttgcagacagaaagagtgcaacagtcaaccgaaactgtcattatatttatattggctcatgatggggaaaggagttccgctatcgtcatattgaggtaactggagaaacgagctgactgggttggaattgatggctatatgaacatctagatccattgcggaggtaggctccgtggaaacgacagcacccgaatctgataacgcacttcaatcagaagtatgtcatttgtttataattttttaggaccaatgccagaacttgtctatcttgtctccgctgtagccaatcatgtgcataagggagcgcatccacaaaagggtatacaaacaataagaacgctagatgaagagcaaaatgaattaaagtattaaattggacccaacaagcccatataagaacagaggggatatcatagaagtgaagataaacaatggtaaacgcaacgagataacgaggccaacaaaagaaaaacaaaaacaaaaagcccaaatgctgcatggtcttgtcatcagaacacggacatgaagagaaaagagaaaacacttgagaatgcgagatgttgtacatcgaagctgctctatgagcgcctctcgaaatcacagcagtgtatcttatttctggggctgggtcttgacattgtttgagagccaggcctagtaagaaatagcatggttagattgacgtttccaaagagataggtcagcgatacgacttacaagaccctcgaaaatacctgttccatctgttgcaacactgggcgcaacgtaccacaacttgtccttgagcttagtcaattgaagctgctgagtaacttcctccgggcttaagtctaggggtgggtcagcggacatattcatcggattccagagacaggagatacgcacggccaggaacatcttgcttgttggcgaataccagaagcagagcatccttcatttcacggtcgttgataatcttgtgcagttccgagcgagcctcctccacgcgtgctgtatcgctggagtcaaccacgaagatcaatccttgtgtaccggaatagtagtgtctccagagcggtcggatcttgtcctgaccaccgacatcccaaacgttgaacttgacgttcttataggtcacgctctcgacgttgaatccgacggtaggaatagtagtcacgtcctggttgctgagtttaagtttgtatagaattgctgaagaaatgttagccaatcgtgtccggggtctctatctaaggaggaatcgtactagtttttccagcagcatccaagcccaacatgagaatacgcatttccttggtaccgaagatctttcccatcatcttagagacttgtccacccatttttgcgggatttgacgcggtgtcgggcgtgctcaggagctgtttggcggaatatcaacaattgcgacccgccttgtgtattgcgggtttcgaatagagattgaaaggcaccggacgtttccgtgcaaagtggcttcgattgagatgacttcgtcaacgaaaggacaggaaaaggagaaaagtaggtgtgttggtgcgtgaagaccttcaatccaatttccctgaggcgggggaacctagaaaaggggcttgggctgagcttactcatcatctcctctccacgaggtccacgggggcagtttcatcctctcggctttggtttcatgtatatcaaatcattctcgaacttgtttcattcatgattatacccattccatggacaatatattcagatatctatcaaaacacttcgatgtcattaaatcgtaagaaccgtggttgtgatcttcctcatccacggcggtattactccgacagtatatatatcttccctttccttcatcaagcactaattgcgaacaaatgtcatttgatcaggatataatgccaattctaacaatcaaaggccttcttaagcgcctatttaacctaatcaacacgcacctccgccatatatagcagcatgcatctgatatcggagcctctaggtatatactggcctatctccccaacaaatacattggcggtttggccgagtggtctaaggggattgactagaagttctagaaatcaaatctgttcgtcggcgcatgcagctgtctttgtttctttttctttagctttctcgagatagaatcggaactaacggtttcctaaatatagtgcagcatgtcacctcgcttataagatacttcgtactcgatgacaattacacttctactatttatgtacacatccgagtattctataaggtaaccatggataggtttgaaatagttcgagaaggtgaattggcgttacgtcatgattaaatgaagtcattcgtcaacttcatggacatggctgatagctacttctttgattatttcttggataaattcagttgcttagaatttctaagaatcatgcccggcgaaggacaatcgttcgaacgccatgcctcagtcacacagcagcgtcgactcgcgctacagtacaagcgtaacgcttggttagggccaccgtcggatgtatgaatgtctccgaagtagcagtaaaagccacttctcgaaattctcaatactaataggaatactaggctatctacgccggtatctctagcaactttcatgattaccatacgtcaactatagcgatcgcaatccgcgataccacatatttactagacttcctccagaagcagttctcacccgatcaagcctctacagaggaggccaccgacttcatcatttccgagctgaaggcatattctatgaatcatctggagaaaattattgggatagcaatgcctgaacatgttgcaaatcactgcactcgactgtgccctcgcctttgggcggagctcgacatcattcccttggtcttgtcgaacgcaacactaatagacagagtcaacatcggacaggttagcgagacccgagacccgggatctaatggatggagtgagaagacgatcgacgagcaggctgaatccatggcgcgaaaaggtgttaggttagttggtcccgctcaatgccataaaggagccattgggtctaagtgcgcgcaggctatttggaccggacaacatgcccctgctacaagtgggcttcttcgggcttgtggaagtagacacagcctaccatgtgcaaatggcggatctgagcgattttcagaaaaccgtctcggatagaacttggtccgcgatgcagcactatgccaatgaattgaaagaacgcaataccaaagtggcatttttcagctccacgcctcagggtggtggtgtggctttgatgcggcatgctctcttgcgattttcacattgtctgggtaccaacattaaatggtgtgtctgtgccggtatctgtgtcttgaaatatgaagcctaactcaattattgtaggtacgtcccgaaaccacgcccgggcgtcttccgagtgaccaaaacaaaccacaatatcctgcaaggtgtcgccgatcaagatgaccgcttaacaccagagaacaagaaactcctgacggagtggattgaggagaataccaggcgatactggacccgaccaggcggacctttactttcaccagcagagggcggcgcagatgtcgtaatcgtcgacgatccccagatgccaggcatcattcccatcgcaaagagactagctccaaatcgaccagttatatttcgaagccacattcaaattcgaagtgacctggttgcaatatctggctctccacaggcagaggcctgggaatacctgtgggatagtattaaacaagcagactgttttatcagtcaccctgtgagcgcattcgtgccacggaatgtgcccccagagatagtaggctatatgcctgcatcaactgactggtaagggccgaagtccgataatctgcttgcatctgtcatctcactgaccgggacataggctggacgggctgaacaaaaccatgcgcgactgggacatcgcgtactatggccgcatcttcaatacaggctgtcacaactcggatatgccaactatccaatggcccgagggttagtacctgaaccagaactagttatgatgatcacattccacggtgaaagctaacacgaggatagactcatatatcgtccagatcgcgcggttcgacccgtcaaaaggcatcgtggatgtgttagtttcgtacgagaaattttacaacaaactagtagccgaagcgcctgatatgcaccctcccaaactagtgatttgtggagaccgctcagtagatgatcccgacggagggcggatctacgacgatatagtcgactacctggacaaaagagtcccagatatccgccatctgatctgcgcgatgcgggtgcggccctgcgaccgaatcctgaacgccattctctccaaggcgactatcgcactgcaactatctacatccgaaggtttcgaggtaaaagtctccgaggcaatccacaaaggcaaaccagtaatagccacacgtgccggcggcatcccgttgcaggtgacgcacgggaagaatgggttcctggttgatgttggcgataccgatgctgtggcgcagcgcttgtttgagctctggacaaatcacgatctgtatacccgcatgtcggaatacggcatgcaaaatgtaagtgatgaagtgagtaccgtgggaaatgctctcgcctggctctatctctcttccaagttgccgtatggacctgttctgcccaatggacgttggatcgaggatatggcgtttgaagagattggtctccctaacaagaacgacgatttgcggctcaaacgcgcagtccaggtggagaatatgggttagttgtacttttttgtttgactctccttcattagcagttgccagtatgtatatacagacaaaatccgaccatctaccacggggatacttaattagtacacagatcgatacatcaaaacacaacattgaaagtagcatgggggtatcataaaaccagaaaaagaaaccaaaacaaacccaccaacccctcaaggccgtccaacaacccgatacctctccctagccatacctccctccgccccctcaacaccatatccctccccaacctccccgacaatcctcgccggtctcccaccaacaatacaccaactcggcaccaccattccaggcgggacaaccgcgccatcgagcacataagcatagtccttaataatagccatactgcctatagcagcacccttcccaacatgaacatgattcccgagcgacgcagcctccacaaccgcgccctcgccgacaaaaacatgatcgccgatcttgagcgggtagaacgagtatatgccgcggtgtagccggctcggcgggcgcaggatcgcgctcttggagatgtagctgtatcgcccgaccgttattgctacgctgggcgtgctcgggctcgaggctgctggcgcggaagggttgtttggatcggtgggagggggaagtgttgtcgtgcggaataggtcgccgcggattacggcttcggcttggattaccgttttgccgcccaggatgatatgttgcgtcccgtggatttgagaccgtcgggagatcttgtttcctgtgtcctgattttctcggcgggttaggtaggggttcttttgttgtggggtcggttgggtggtttcaattgggagggtaagttagggggatcacttacggtctcgatgtattcgccctttgctgcctttggtggagccattttgaggaggattgaagagctttctgtcgtgggatgctgcaattgtggagttggagttgcaacaaatatagctcgaccccaggaatctagaagatgcggcagtatagccccaaggcggtgtatgtaaacaactatgacgatttcgatagaccgattgcaatgaatttcttagctattgttaagttgcactcagatgggaaaaactggaattaatgagatattcatgaaatatacactacgctgctgtcattaaagcttcaacaacctccggatatcctgtcaaccaaacagttcgtcgaaaataaaacagtcaataaaaaaaaggcatacaatcatagccaacccaaagtaaattacccccacatggcatgtccgcaattttatatacgatgcttcaactgacaaacccaaaagaaacctctcaggaagatgtagtcttcttcttctgctccaaaggaccatcccagtgcagcttaagcgacatggggaaggcactgtaagcacttccgtcaccgcggaggtaaaaggagtagccaccttcctggggaaccttcttaatctggccctgggcaccggcagcacggcggagaccctgcagacgaccgacgacacgcagcatagcaacgagcgcgattttggtgatctgctcgccgaaatcggtggtaggaccctgaccgtggttgagatatgagccaagagggcggtcaaggttgacctggttgggctcggggaatacgctggggtcgtggttggcttcgtcgaaggaggcgaatacttgctgcccgggctggatggtgtaagttttgccgtggtccacgacggtcacactttgcttggcctcgcgcaaggcgccaaaggtgccgttcaggcgaatagcctccagacagtagcggtacagcttctcgtccgattcggcagaatcggcgttggcgaagcggttgatctcagctaggtgggccttgttctcgggcgcggtgtagaactcgatgatctgggtaaagacctgaccctggctgggaactagaccgacgatcgtcgggacgattgcagaccaggtgatttcggaagcgctggagccggcttccttcatgcggcggatagcttctgttccgaactcgcggatggcgttgtcatgcggacggaagctgttcatgatgccagagaagagaccgctgttggtgtcggccttgacggtcgcctcaacgacctggccaagctgggtagagacggcggaggcggctcggttcagagagcaagagcgaggagcgtcgacgtcgaagaagagcgcggagaagatggtggcaaggatcatgtgcatctcgtgttcggtgaataaaccctgcggattctgctcggtcttcaggggaatgccgaagagagtagatgcaaagtgaacgtgggccaggttgccgacatcgcgagtgatatcgatctggttgatcttgcccagctggccactcttttcagaaatcaaacgctcggtgatatcttcgtagaaggttttgacgagcttaggaaactcctcggtgttgaaagccttgccgatagcctcgcgttgcttcgtatcgagctcgcccttgccgaagaggtcagacatggagcgggcccagctgggacggaaatctacctgattcgagatcaacagactggcactttcgtgagaggtcaggttgacacgaggctcagtgaaggcgggtttgtcccaggagtaatcctgctcacggcctagatccttcatgattttgcggttttcgctggggattgtcatggggtagtgggcataaatggagtctggcttgtagtgattagggaaggcgcgcgtggccagcttatagaagatacatccctggttgatgttgaggtcgtagcggcactcgttgtaaccccagttggttaggttacgggggttgtaatcaatagtgtagtgacggtcaccgcggacaagggcgacggcatccgacagcacagcacgggagatggtgtaggtcggggcgatgccgacaccagggatcatgggctccttggcctcctcggtgacgataccggggtatagttcaatgtaatcggggtggtcgtagagatgacggagagtattagcgatctcggggttggagttgacttcttcgaaagtctcgtaagccttcaagccgaagtgcttacggaactcgttgagagaaccgacgttccatctacgcgaagcctcgataccgaggatctcgatagagcgcatggccttgggtacgtttcggggaccgaaagagctggccacatcctcggtggcatgggtcagaatatttacaagctctccatcatcgaaatatccattttcgtcacgcttcaaacgggcgaaggtacgcttggcgggatcagcatcgagcagaccctcaaccttcttcatacccatcagtagctcaggcatggtgacctgctcggcaggcttgcccataaggtcgtagtaaatctgctcaatccacttctcgtcaccctggctaatggccgagtgccaacggtaggccaaattgaactcgacagagcactggttgccgagaccggaaggagtggaaccggccttctcggcctgggcacgaggatccaagcaccaggtggagttggtgcggttcaggttgacaatggtgcgcaggtaatcatacagagtgatgttgatgtacagaccgcaagtgataagacggccggtctggaacaggtcctcatcacgcttggcccaggctttcttggtgtcctcctcggacagaccaggacggggcttgctgaagcgaccattctcgttaatctcagccagctgggtaacgacatggttgtggaaacgattcagcataaccagcaaaacaccacaggcagcaggaagggcctgcagacgaccttcagagaagcaatcgggcttcaactttccgtcctggcgggagcggatcagatcctgctgctcctggatatcaccatacaaaatggacaagtcaaggtaggcagaggtcttgtttatgtgctgctggcggtagtcggtctggaagatatctatgtacgaaaacagcatattagcgcctgaattatagatttcagtggggtcgacttaccgtgaataatcaaagaggcccagtcgaagaaaacactggagaccttgttagggtgcggagtgaactcctggcgagcaaagagggtatcaaaaatcagaccggcgtcgggcaatccgctgggctggatggtcaggggagaaatggtgcggcagtatgcagtattagcagctcccagccacgggagagtagggttgttgttggagccatcggccgagcgatactggtactcgtctcccatgtaactattcacagcattagcgcgcaattgcaacacagcagtctccaaattggggatttctcacgagagaggtgggtgaggaagtgagttccatagctcatccaggaacacactggtgagctcggtgcggtttttggagttaccgggcaaatccgcgaccatctggattatgcgctccatcaagtaggtcttgtcatcaacaagttcgccggaggctttgctcaaaatcaggtctttgacagtgttggcatcgcggaatcccagtgccttgatgtcattgaacagaccggacgacttgtcatgcttcatgtatgcgccatcactggtttggttgggcagaggctcctgcgaagcgtgaattgcttgcgcatatttctcaaatacagcaacgacctctgcacgcttcacgatgtggttgtcctccttagtagaggtggacttcgggactggcaagaccttagaggcacgcctgctgctcttgtctatgctcttgggctcgatgtcattgcaatccttgcaatccttggcttccttggattctttggagtctttagagtccttggaccgcctgaattgggtagagattctcctcaacattgtgaaaaaggaccacaaggacaagttgtgagaataaagaaaatcaaaagagagatacaaggttgctaccaagggccagataagggggaataaatcagaagctcgacggtgctctttaaaacgagctgttcaggcgacgcaagtcagctgcaggactgtggagcgtctgaaatgtggcggatttgctatcgtcaatagctgattgactgcgacagcatttgatttgatggagagcaataggacgatctcttctcgggcctagtctctgtaacaaatattccagccccgcatggtgcaagctcaattcccaattaaagtctctatagtggactctcgatgatgaggtatctcaatatagtaactgatcatcatttatgacttggtacacgaaaaaggggacatctgctcgaggtagtatgtacagaatacgcgaacaccctgcccaggtggaatcatatgattgaatatcagatataatagccatggttgcggtatgcagggcataacccggagagctgaaaggcaaatccaaatgtagatctatattgcacgcttcggaagagcggataatcgaccaatgactgtgagtgctgtaataccggactataatcagcggtgtacatcatctgtacgaggtactcctctgccacacagaagtgcagacggatctcaagatcgaaataaatcgacaccaagtggggaagattttccgcgaaaaagaaattccaatgtacttggtggctggctgtctatttcagaacttgctccaattagggttatgtgtgtaggatacatccatacttcgtaggcgtgacgcaaggtccctatggtaatgtgatagagcagcagagatgtccttggaaaaaagcaaaagaaagaaacctttcttttttctttttttcggttttcgcttgtttcgatcgtcgctggcccacctgttcatccacttactatggattttaagtgacgaacgggccgccagccagtcatcgtcgcgaattattcagaatccgatccatctcggggcatccacttcatccactttcagggtcttagttcttgtttactccgtaccccgtgtcgctcccactgtcctcgtggcgcttttcctaggtagaacgggagtttccacgcgagaatgagagaatcagagatgactccttttgaaaaagcaaagatggtcaagataggagtgatatttcaatatcatagttcgacgaaccacggaccattgcatggggccgctcccggataaccaatccatggatggataatctatgcataaatgctttagattagctaccgatttacaatgattcctctattcgcttcccttttttgggggatacgaagagaaggctggaagtcccactcttcttcccttcccttttaggtattgacaatcctttcggctgggaacagttccacgtgaaaatgacaaggttctgagtttccatattgtcagtaatcccagattcccagattgtattaggtcattataatcacaatgacacctcgagaaactttctctagtctgactttgccgaggaaaaaaattgacggttcaccagtgggtcgcggccctaggccgtgaaggaacatgaaccaatacgtatcgatcgatacgatgctatggcaagctagcgccaaagctagatccgatcgctcaagaccgaaccgatgcgccggaactctctcaataggaacgccccctctcaccccttacgcctcctgaatcaatgttgtaatattagtgaccgagtttgtgtggagaatgatcgacaataatgtcccgagcaccacctagcatcatctcctttcaaaccctcatagggccaatgattagtactgtactccgtagcaaaaagtaagatctgcacgtctcgctttggtctctcttcagctccatctcatgggaattccaaatacatacactaggtgaccaggtccgcgccgcgcaacttgcatccctcgtgcagatttttttcgagtcaagctcaggcctgtttgcaacaaactcgcatatccagcaattactgccggcacatctccattgggtaggatgcacccccgctacgacgaagtagggtttcgtgtaacctgcacctgcgggcaagtcagcgattgttgacaggaaataattccaaaaagcaagaggcccgcccatgtttgtgatgggaatgtgccaagtctgggggcccgcccgtcaaccaggtttggcttatttttcacaaactgcagcgatcggctagtgggttgtacattgttatcctgcaaaccccccttctcttagatccgatgtagggcgctgattcgtgcaatgatcctagctgtacggagtacccagctgcataagagagtcatcctaaccttgagccttccccctttctcgtatattgcctccttcagctctgactaggtgtgcctggagtcttgaaccttttttttgtctgaccgacggaatcgcgcgatcatggctgatgggtatgaaactcaaggcccgccgggcataccgaagcagtttgtgctttgctttgatggtaccggaaacaaattcgccggtgacgagtcggatagcaatgtgctcaagatctttcgcgtaagtgggaccgcgagccaagcgtgtggaccatgctaagaagtcgcagatgcttgaccgcagcaaaagccaccagtatcattactaccagccgggcattggcacatatgtgacttcgaagtcactgactagccatggccgaatccaacgtatcaagtccgcctatcaaaaggccaaggactcagcggtcggatcttcctttgacgaacatgtcatgggtgggtacaagttcctgatgcgatactattcccctggcgatgatatcttcttcatcggctttagtcgtggttcatacatcgcgcgatttctggcagagatgctggactatatcggtctactcgaagcaggaaacgaggagctggtccgctttgcatggaagacattcgcaaagtggcagcagcggtccaatgactcggaagaagagcgcgaagagaagaagaagctcttcacatacatgaaggccttccgtgagacgttcagtcggcctatctcgcgtatccgtttcatgggtctattcgacactgtcaacagtgtgccgcgcttcgagtccgcgtggatgcaacgtaccaagttcccctacacggcacgcagctcagccaaggtgattcgccatgccgtaggtattgacgagcgccgcgcgaagttccgccaggatttgatctctggggcgcgtccaaaggagaagaagaaacaccgccgccaccatttgcaaatgcctaagaaccatctgcacctcttccaccaggataacaaagagaagccccacgaggaggtcccagacaccgttcctgccattcgggtcaatgacaaacccgaggaggaacaacaggaagaagagaatgccgaggctgaactcaatgcatccagatatgggcccagcactggagaaacatactaccatgccgggcaccatacctcgcacacaggctcgcagcaaacctcccgcgccgggagcgaaaacgggacaacgcagcccgacacataccgcgcacgctctccccgacgcaggctcgtagtgcccaaagcgtcaacggacgatctccgctcattgcgaagcaaagagtcctttcacagtttgcactccaacaccctctcggtgcaaattcccgttctcgaggtcgattccagcgacgacgaagacgaccaagacatccacgaggtctggttccccggctgccacgcagacatcggcggcggatggacactctcgagcggcgagtcatgggcactgagtcacgcgccgctcgtgtggatgacgcaagaagcgcaaaaggccggactcgagcttgatgagcgcaagatgaaacaattccaatgtctggaagagttcgacgatgattatagctccatccgggaagagattaattcccagcggccgggccggtgcgttgcgcctgatactgataacgatgatgctttccgctctatgcccgatgataaggagcgcagtgttgcgagtcgcgacttctggcatgcgctgtataccgccagtacgaagggtctgatgcatgactgcctgatgttcaaccagggtattcctaccatgtcggttatcacgtggcgcattatggaatggttaccgttccgtcgtatggatctgcagcctgatggatcgtggaagccgattagctggccattgcctcgtggtgaggtgcgggatgttccactgaatgctgagatacacgtttctgctatccggcgtatgcaggcggatcccaaataccgtcctggtaatgtgattgtcggtggtggtggtcgtggtatacgtgttgcaccggaggagtatggtattggtgagtgggtggtgttcaaacatgaaggggatttggtgcgggagacttacgtccgcaagaacatctccaagtgcaaggagggcgaggaatagactaattctggttcttccttggttcatattatatatccctttctatagtgtctaataggtaatttggagaaattgtatcaaatgctatgtgtctattcagcatatcccctctgcctggccctatacactatcggctcatacactcgtaaatagtcgcggcatatctactttggtggcaattctatagctaatgattatccttctagatatcatcaaggagaaactcttcatctcaaaagacccaaaaagaccctagaacacctactccgtatagttgtcaaacatgtgaatatgtggatatgtggatagagccggcgagggactgccatattgtgttagctatgaaatgaatcaaagaagcccgatagttaagctagaagagcaatgaggttcaagaaagcagcaaattctggactcaatacatcatcgtagagagagaggtgatgcgcaatcacaacttcggcctccccgctcatcatccctttcgaccttctgttcagaaggacaccctcatcgccagttgaatcaaacataggaagcaaccaggcagtttctggagcaatcgcagatgatatttggtgcgatcaggattttcagtgaaaatgaagttccgcttgggccatgggctcctcttatgcggtcaaccttcgtctttttcccttctcacctctttgaccttatcatattatttctcagcctccttcgtttttgcttctggcaggtccaagagtctcctcctttactctatgccatgatgcgaaggtaatactcacttacctcccctctttccctccgccccccctttttcttctttttttacacatggagacacctggagagatgcgccctcgcaaacctgggaccaacaccggggtcatccccgttgtccccgaggataaggaggacgtcatgattactttttcgctgtctgaaccatcggcatcacctcggacacgatcccctttggcccgatcgcatctccgctctcgatcactggcgggaatcccgggcatgccgtctatgacgcgcgcttattcttccccagggccggactcccagggtcgttatatcttcatcaatggccgcggggcaccagtcgatgcgaaaagatctcccctgcaaatgcgccctgacgattacagcgaccgcatgggcgccctcaacatctccgaaaccatctccgagaacgcagaattagaaaccaatcccaaatcgtcttcacagccagcctcatctcccgtcctgatgccgcagacttttccccgtatcaatcgcctgcgtccgacttcaccccttcctttccagactcccatcagcccctccttacattccccacccattctgggctctaaatacaatgagtcttaccccagccaccccgggtctgtttcgtccatctccgtcccctcaactccgaccagcctgcgctcccgaagccccagcatttcgtcactggaaacaatccccgacatccccgacgctgagaatgaggcccttgaagaggatcggatcgcggagctgaaagccgcagctgatgcggcggacgcggcaagtactgccaaccgacggcgcggggcatccgatgcacccagttcattcactacaatgcgggggggatcgggcggatatgcaactcggagcgagaagcgcaagcgatggagtgtctgtggtgccgagcgacggcaggatctcgacctagagaccatttgggaggattgaagggtgtttcccagtctcaaacgagtccaaccgacctgcgcgccttgtctactacgaccaagtactacctgcgctcccacattgtttcatagtggagttgatctccacaacttcttatctttgctttactcggtggcgctttgctccgttctctgactttccttgatacccttacattacctccaactcgtacctttcatttgcagtcctgtttaccatttcaaaaagcgcgttcgtcatggagttctacggcagtggcggtggtacgtacgatgtacccgcttttagcggcttagcatgttcgactcggcccatccattgttttattatgctggtcataactccgtccttttctgtttttgcggtgccttcatttcctggcatctgtgatgtgatgtcttcattgcttcaatacaattgagccttttccagaataatctatcctgttccgagtaaatccattgtaaccactacgatgtagctggcattgataaggacatccaggtgttgataacgggaactaatcatccgagcacccaatgacatgcaaagaatcttcacttgatcgtcaaaccttcatattcaccgacctcatttccaggtgcatcagccgcatatcctaagttgcttccggaatggctccgagtccgcacatcggcatcatcggcgcagggatttcaggcctccggtgcgccgacatcctcatccaaaatggagcccaagtaacaatcctagaagcaagagatcgcattggtggcagagtatgtcttccttatacccggcacaactgcaagaggccaagtagttctttaactttcttatcggctaggtgcaccaatcaacagttggagaccatatcgtggatatgtatgtacacgtacatgactatgacttggaaagtatgcagctaatgctcaaatcagaggccccaattggattcatggcgcgggggagaaccccatcatgaccatagcggaagaaacggggtctgtcatgtatgatcccgaaggtggagcgcatatctcctactcgcgagacggccaccctatcaacgacgaagtgagcgctaaagtccaggactttgtatggaccactatagcagaagccttcaaatacagcaatcaccatggagaaagcatccccgtcgagcaaagtctattcgatttcttctgcgatcgagtccagcaaaccaaattctcagatgaagagaaacagctttgtctcgatgcctgtaggctttggggtgcatatgtcggtgatcaagtcgacaggcagagcttgaaatttttccgtctggaggaatgcgtggacgggagtatgtacctttagcaaaatagcccggagacgtatagcagagtttctaacatcatcaaggcaacttcatcgtggcatctacatacaagcgcattctagagcacatcgccgaaaccgccactgcaaaagccgacatccgcctcaatgaacctgtcacaagcatcaaagcaccacctcacaacaaccaatcaccaacaaagcaccgagtaaccgtaacaacagccacaggaacaaactacaacttcgacgaagtagtcataacctgcccactgggctggctcaagcaaaacacctcagcattcacaccggctctcccgccccgtctcgaacaagcaatcaacaacatctcatacggccgactggaaaaagtctacgtgacattcccgcgtgccttctggcacacccaaaacaccagcacctcaacaactcaaacgcaaactcagaataccgtcttcgcccaattcctcgaaccatcctactacacccaccacccagcacacatagaatggaaccaagaatgcgtctcgctcgcctcgttcccagaaccacacgcccatcccacccttctcttctacacgtacggcgacagcggcgcagagatagtaaaccgcatttcggagcaagcgccctcgtcgcccgaatacagggaatctctaatcgacgtaatgcagcccttttactcccggctccccgggtacagcgcggagaacccggattgtgtgcccgtggcgcttcttgctacgcaatggcagaaggatgtctttgctgggaatgggtcgtattgtaatttccaggttggggttgaggaggcagatgtggatgttgaggttcttaggtctggggatgggattggtccggttaggggtctttggtttgctggggagcatacggcgccgtttgttgcgcttgggactaccactggtgcgttctggagtggggagagggttgcgagattggtttgtcaggggcttgggattggggaggttggtgggatgggggttaaggatgattctttgccttctgctggggatgtgtcttgatcagaaggaagggttgtatggaaactgatacatgaggaattgataaatatttagacattggtattatgacagatggttcttgtttgaagaactatatcctgggaacaatggtgatagagagataccgtacgtgtctaaaaaccgcgaggtgtgtcgattatacaatggactcagcaagttgaacattttcattcatacttaaataatatatttcagttcgttggattcgttcaaggattagtatctttctcgggagcttttcacatttgttcagtgaagcccccatcaatagcaggccaggaggaccaaccaagtccaccgagtaaaacaccatagaggaaagataaagaaccatgtagatccatatgcataagaaatgcagggaaagaaaaagagaacagggcccgaataaaagtatataatggacagggttcacgtgacagtggcaaaagaccgcctgcaagcacatcatgaacacagcaaggagaagtacagggctccgaacaaaggaaaatgagtatcacaaaggaaatgaaaaataaacggataggcaatggcgcttcagaatgtcaatgtatcaatcatgcatcccttcaaggtcatcgccaggccccctggctcagcgacaggagaccctgcacacagtccaggtcatcttcttgactatccccggcgccaccagccatgaaagccgatacttctgcactgagttctggcggggctttgccctgtgagccggcctggagtgcccgattgcgtttgccgttggccgagatgccgagaccgcgattacggttagcatcacggaggaccggtcgtgggatgtgtgaagtgttgcggcgacgaatatttgtcgatcgtgttcctggaacccagttctccttgtcagagtcaccgaggtcttgctccagatccggtttgccagacttggaaaatagaggcttcgagagcttggatgggttcacgttcgctttgtttcggcctgtttctaatcgccccagagatgaaacagcgcgggcgagttttcgcctcttctctcccatggactgagagattggcgtatttggctcgccgtgagcagcgaggctgtgccgccctgaggcactccgaggtaatgagcgctggctgcgagattggaaaagacccggagaaccgttcggcccgctggtcggtgttgatagggcacttcttgcgtccgtgtcacagaaagattcccagttacgtggatcgcgagagcgaccgaaagcacgatctttctcggtcacacctgcccgcggcgtggctgggaagacggcactgctgctacgttgcaggcttgtcatctttgttcggcgaactgagaacatcgccacacggttcttagacggtgatggttcgttctctccgcggattactgcctttccatccgatgacatcgcgatacgtaaggcgttgcggcccttgggcggagacggcgttagctcgtcctctttgtgtaccaaagcctctccatcaaacgacatcgacaaacgcagcgatgggggtgacttggtaggtgtggtttgtgtgttttgtgtgttttgtgtgggttgtgtggttgctgcctgctcattttctccctcgcctcggatatccgacactgaacgtttcctcttcggtatctgcagaagagggtcttctgagggatcattcaccagttgggaaaactcttcctgtgtggtgggcggagtttctccagcagcctctgttgccacgcttgtctgagtgctctggggcagctcatgttcatctttatcttcagtcactggatccgaatcgtctgaaaactgcaacagtcccccgtgccatggttttgatgccatttcctcgcggtggtcgttgatgtcaaattgctctgccccacttgaagatcccggctccgtcgacgcgttatcatcactcgaaggttgacctgatgaatcgaccctacccgagcgcggggcgagtaattcgtgaggttggaggggtttggatttccgacggtcgttctggcgacgattttggaaccaaatctgtgagccagttagaagttgtttttgtgtgtgaactcttggcatcacatacttggacctctttctcgccgagtgagacgcggctcacgatactcgtgcgggctgccttgtctggtttgggattttgctggtattcggattcaaggattgcgtgatcctccggactgcaaaatagttcacaatcgggttaattgacgcgttcatagtatggacagttatgatagcgtacctagttcgacgtcgcttctggcgggctagcagtttattgtcgacacgaggagggaggttctgtgtgagggtcttttgcgaatgaacgagaaaagcgtagttaagaggattggagtcggtggccgggagagagggcgaagatgagatcgccaccgaaggctccgggtcaaacatgatacctaagagagcatggaggggttgggaggataaagagaaagaagcaagaacacccaatcacccaatcacccgatcaaataaataaaaaacgaggcactgaagatggaaaagccgtgaggctggtatgcagaaaaaggtatcaaatcgcgtcgcggtgtggacgcggagtagaaagaacgtggcccgcgctagtagcaaagtgctcctccgaggtacttggtacttggagacacggatctctccctgattcgatttgatcctgatcctttcaagtctaaatttcctatctctctgactcctcggaatgttcaatttgcattttgtctacatttgacgcgttgggctgtagtggtttaggcccacacttggactaaactatacagtctgtgtgaagcgcaaagcgtgtcctcgcgtttgatacaggcatatttgaaatcctccagagtgctccgattaaacaaccgagggttaaaccattccattggccttgattgccttatttgccttctttcgcctgatctgcccgtgagcgcccaacgcgtggtaacgcgccctcacgtgaccccacgaggaagacttgcacgtggtggaatgtgatctctccgatgattttgggaaacgtggaatgtcaatatgtttggaatatgtttagaaaagagatcccatctcttgtgttcgtagatgcacgacgagagggcatttatggctcccaattgtaacacccttagtgcatagtgggtcaccggtgaggtccccatctaagaaaagcaaagagcttcaaatgttggtctacagccaatagcctaatagcctgcttagcaggagttgccgactggaattctcggatctgagtgtaagccagtttggggacaatcacttcttctatggcattggtcgtgtttttcttatatattcggtctcctagttaactatgttgtacaacatacaagattgactaagtatagaccgcttcaaccaccaattcgccatccaattaggagcattcctatgtctgatcggcatgcaatcttatgaatagtcggagcccctaaatagtcacatcaggctgcacccgatatatgctggctatgtcatcggtctgttgtccatgtcccactctaataagccgagtgtgcagaccaagaccagaagtgttgatttgctcattggttgacgcacgctaagcaagccaagggaagaagcgagaataccgcgtatgcatgacatcaactagaaatgcaactgctagacagggagagagtatatatttgaatgtgcaggtctgctaataagcacatacattaaagctaaacgaatgcgacttctgagaaactctattgcttcgaccaaagcctagtatacaagtacatgtttcacatagctatctgaccatgtaaggtactctttttatatgtccttctcactggtcatcttgtgttcactatataccatcacagccatacgatgcctatctagtagaccagtatatccctttcgctctgtcatcatctaatcatggggactttctcactaacttggcaatcgacgtacggactgggctgtaactactgtctagtgtttattgaccttacattctgctcgctcatagtatccatgattctaattaggttagatctagacccgaatagtcccggggtaaaataaagtaggagtctagaataccagaaaagagtcaatactccagctagaatcttcgaagaatgtgtccatcacattaatacaacccttgcaatgataaagtagggagtaggacagtagaggctagtcgtcttggctgtaaatcagtgttactagcattattcccagaccaatctcgaaagaatagcataccaatattaggcaaataccaagtaataagaaggcatctggttatattccaagtatctcgatgaaccccatgatcaccaaaaggacaatccagccgatcaacattccgcccccgggctatcccttccatctcccagtgttgattggttcgatacaaagctgctcaatgcctaaataagacaatcaggccaagaggaaaacaaccgcccatcgtacgataatccacgtcttttccccgctttgacgcttggacatgggatagcatccccagatcaatgcatcttccctgtcattactgcaactcttactttggcctcttttttggattttgaggtccttttctacctctggactcatttcttcgtatcctgactggtgtcggctctttgtttctttttctttaagaaatatagtgctataacaccatcagactctctggcccggcacggcgaccgggctgtgacacccacttttagcttgtgatcactggcacttcggaaccaaagctttttgaatccaatcttctatttcgcttccgaccttggtcactatcacacccatctcatcgacccgactctgaccgttcgtgcaacaaagaatcttgaactcggagagatggctgaagacgcgaaactgaagaagaaccatatggcgatagtcttgggcatcggacttggagtggtgctgcttatcgcacttagtttgatgtgagttagattcgatttttgcatcttagtgtatgctatctcttgtgtctcctccgtcctttccccattctcaccgatacatttcctccgtcggttgtgacttgttacataaaccatgccactccattccacgctaaccgtgtcattcagtctgacaatactcatcaaccgccgggacaggcagtcattcttgagatcaaggaaaaatcctactgagcggttgcgcaagttggacaaggtctcgccaacttgtaccctcgagaagtggtgggcgaccacgaaggggaatctcggactgtccgaggccgtcgatggacagttcgtttggtatgtctaccttgctttgccggtagaacagtcgctgacattctgttcagcgccgtttgtttggagcaggtagaccgcacgcaggagatccgcgacctgcggtgcttgcacgtttttcaccgggaatgcctggagaagtggttcttgggtgaccatttcaattgcccgctgtgtcatcgcgcatactatgtggcagacacacctccccgcacagattatctgtggatggtatgaccagataccagccaatgattggaagggagggagaatacaataacgatgtgatgaataaatctttgcctctaaatcatctccacaataattcaatgaccaaggtttatggcgcaaggccctcggtaaggggcatataatccggattgaagtcccagatcgtattgtagtttgaccaattgaggaagttgtcgaggccggttgtcacatcgtccaccacatgctgctgcacaggctctggatcgagtagctgatcaaggatgcgagacagctttttctcggcttgtttgcaggtatgatagttgccgtgaccagggcctgcgacccacgataggaaagaaataaacacgctgaggttgcggatcagctcagcacgtgggagaggaacagcgtgtggaccggactcatgcgattggcgcaggagttcaaggagaaggacgctggcggaagggacaccgtacgtgaggacctgaatttattagtagatgtctatgaatggcaaaaatggatgacatacgatccaagaaaaatgccggtctagatcgaccattggggttcggaacgaattaatctgaatgacaatagctagcacccgacgagatacatcgcaaagatccgcctgtccggtgtttgtgtttttgacgactgcacgatagagtaagaatgaagtgtatagataatccaaatagaaatagacaatggtaagccacccatcatggaaatggtcgttcgatcgccggtcatatcgaagctgatccggagatgactgccatatggcgcgagatttctcttggatttctctgtcataaagtcagcactaggaaaacacgtaaattggaaaagacatactcggatttctgaattaaatcgtgttgctcgcgagtccccagtacaacctcaagagtttcctcccgaatgatagctagctgatagcgtaggcgagttggggttaccaggtgtaacctcccttgactgttccatccggcgctgtttagctccgaaatagcattgctgaggacatctccgcctgcaaccaggacttcgtcgcttagatccaatggagcatcgagtgtgcagaatcgaccattcatcagtggcggccgcccaacaaatgttgctatcatcttgtccatgtagaaggaagcaacgaagcagcgcctccgccactggcgaagaaagaatgggcaattctcaatgcaattagtctctaagtgtagcccagctgcataaatcgtggataccaggtcacctaatcgacgccatgcttgatagcctaacagcggtcagtaaatcgataggacatgagatcctacagaaaggtaaagccttactggaatcaccatattgttgtgttcgcaacatagcatcattgaattgcaacattgccagcaattcgtttgcagacgatgtttggtcacagaaaccaaggcataccgtacttatcacagtcacctgctctagtaaccggtctttcgctcgaggctcatccgagccccgcgtaatgtcagggtcattgtctggcgtaatggccaattgcattccgcaaagagcgaagatagacccgagtgcctcccagcggaggttgcgaccggtaaaagaggaacagtactcttcgactgacatagacttgtgagtccgcatcgggcgggaggtattttgaaatatttgattcgccaaatcttgtagttgtgccgtcggatcactggagaacccgtcaaatatatcgcgcactgaacgcagaagttcgtctattacgatcttaggcacgacggtgttgttccatgtccgaccatagaaccgagcaatcagcatatcacacacagtgagattatacaaaaaccgcagtacatcaaccccggattgaagtcgatcgggttccactatcaaccccgcagaggaatctgtgctctcttcgggctcgaacgaaatctcactgcgatgctcagtcaaaaccgcagagtagcttgtcgatcccagatatccaggaagagctgcgggtggctccaatggcgtgaagaagcgcccattacccagtgagcccgagcctgggctagaagcactgtttctacatattagtatgggcctatcatccgttgcaggagatgcttactttgaagttggttgactggtcagtcgactagaaactatcgcaggattgactgaatcggaaggtctccgtctagtcatcggggctggatgataaaagcatttgtcgctgattctttttgcggtgcatcggcgacaaaccggccggtcatggtcacatcgctgtttggatctccgacagggttcacacgactgcaaggtgccgtttttgcgcgttgcgggcgatgcagagcgccgatcgtcgtttctcatggctcgagaaacaacgcatagaggtatatatgatcgatgaaagaaagacctcgggaaatatgatacccgcgatgtttgcctcgtccaaattaggtttagcgtgccacatctaggaggtcaaagtataagaaacgagaaggtcagtacaattcaatatggaagcttgcagatatatatatttttattggggctgcatgtttcgcggagggttatattaatcactggaactggaacccttcttggcacgatataggaccttcactgacggcctgcaagttccttcctcaaaaaatcgtctattatctatatgtcccaaggctttctgttttcctcgttcgtagactggagatgataagttacttgactgagacgtcgaactgtacaatcagacttatcctaactttcacttgagcccattatgcttcaaagctataaatgagtattggaagtagaaaagtcgaagagtttcaatattaagacttgctgaagattcataagctgaagtaactacctatgagttatctagataaaatctaaccaatctaaccaatctaatccccggtcaaccacttatgcagcgtggaggtaaatcttcttgtttcgatataagacatgagtcaacaatagccccaatctcggaattgtcggcaggccaatttccgctcaagagttgaaaatactcgaagtacatgtttattctgctttcggcacatgctgctcagccccatctgttgacaacggcttagtttccttctctagctccgagcccacagatgattgaacgtcatctgtggctagctggtggtcgagccgagctttttcctcatctgtggcgccggtgaggtcaaaagcaacctcctcgccgaaatttttggcgatttcctctagggtgagaccagcagtctcggggaagaagaagtagatgactgcagtttttgttagcgaaattttagttgacgggtcgatttgatattattgggaacacataccgggaatgaagaatgcagaccagcaaataatgacaagataatatttccagccgacattcccgaagcccatgggggcagtttgcaggaggatgagggtggctaagtatgtcagttagaatttggaggcgaaattgtaacgaaatacttaccagcaaattgaccgaagagagaaaagcccatgccaattggtcggatttcagtcgggaagatctcggagacatagaggtacatggtggtatcacagaaagtactgcaggaatgtcagctcgatatattcagcggacttgatatgttgaagtttgactcacccctggaaggccagataaaggtacatgaagaatataccaaatccatttccgaccttgtttgttgtaccagcatactgggcggtcatagcagccagacaggatgtagatacgataatgccgacaaagccagtcatgtacatgccgcgccgggagttaattttatcatggagccaggcgcccagaggattgtagatgacacctgaactaggttagctaacggtgtacacagtagaccctggatgtttatgctcaccagctgttgtcagccagacagcactcaagagcaggggcatgccaccctccatgcccaagtttttgtatagaagaacagcgtaattgttctggccgttgtcagtcggatatacttctctgtcggatattaccacacttacgatgatcaaaggcccgccaaattcagcgccccattgggcaaggaaaccgatagccattcgctttcggtatgttttccttgtaaagacagctttccacacgctgccgtaagtagctaatctctcagcctcgagtcggatttgctcttttgtctggaagaactcttccttggcagccaagttattcgggtcatctggtgattcacggagccgttcgagaacatgctgcgcctcatcgagcttaccctttgaaatcaaccaacgaggtgaacgggggagccaaggagatcccagaagcagcaccaacgcgggcagacattgcaaggcgagagggaatctccagccaaacccagacagggggcctgttgcatagtagcaggcataccccacccatcccgaaagcatgtatccgaagaccaagaaaatggcgtggtgaccgacaagccagccacggcgcagagcactcgacatctcggaaagatacatagggcagacggttacgaggataccgattccaagaccacaaatgaagcgaccagcttggaacatactaaatcttgtcagcgccagtctaaccctcgagcaggagaagcgacatacgctagtgaattcgagccggcttgaagtgctcctccaaatagagaaaagaaggcaccgaactggatgtttgcctttcggccaaagaaatcacacgaccacattataaaaagtgtaccaacagcaccaccagcactgaaaacaccatttgctgtcgagatcgcgggggtagtgattgtcgcgtatcccggttcaccctcggcgggcaggctgaagtaggcataccatcccggctggccgattgtactggagataatcgaagagcaatatccatatgtctatttgtgtcagtttagtgaatagcagagacttgaacatatctgcgagctcaccattgacccaacagccacaaaaacaataaccagcctgttataggaactggtctgagacccgaacctacccatgatagaatgttgtagtccttacaaatttcaaagaatcaagggtgtataatgaaggatatcagcatcaggtttgaatggggagaaatttcagcatgtttgtagccgacaataagtaggggggccccgttggggtgctctgtgtatggcccaccgagagttgcataaagttcgcaagaaatacaagtggcttgccgatcacggcacaaagacttttgagcctagaccctgaaattgcgtatggtcaacataccaagttaagcaacgctcgtttgtcgagtgaagttcgtttccagcatgctataccaagtacagagtacgatgtacatacatacaccctgtgagagtagtatgttgtacagaatactccgcgggggtccaattgcggagccattagagtgcggatcccgttccgaggctattgagaccttacatctccacaacggaggtgctccgtacgatgtcagggaaaagatccttgcggtccgtgctagtgtcatgcacgaagttccatttagaaaaagaacacgacatcccgggctctataaagtatactttttgttcccaactttgaatcgcagaaaccacaatagaacagcagaacagcagaacaatggcccgatctccatttgacaccccgtttgatcaactcccgaatccaaagcaggtttggctaggaaagccaggtagctatgaagagggtctagggaaattagccatccttacccctgaagtcgtcgccgcggcttccgctagcgagataagatgtggtcgacgcgtcacaatgggatgggaaatgacgaagttggattatcctaatctcaaccgtcagccatgtcaccatcagattgtgcctcttctgggaggtgtggcattcgatgacatctatactatgaacccacgtgagttgagagtgattctgcttttctcccttcattatattgactgtttgacagagcaaagtagccagtgggacggtctgcgccatttttcccagacagtacctggtcagtctgaacgtctgttctacggtggaacgactagtgaggaaatcaatgatcgccaaaatgatcgaattggtcttcagcattgggctaaagagggtattgcaggtacgcatccccttcacatgaatacacgactcccctgatatgaactcacacaattgcaataggacgtggagtcttgatcgactacgccacatgggccgagaaaaaggggattaagtacaccacattctcgacccaccaagtgcgctttgccgatatccttgaaattgccaaggagaataagatcacgtttcaaaggggtgatattctgttcgtccgtgtaggagtgaccaaggagtgggacacgtccatgacagacgcccaaaaacaagcttactcggacaaccccagcccggagcatgctggggttgaagcgaccacagaggtccttcgctggctgtgggacactggattcgccgccatcgccagtgatgcaatcagttgggaggtgagcgataagaaagatagaccacaaattcccctcgatatgtggcaagccgatcaagaaactcaactgacagatccacaggtctacccaccacaatcccctgacatattcctccatgaatatgtgcttgctggatggggaatgccgatcggtaagtcgccgggacgttttacccgagttccgcaggtccattatgtatattgactcataaccaacaggggaactattcgatcttgaggcgctggcacggacctgccaggaactccaacggtggagctttttcgtggcatctgtacctttgaacatgcccggtggggtttcctcgcctccgaatgtgatggctattttctaggtccaacttgtctgcggagtacgatgtatatgtacaatatatggagtggtttgtcacatagtcaatcaagcatccggtagtcattgcgggtacctgggtaggattccctatataaaccctattgactggccggctcgtgtggtaccgcaccgttggaagtgtcaaaatttcatgctcgctcagagtgtacaaagtacgagggcaactcgggcgcgatcaaccgtcatggaaacgttgtacattatgttctagactgttcgccgaaggctcgaggccgaacggaccagcggaaaaggatctacgatggacacatcgacacggcaacaaaataatgatacgcggtagagtttcctaatagagataaaatagagagcacaacgtacggagtagtccgtacactttttgcctcgtatttttgatttccgttttcttttgggggccagggtaacttatccaaatctccaccatctgtagcggacggaccctgcgatccacaacctatacaggttccactttaattgacgaacctgcgtcttcaaaacatgccgtcgtgggtcaaaagtgacctctggaaatcatgctgtgcgcaaccacggttgatggagccgttcgggcccacttcccgtatagactaactcaattgcaagcccagaaattgtaattacaacgtgaatgccaatatgatcaagagactatgcaagcgtttgtatgcatatacatatgtattgcttgtgctgagctgctacaagcattttattggcttgatctgggcagttcatgccaggaatatatgtatgtaggtcgagttccaggtcatgtacaattacgatttgtcatttaaatgacagcatgaaagcttgaatgcacgtaaccgtgtatttgtgtgcaccgtgcaccagggtgtacatactacacactgtaggtacaatgtatccaacgtatgatcgtagtgccaaagcaagacagcagaaaaaaaaaacattttattatttacagaccttaggcatgaataagtgatcaatcctgttgtatttgtgagtagataatagagttctgctggttcttctgtttgaaacgagccgatcataggtgatcaatagcccgatttcaacaatgcagcttcgtaaaagcatgtcagtttaaaatttcaatcagggatgtctgaaccctattttctggcccttctattttctagcttcttggctgatattgcttaaaagatggggatgtcttgcgcctggccccgttactggttctaaacttacagcaatccgtgatgtcccccatgccgttgctggaacgaggctctgacaatgcgtccattgatcggagtgtgcagaactggaactacgcctgccagtcattatgtatcattggcatgatggtcttcttcggtctgcgtgtttatactcggttgttcattctcagtggattcgggaagcaggattgtgagtgaaatttttggatggaagcgtacggaacaggtaaatgctgacagcctcaatagggatatgcacagctgcctgggtaagactcctacatacatggaaagagggcaacttaggctaacagaatatctcgaacagttcctcggcatctgttactcaatcattgcactcctcagtatgtctctagtaccacaggtgacaggctatatctaacgcaaggacagtgggtcattacggaggaggcttacactggacggatgtccccgaggagaacaagattcctttccaaaaggtatacaaagcacacgaatgatgattatccagacttctgactctctagactatatacgcaacaatggtcatgtatggaccaacagcctatctcacaaaattgtgtctcctctggatcatgattcgtgtattcagtcccttccggaaatgcgtcatgtttattaaggtctttatgggaatcatgttggcctactacatcccggctgtcagcgtcaaaatccgaatctgcaaccccatcgccaaattctgggaccagagtattgacggcacatgtttcgaccaaacatcgatcattttggctgatgtcgtcgtcagtgtggtcagtgatttgatcattctcatcttgccattaccattaactttgactctgcaaatttctacaaagagaaagatgcgggttatgggtattttgggagcgggcggcctggctgttgcagccagtatcatccggttggcacttattgtcgttaccggacagtcgaaggatctttctcgtacgtttatgagaatcaatatgctagggtacgttttctcagcctatctttttgacgatgcattctaactgcgaaattcttttcagtaatgcggaagtctccatcggcgttatctgtacctgtctcccttctctctcggctctcataattcgaatctaccacgaatattccagcaacaaagtaacgctcgagtccgactacaaaatgagcgcgatacgaaaccggggtacaatggatcgaagcaagaatcaaatgagtgctgtaacgacaggctcggacgaggaggtactcatgcacaatgcacaggcaaatccgaagttcgagacaatcatccacggcaatagtgagaaaggaggtccgccgaaatcgacattcagtggcataggagtgacccgatctgttgatgtgtcaacctccgtggagcctcggtgattctgagtgatacaaagaacgatgtcaatctcgttttagacgataaaccctgcaaactatgacgctgggtcgatacatcctttatatatttaatgatatatctcattttcctttgtgattaatatacggttcttgctgggaagaagccgagtcctgcattatgcctttcgccgtcggtccgatgcagatccaatcaaagagcccagaatcaactaggggactggcctagatatgcagactgccgtaaggagtagaataattcgaactcgttgaccggcatggtccagaaccccctgaattcacctgtcccatatcccatcagtgatagccccctctgattctatggcatcaatatcacaggtccttgcactacattcatatatatctatacatctttcctgttagttaggtatctatagaacaagaacactatgacaggtactacacgggctttgggaatactgcatacgtacctttgcttatgtcggtacccgtggacatatagaaccctcaatgtcctcaattgtataagaaagagataacagatgtacaaaccatggctagaatttctctttaaacatacatttcacttcattcgaagctatttcacgcaatgtaatgatacctctgggagtcttcttgagacatggattaattgcaccacgtcatgactccagtctccaccctcaaacatctagatatttattttgtacacaatcaatccttctgctcatctctccattagatgtatatactcaaaatgcctccctccgtgtctttctctcatcttccagtcgaagtcatctacttaattgttgatctcctcgagccagcacgttacctcaactcgttggcgcagacatgttcgcggctatatctgctcttgaccccaatgctctatcaaaacagcactcgttcatcacacgggttccccattgtatgggcagcacagcatagctccgaagggaccattcgccaagcatttgacgctggagcttccacatattcatgtcattacaactttcaacaatcgctcgtcgcggcagtgaacaacaaccatgagaccatcgtccgactgatactggaacaaaatgaagaccctagtatattcacagaaaagcagagctgcaagctgtgcaaaggccagaaatccgaggccgccgcctcaaaagttctcaatccactatatgcggcggcagtgcgtggcaacgtggccattgtcaggctcctgcttgcctataagatcactttcgaacatggttgcggagaacgtactccgatatgctccgatatcgtatttgcggcagtaaacagcggacacctagccgttatgcaagttctcatcgaggctggctacgcctgggacgacaaaagaagaagataccaggataagacaccactcactgttgcagtcaatcagggtgatgcaagaatggttgaatacttgctggacaaaggggccaaaccctcgcgtgatgataagccacttcttgagtctgccgcggaaaatggacaccttgaaacggtcaaattgctcctggaacgcggagcagagcctcaaggaagcgctctttcctgcgcggctggcaatggccatgtggaggtcgtggaagtgctcttagaccatggggcggatcccgatcctgatatggttcgagattgtctgagtacactctactatgtagctgtaagtggtcagctacaaatccttgatcttctgttggcacgtggggtgaacatataccccaaggacccaaaggaaaaacgctacttgttatcatccataatcgaagatgaactctggcgatcagttgagaggcagaagcggtctgctttcgctgtttcctttcgagccctcgccgattttgagaacatgatagaccacggagatgacctagcacaagctgagattctgtacatagctattggctatgggtgggatgatattgtgcagcgtgttctggagcagagcttttccgcagatggaatatatcagcactgtaagctccggtataacaggcctatactccaagccattcagaacggtgatattggaattaccagactcttggttgagcatggtgccaatatacaggagtaccagggagaaagcaaggatgaaggcgcgctatccttggcaatccaattgggcaatgtaaaaattgcagagcttttgatcgaccacggggctgatgtaaattgcataagcagccgcggagaaactgctttggcagaggcgacggcattggcgtccgaagacatatttcgcatgttgcttgatcgaggagctgatcctaaaatacctttactatccggtcgccaatctttgatagtgactgcaccatattctccagccactgacagtagaattaatgctacagccattcttgatatgctcttagcccatggtgctgatatcgatgaacggcggcttcctagcattacacccttatatcgggtcatcttggatgtcaactccggaaatcagcaggtgcgactcttgctggagagaggcgcagatcccttcgcggtgcatgcttgctatcgcgcactcgttacagaggcaagcgatgacaatttcaactcaatactcagggtcaaacggtcaatgcctagtcccgatacctggcgtcccaaaaaaacgtttatatttgtgccgaatatgagcgaactgaaagatgacccattccttgcatgcatgagacggggcgataaagcgatgcttgaggccatgcttgacgcgattgatcggaaaggacttcccttggaggagttgaaggatagacttgatcgagctcggatggaagcgactgagagtgggaacctgcaccttctacccattctgcaggattattactgggtaaaaaatatccacgcaagtagctgaagatttcaaaatgacaggatgttatttgctaataaattggcttgaatgatgctgtaaacacccgctcaaaggtatattggaagaagtgctctatgcgcaatgggaaacaggcacggtcaaaatcaagagatcttcaagagatcttttcgatcctcttccttgcaatatccatcttggatttcaatctagacacctcgttagtaaagcagatcaaatcaagtggaaaacgtgagcaaaggacatagatgtaaacgaacatatcagactcctcatccgccaacctcagcagatcattctgcacctcgagctcctcattaatctgcgtgccgagttccctctgtcgaataatgatctttctcaactcatccacattatcatcctggctctgcataatctgcctctgcaactgcagcacaccatcgttgtcaagttctcgagttcgctccgtctctttgccaaggaccctacccgcccgagccggcgtcctacgcccactagacgcatctccagcggcattcccagcattcatcaaagctcctttatcttgaatggatgcgacagtatgatcaagccggctcttcgttgccatagcatgcaagagatcctccaagccgtctttttccttgcgcgcattgatgagcaggtcttttcgtcggcgtatctcgcccccaccaagactggacgatgtttgtgcctcggacatcttatctccgcgtccaagatgcttcagtccatcgtccagagtggtgatcatggtccctgcacggacaagactgcccttcgcctgtgcagagctctcatgttgcttctgtggcgttgtttcctggtctctgcgagatagctgtagtcgtgcatcgtggaggtggttcttcatgtcgcggtagtagtcgagccatagcgtcgggtccgtaatggatgcatttgtagcggctgggtctgtgatagcggtgtggagtcgggtggaggtggtggttgagccgttgcccgttgatgcgattgcggtgggaagattgaggaatgcacgccatgcgggcgaggtgcgccagcgcccatcgtcggactcgttaatcgcgcgaaggtatgcctctagcccgcggcgacggtcttcgcacaatcgttcattcgagacggttttcgaaaaccaggttttcgaaggcagaggagctggtggaggggcattcgtttgggagatgagggtgctatggaaggtcgagaagtccgagtagcgtttgggaaccgtgaaggagcggagtgggaggcggagggtgatgtggtagacggtgtacggcggggaagtatttgagagggtagtattcgggatcgctatctcaacggtaggcgccattttgattagaattggaatgaaaatgtcattgttctcaaaagtcggggtgtgagatagaatggatgtcgagcttggagtccgggcggtcataaggatgacctcctcttactccattgccacctgattcacagttgggtcggaatattcatacaagaatcttcagaccttccttggcttttaagaatagtcggccatgtttacagcctttttatcttaagaataacatgatcaagttaggttactggtggttagctgaaatccgccgaggcctagtatctcgtcgtcggttgaaattcgcaacgatcaggcactacgtatagaacacaaggcattggcacgttgtaacacgaaattaatattaagtaacattgggtatctcatacatgcaagtcaaatccatctattcccagatctctcgttcctccaaaagatcccgctggccaaagaactcaccaaccaccataatgatcatatcgagcacggcatgagtctgtatcgaccaatcgtcgtcttcttcttcttcttcttcttcttcttcccagctaccaggcgtctcgacagagtcggaattggtctgcagggaatcgttctgcagccgagctcgcaagcgcgccttggctgcttccaagtcggattcttcaagcgataatgcgtcagtctccggcaatttcgcttgcttacttcccgcttcatttggaactggaggctcacgctgagccttttccttgttctcctcgccttgaaatgtaggttccggttgagtttcctgcttggtcgcttcctcattctggactgtagatctctgctgagcttctgccttggtatctttctcatcctcgacgagatcaccctgttgggttttgtcctttgctgggcctgccacagaataatcggcctcctcctcataatcctcgttctctaactcttgcaccttgcgcaagatagtcgcagctcgtttgcccagatttcgaataacacccacctctcgggtagaaagttgtccaacctcacggcaccttcccaataggccccaagcccaagccccaatgcgccgtacgcgctgagtgtcgtcgccgcgcacaacatcagacatcatccgcgctagtatttccagtacttctaacacgctgtccatgtccatgcttgccagttggaccatacgtggttcgactgtgaccaaaagccggcgccatgttttgtgcgcagatccggcctttcggggcagactgatagggtggtcattgtcgagggtattgatagcactggcaggtggactgcattttagggtcgatcgcaagaggaggaatcgatgtcgcagaagattgttgtaggaattttgcgcttcaggatagagctcatcgagctttgaaggggaatttgcggcgttgtttgtgttctcctccacaggcgcaatgtaggcttcgtcctcgtaaaagcctggtagtagatgagggtcattcggttcaactagcgtcaaatctggttgcatatttgatgctacttttgaagggtctgtggtcggagtaggtgcagagaaaagtatcggtagtgagtttgcttcgaatctatcgagcaaaaattagttcaaacttgaatcacgacggacaagcctcgacatcattcaggcaaagcaaaagctatatagatgcaggatcaggcataccgaaccacgcgtaagtattccaatccatcgtccgggtcgttggagagtaggtcatcgcctccatcgtccaaccccgggaatgcgttcttctggccataaaggggattatgacggggatgctcataagatgccaccgaagcttcgtcgtgttcatcattttcataagttatccgaggacgtttcaacgaaggggccgacatggtgtcttttctcttgtcgggcagagtgaggtgaagatggtaggtcctgtaggatcgaaggagcttgggccaatctgcagaccggcttgaagctcttgtaacgaatatagacttgaccacctatttcctgaataagataagagactcatacgataatgaatttgtattcggcagttcctgacaatatttccagctttattctgctcattatcttactgctatcataatcctagtgaaatttgtatacaaccgagcccaaggcggtgtacaataattgcttatcgaaggcggggacctggatctgccggtaaaaaagataaggatcgtcatcggactatcttcacatctccaattatttgtgtctcaatccaccccatgtcttttttatctttccttggaactttttcccttctacttccatgctaaatcaattaataatcccacttcacttgagatgacctgtgtctttgcttctctcggaagcggttcggtctctctgttgcctcttcctcgccatcttcatccttaattgttacgaaacgccacacataatattttcgacacacggattcttcacgatatcaatttgaaaccttcttgtttgttctacttgtaaaatgctaaggcgggtcgactccatcgaagtcatgacttctccccaatgtgtttacctccctacagaggtcttaatacacatcgccaaattcatttttgatggttggaaaaataatgccgaccccccaagttatcaagtcacgcttcaaaggttttgttcggtctctcgccagtggtactctgctggcatcgaatttctctactaccgacctcaacttgacgaaggaaatagcttcttgcttttcaccaacactgtgtgcccatcgattcgctcccgaggacgaagaaaagtagacttgggttcgctagttcatgtcctgaacctcggatcattggtccaccacagctcgaatagcctaacggcacggcttctaggtcgagtgaagaagaacctgaggacttttgttgctccgaggatctctttttcgtaagtaaataatggctatcacaacataatatccaacctcaagctaattcctctccacaggatcaacagccttgcacccttagcaaaatgcaaggagctctgctatctttctctccacttagtagctgagccaatcgcgcttcctgcgatcaagaaagccattagcaatatcgacaaattgcaatcccttgagctttcatctacaactctcatcacagacgatagttccactgaagattggccgcccaatctaagatacctccaggttggcgggcaatttgttacagatagaatgtattcgttcaaatggcctcccaacttggtatcgttgacattatgtggttgtgatagtctaaacactcccatcttggaagatattctcatcaatgagcagctccgtaccacacttacgcagttgatcattcacagtgccaatagcgagatgttcaaggagggaccatctgggatcttacgcgcactcatggctttagagtctcttcgaatacccattgatctgctttacgaatttctcattcttcctgcattcgactcaagggattctccattgtcaattcgtggactggagctcacggcaccatataacgagaacttttctacagtcattgatcccgatgatatttgcaaggccctgaaaatgaatctctctcgattgtgcgctcttggtatcagcgctagctgtcttggaataatacccgaagcatcacatgccaaaatcgacaagtgtttgtggaagaatattgataagtgtcctgaggaagagcttgattctctttttgacttgggtctctatgtcatggctgagccaatgtgctaaagattcattcatacattcttatgaagtcttatatatatatgcctctctctgtatattagccgttgatgggtcatgctactgccccggcagctatctttctagcaatgtacaatagcacaacctataaaacagattgaagcgagagtactagttggacttgagaggatacatttcaaggagaataatgatgcaccgacagcgaaaatgctggctaatctgtgattgtttggttattctccctatttgattcaaataccatggtccttttctctaaagcctcgaatcaaaagcgagtgtaaaagtttgagagtggggaaatggaagttcggagggaaagatctggccggcacggtcccgggggaacctggaaatgacgtacatttccttttgtacacatttcccaggatcacgaccacaatgagatcgcaaaccctttggcggtcatttggcctattgcagcgtcaatccctctctactcataaaactgtcacccgccgagctatccaaacagctagttctcgaccgatccctaacttcgcatttgcatttgagtgagtcttgaccggcgaacacaattcactcgattttcttctcacatgctacagcattgatggcgtcctcctccgcgcatcgaaacctttgcccggtgccgccgactcgcttgctctcctgaagaaacaaggaatcccctttcttctgctcaccaacggcggcggtaaacacgagacggagcgtgtcgcggaaatcagcgagaaactaggaataccactggatgctacggacattgtgcagagtcactcaccctttgctgagctggtcaagggaccggacgagtcgagcgccctggaacacaagtgtgtgttagtggccggaggcgatggggataactgccggcgcgtggcagaacggtatatcaaggaccccttcctattgctgaatgatatatgctaattaatagtaataggtacggcttcaagaatgttgtaactccggcggatattcttatggcaaaccccgctgtctgtccgttttcgatgaacttcagcgaatattataaaacatttgcccgaccgctcccgcaccccgttgatttcaatgatgcgtcgaagactttgaagatcgatgctgtctttgtgttcaatgatcctcgtgattgggcgttggacacccaggttattatggacctcctcctctcatcgcaaggccgtctaggcactttgtctgaaaagaacggacgaatcgatcttcccaatcatgggtaccagcaggatggccagccccatctatacttttctaatccagatttgtggtgggccgccgcctaccccttgccccgtcttggtcagggcggattccgggaagcgcttgagggcgtctgggctgcggctacaggtggccccagcaagggtattgagttgaagaagaccgtgatcggcaaaccttatcaacccacctaccagttcgcagagcgtcaattgcttcggaaccggctgagaacatttggaagctctgctgaaagcacgcccctggaaagagtatatatggtcggtgataatccagagtcagatatccgaggagccaactcctatcgcagtgaaattggcagtagctggcactcgatccttgtccgcactggggtataccgtggcggagagcctgcttggatccctgagacaattgctgacaatgtacaaaaaggtgttcaatgggcactgaagaactcgaactggcctgctgcgtgattatcaagggacgctggatactctacattgatatgaagatcggcatcaacatggcgccaatctatgtttatatgtgtttgttccaaatagctaccagcaccaatccacataattacctctgaagcattttttcaacctatcatgtaataaaaaaatgtagatacaactgattaacacgcatggatgtactccgtacatatacagtcaaggtagatctgcctaagtctccacaccgcctacccctcttagggcttgatcattcggcggggtgagtcgacgaaacagttttctccgcagctctacttacaatcagcctgctgcattaactcctgcaaatttctcaggatagaaaatcattaacgtaggatccaacatacctgacctaacactttgctccctctaattgtctttgcagcaccatggccgactccgaattgccccaccgtcccaagcccgaggcccaggatgcctccgctcccgccgcggaaggtgagaccaagaacgcaagcaagaacgcactgaagaaggccgcaaaggataaggccaaggcagagaaggctgcggcgcgtgcagcgcaagaaaaggcccaggccgccgcccaggaggccaacgacacggccaaggatctatacggccctctcccagaggccgagaacgccatcccgtctacacgattcagcgaactctcagaggaacactacgagaaggaggtgacagttgtggcgcgtgtggacaatgcgcgtgtgcagagtgctaagcttgcattcttgatgctgcgccagcagggacaaaaagtgcaggccgtcattgcggccgcggagcccatctcgcgacagatgatcaagtacaccgggggcctgaacgtcaactcgattgtgcagatcaccggtattgtgaagaagcccgagattccgatctcgtctgcgtccattagccacctcgagatccacattcgcaaggtctatatgatctccgaggctgcgcagatgctccctatgcaagtcaaggatgctgagcgcccgcccccagagagcattgatgaaggtgctcaggttgatgccgagggtgctcccatcgtcaccctcaagactcgccttgataaccgggtcctcgatctgcagactgaaaccagccaggccatcacctggatttccagcggtgtctcccagctatttgctgagtacatgattaagagtggctcccggtggatctccacacctaagctggttggtgccgccacagaaggtggcagcggtgtcttcgaggtgaagtacttcaagcgcaatgcctacttggcgcagagcccccagctatacaagcagatgtgtatcgccggtgatatggagaacgtattcgagatcgcccccgtattccgtgccgaggacagcaacacccaccgccacttgactgaggtatgacctactgatatattttcccgaacaggaaaaaaagaaacagattattctgacatgacttacagttctccggtctcgatttcgagaagaccttccgcggccactaccacgaggttctggagttcgctgaagacctccttgtcttcatcctcacccagctcaaggagcgctacgcaacccagatcgccaccatccaaaagtcctaccccaaggccggcgacttcaagcttcccaaggacggtaaggcgctgcgcttgaactacatggacggtgttgcgctactgaaggaagccggtgtcgacgtctcagagcaagaacgcttcgagaacgacttctctaccgcgatggagaagcagctcggccaaatcatccgcgagaagtacgacaccgacttctacgtgctcgacaagttccccatggctgtccgtcccttctacaccaaggccgatcccgacgacaagcgcttctctaactcgtacgacttcttcatgcgtggcgaggagatcatgtctggtgcccagcgtatcaacgatatcaaggagttggaggagtctatgcgctctaagggtctcgagcctaaccaggagggcttcgaggattacctcaatgctttccgccagggttgcccccctcacgctggcggtggtcttggtctaaaccgtattgttatgttcttccttggcttgcctaacgtccgtttggcttcgctgttcccccgtgaccctcagcgtctgcgtccttgattttgcactgtgtggaattatctcatggcattacaagaagcatataaaaacaaaatcttttagctgtctttcaaacattcatacttttattttggtcgtaatatctgtggctaatttaaacaaacaattttgacccttgtctactcttaacttaaccaacggacaaggcagtgttaagaatcaagctcgcgattatacactaatgactgctacactgtgagaaacatcaagtgtatgcatgaatatgatatgatatttggatgaaaagttgcattgacaagttttgaggggtggacgacgcaatctaacgaaccaagacacatgaaaaagacacacgctcttgtccccccaaccaggattaagcacgtaacgacaaaaagaaagggagagaaagggattaagacacagaagcaatcacagcggcggcgacgccctcttcttctgcccgaacggtgatcttggtagtcacaccggccttgctggagtaggccatcttgatgagagcagcgacgcggccaccagagacggtcttgccgaacagcttgagagtgtgtgtgctgctgttgagggccacgtcggtaccctctagaggttgcagagatagcgctgagatcagttgttccgtggcatctgggatcaaaagcgtgagtatttataacatagagcaataaataggacttgtacataccgttgatacccttcatgttgctgagctgcagagtttcgctttcctcctcgccattggcgccagtctgctcccagacgtggtcgaagctgccggcgaatgtcgggatgacatagtcactgcctgtcagctcgaggtcctccacctggtactcgtcgtcgtagccactgtcctccggctcgccgcttacgggatcgatttctttgctagtgaacttgaggatgtttgtgaaggaggtaacggggacgctgttctcgccggtgagcttcttgaaagcaacgtagacaacaccaggctggtctgtgggcagcttgggggcaggaatgataaagtcttcctccaatacgtcctcttcttctggcgtggcaaccacggtgacattctcaagaatagtatccggaagcgtgttcttgatatcatattgtaccacgatgtgttccttgaaaatgtgcttgacggccgtaacaacgtattcggtttcgctctcggaaagctcgacaggcgcggaggacttgagcaaaataccgtaagccttgatatcggggtactgcagaagttgctctgcgtatttctgggtggcagaggcgctggctgcttcggccataccgccggctgccttgcccttcgggggaccggtcgaaggcgccttgagagtgggagtagctgaggtaagcttcttggtcctctcctcggccagcgcctgctcgtgtgagacaaccggaatggtggcaacatcgaaggcagtagcgaatgtccccttgtcaccagacgtcacatacatgacgagctggtgttcaaacgtggaaagggaatacattgagtctataaccattagtaaaattaccattgctagtcatggacaagaccttaccgttcttaatgaaggcgctcgccgactcatcgtcttcactcatcagacgcaggttaagcgcagcacggtctcgcacctcgtcgtcggtatcatcaagacaacgggtgaggagaacatggacactagacttgacttcggggtctttctggccaacaccaaatttggccaatgcggtgacagcagcggcgcgtacgatggcattctccaatacgacgcggttgtagatgtagcggatatactttgtaggatgggtagtcttagggccctcggaaccaagcaggtgcaggattctaaccgaaagcttggtgaactcgcaatcctcaatgaactcacagaggtgagcaagcgcatcttccttgctttccgggacaaatttgatcaaatcaaacatgctctcaacaacagtgcgcttgaactcgtatccgccctcgtcccgcaggataccactcaggaaaacgagcataccggcctgcttgctagggaacttcaaacacaaagtgcgaatagcttcgacaatagtgaccttgaactcgtcggtgatatcagccataaagcccgagatttgcttcatcaaacggtcaacgctggcttcgttgccagtcttgagcagtgtcgtaatggcgaacgttgcgattgaacggttcgagttagagataagggactcgatatcagggttgcagacattgacgacgtgtggcttgaaagaggcgaagttgtgtaggatacggattgcagcgaacttggtgattgaccggggggaggacaggaagagctggagaacatgaactgcctgcgttgcctcggcatcggtgacatcgcgcatatcgcaaatagccttggccgcctcaaagttgaccatctcatgcttgtggcggagccagccatccaacatctgcatcatgggtttccggagaccttggtcctcctcggccaatttggccgccagacgtaccaacaaaaccagagcagccgggctcttcaccacacctgcagcgccgtactgttgtaccattttgaccaaagacatgcgatcgtgcgagcgcatctggtacaaaagaccgatggcgtggtactgtgtcatgaaattcgagttcgagatagcatggctctgtgagcctgagaaaccaaggaacccggtcgatgatttcgatgacgaggccgcttcctgtgtttcgctctgccacctccggacaacgtcgcgcgcaatggggaggagatggtaggaagagaccaaggccgcggaggacaccgagggggtcttgtcaacaatggcggtcttgataagtcgctcgataccctgtactgtggaacccttttgcaattgtcagcaaatcccctcaaccattgaagtcctcgcgaccgacgacctacatcgataatgcggcagagcgctctgatggcattggcccggtacaagacatcgcttcccaccgcagtgtccttcataatgatacttgtcgacatgatcacatcttcggcggtgccagctagctccttcaaaatcaggtacaccatctgccgcaatgacgggtctttgttctggaagagcttggagattccgaagaagagagtggtggcttcattcgtagggaactgctccccggtgaacatgaggacagcgatcttggtgagtaacgttcggcatgttcgcggcgagataggagaggaattgaataggcgtgctaggagagttatctcgttagcattgaatatgtgcagcgcatgtaggcgccagggggtattgttcattacacaccatcttggaaaacggaggtccgatcaagcttgatcatgacctggtcctcatcttcgtttttcttcatgtaactcatattgcccagcagctggaattgcaccagcaatgagtggttgccgtcgtattagaaaggtggagttggtgcaattgggacacgggtcgagtacacagaagcagggtagggcggtgtaggtgactataacagttgcataaccacgcaggaattggaggcttaaagagggtaaatcggagaaacagacaaggatataatcggggtaaatgcggtggtagtgaatctcgaaccctcaaagctcagaagtgccagctattgacaagttgaaggtggccttccgtgtgtttggcccgaaccaaacactgcaaacaggtggcatcacgatccaaggcagcgcattcatcccctctaaaccccctcattccctttgtatttcgcttggatcgaatttaatctatacatctttgatcatttcaatccaatatgcaggttgaagttgaccctaaggaggataccgagtggtaagcatatttacttgcaatatacccccgctaccggcaaggtataacctgaaggcaatggctaacccgttgttgaatattgcataggaacgatatcctccgtcaacatggcattattcccgaaaagcccaaagaccccgaacctctgatccaagaggctctgatcgccgcacagcacagggcgcacgagaaccgactcgaggacaaggaccttgatgagctagacgcactggaggatgaggaagatgagacgtttctcgagacttaccggtaagctttgatgtaatagtaagtatacctaaaaaggttccctttgctcacggtaccaatcaaacaggcaaaagcgtctcgccgagctctccaccctccaacaaaccagcctgttcaaccaagtctacccacttcagaaagtcgattatgcccgcgaggtgacagaggcatccaacaatgctttcgtcttagtcaacctcacatcgatgggcgggaatgttgaatcgcgcgtgttgacggagctctggcggcagcttgctgccaaattcggcgatatcaagttttgtgagattcgtgccgacatgtgtattgaggggtatccagagaagaacacgcccacaatcctggtatataaggataccgagatcaagaagcagcttgtcacgctccagcagttgaagggaccccggaccaagatcgaaggtaagttacgttcaaggcaggagtgaaataagaattgtatactgatcaaatgcatagatattgagcgtttgctcgtggagatcggtgctttgaaggagagtgatgtccggctgaggaagcgtgatggagaggacgactacaagaaagacgatgatctgaacgttgaagattatgatgatgattgggattgatttccttgcgattgaaaatactgcaaatgttatgatttggcttgtgtgtatgtatattatgaacatatccaaaaatgatgacccccgttctacgtcgacaggagccaagagaatgataccttgttagccccgattggaattacctacatgtgtagacagtttcttgccatataggctgggttgcatgatggcgactatctagtaaatgtggatactcgaaaccatgcgaactatgtctgtagccacccattgcaatggaggtaaagaagccaaaattcaagtatatagcccagacgctgataaacgcaaccgaatcacgtatatactgaattaacaacgaattggatgacaaaatcgctgttcatcccatcaattccaacgccaaagaacatcaatcataaccgtatcagcggtacccggagaaaaaggataccgcatcaaatcaactcatcacgaccagcagccgcactttcctcaatagcccggcgcacctggctctctttaaaagcagggccctgtccgtcacactgcgacatacccttcaaacgctccgtgacatcaccgatatcaagttggccgcgctcaaacagttcatgtttctgaataaggtcccacgtagcacccgcatccagcagcttctcaccggtaatcggacacacggtgagacgatggtgcaggtttcgagacgtgccagggctgtctgccataaacgtggtatggaagtctgttggggagtacttcattgggcccgtaaccgttggttcaggattctcgtttgcgccgacatgtccgcggttggcctgttgtgatgtcgcgcgcaagatctcattctcggttgtgtaccgggccagctcgcgcttgaggcgctcgttgtcggcttgtaatgtgttggaggcttgttcgaggctatttactttgtcttcgaggtcgcggacgtgctgttccttgcgctcccggaatgcccgctgactgtgtaacgagtggaacctgttagtgtttgctttacggggatagatgtctctagacacgtgggttggatatgtcacatacgctgctcggttttgtgccttgcgcttgctttgtgcgggcgctgagtccttttcctcgctgctactcctccctaaagctgggtcggcgaattgagtttcatcgccgtcgaatgaggtggggcgtgtgtgctgagtgttggcggcatcgctggaagcagagtgcttgaccgagtctggcggtgaatgcggtggcgggacaaaggaggggtcggcagggaatggggggatatagccagggaagttttggtaattattctggtctattagcgacaagttcttgacggttaggggggaacaaagaacctaccacaggggcgaatgtatctggttgggcatggggttggtcgggggtaggcagcccgtagagcgagaagcccgagggctgtgatcggggatcatagaaagagtaatccattacagaatcgtagacagattccaaggtctcgagggcttgtcggaaagttaggaggtgagggtgggaaaacttttgaggaaaatctattatctgctcgagtttcatgtaccgggggggcgttccgttgtacgatgtacagaattcaatgttgtcatgacactcctataccatctcgattcaaggtatacttccaaggtctacatgtaacctctcgaatgtccatcgattccaagagtgctcggtgcatgggccaaactttcgatgatctcatcgttttttactctttttggaccgggaagtacggatgttggggcgatggcggtctggttgcgagttgaatagcacaattccagttgagatgggagtaagcaaattgaaagtgcagtgtagagaaagctaagagaaataacttgacacaaatcgacgcataccaccccggaagcgaccctaaccaatgtccgtcgccaaccacaccagtttcctgcagagcgggattgccctggaagccttctgtaacggtaatttctgcaatgtagcttgagcagaaatccagaaagcctgcagagcaatgctcccgaaagctttctctgtcccgaaccccctcttggccatattggaggccacacctcgtccccgttgagcgtcgatagttcacaaattaatcatcgccagataaacgcaagaaaaaaagcaagggaggatcgagggcagagaagaaacatgatgagtaaagaaaggggggtaagcaatgattggcagcgcatccgaagatgcattcaaggatctccattaccagcgattaaacaatccgacaagaaaatttgcgggctgaggccgtcgtttgcatctcccttagtcttgccctgtggtcattctgaccgaagatgccaggttgtaaagagaaaccaaagggcgaagacgtaagaataagccacaatatcagaagcgtttcgagatgtgtaatcggttgtcccgcagaacgggtacaagaatccgaaaagacagaaaaatagtcgataaagttttcgcaggctcagcacaagattgtccacccaattggcaaagctttcatggggcatagagcaggcgataaacagaagcgaatcgaaacggctgagatcgaaatctgatcgaaaacgggataggagggctgtcggggagtgcagaatgaatagagatccaagaagaaaaaaacaaagaaatatccgagaaggctgagtgcgacatggtccgctctaaggcgacatgagggtccccggtttcttagtagataagaatgtgaacagacaggaggcacatatgacacatagcctcactgtcgtgtaaacactattagtaccagtgctcctccggtcctgcgtccggcttcgaacggccaccggagggtccataacccaaagcagcacctttcgaggcagaacgtagcctaacgccgaagactatgcgattagtcagattcagaacataagggtcctccacgccagcgtcacgaaatgcaaatcactcaacgtaggagataagaaagaaggggttccctactcggaaccaggtttcatgtactcacatcctgtcactacctcccacggcacggttggtgtccggagtgtcgagggcgccgcgttcgacgaccttacgacgctggctggagatggcaccgggcttggtggcaccactagctccaatctggccagtagcaggcagagcctggcggcgctgctgatcctcggcatccttatccttcttggaagcgtccacgatcatggcagcgttcttctggtacttgtagacggtccagtcgaagacgtaatcgtactggaaggactcgcggacgaagaggtcgcggaaaatcttgcgcaagtaggagtaatcgggcttgtcatcaaagcgcagcgaacgggtgtagttcaggtaaatggcgaactcgttggggaaaccacggcagaggacctcggtaggggtggtcatcttcttttccatgatacggtcgtacttctgcttcttggtagcagccttcagaccttgccaggggagagaaccacggcagaagtagagcatgacataacccagagattccatgtcatcgcgtcgagactgctcgacaccgaggtgagtgttgatactggcataacgggcagttccagtaaggttcttgttctcacgatagggaatgtggaagtgagtcttggggtcacggtatttctttgcaagaccgaaatcaattacgttgacctgattgccacgcttaccgatacccattaggaagttgtcgggcttaatatcacggtggatgaaggacttggcgtggatgtattcgatgcgggaaatgagctgatcggcaagaagaagaacggtcttcagcgagaacttgcggttgcagaagttgaaaagatcctccaaactgggtcccagaagatcgatgaccatggcattgtaatcacattcggtaccgaaccaacgaacgaaggggataccgacaccaccggcgagcgacttgtagacacgggcttcatattcgagctgggggtgcttggccttaacgctctcgagcttgatagcaatctcctcaccggagatgatgttcgttcctagaaattatgagttgctatgaaggggtaaagcaatatctgttatatgcataccgagatagatatcaccgaaactgccactgccgatcttacggccaatgcggtacttgttaccgactcgcaaatcctggaggcaatgtcagtaaaactggtggtttggacatctcgttgacaatcagaaagtcatggtataatccgagcgtaattttctccagccactcgaggtatgactccgggtgaaaaagaaaggaaggaagaaatcgggtaacactgaccatggtcgtcatcttgaaccgatgggggcacagcgcttagccgtgaggaaggacttgaggctagaagattgagaattagtgttcaaatcctgttgacgaagtagaactgtatgcaaagctgatatcgatggagtatagaggggtgcaaaggaagtggagaggaagaaagaggtgtgaggcaaagaaacaaggaagtcaatgagaggggttgacacctaagcctcaggcaacttgagagggctgggccaggtcaacgaacacagcagaaacacaacacactttgtatatgatgcaatgaagtacatagggcaagggaatgtaacagaaaactgaaagtcaaaaaggcaaaaaggagaacgactcgatctaggcatacctgaagataacgggaccgaagctgtactgaggtcaagaataggagatgagccgggaaggtccggggggggggaatatcgagagaataaagaacaagggcaaagccttgaataaaacggagagatgatgctgagagccctgaagaaggagaagaaagaggagaggaggtgagtcggtgagaatttccttttggcggtttaatatgcaggggacggcagtcacgcccgaccgtggtatggtaagattggtattgggcatctatagacttttacgtacattttacagtcgccgtaggaattggtatagattcgtattaaatcatatcagatatcagaatgcatacagtcactatatctttcttgtcaaactccatactcacacaatccatggattacgtctcagctttggtgggtatgcaatccctcaactgaccggtaggtggtcaatgagacctgtgcggacaacaggcatcaagcctataaccatgcgctcatcatcggagtgatacccaatctaagatgtgtacgcttctcatttgaatcatatacaatcatattgctcctcgcgagacatgatatccgcagtggtcttgcttatgcatgatcatcaatcaacaataccagatatcatactccttagtatgcgcgattttcctcaatgggaaagtagtttcagtctattaaggggcaaacgtggagcgacctaactagttaggtatcacacccggttactaactattgccaacagtacagagagagtatgtacttctacatcgtagagtaaaaaaaggcattgctgcagagtaagtctgtacctatcgaatcgggctgatgacaggtcatcatttccaccctggtgttgtcgaatttacaacccttcaggttatccttatcataatgggtttggtgaaagataggagcctccacagggcaattaaagcgatttttcgactatggatgaacaaggaatccgcgtggaatatgctagtggtacagccagagtccaatgaacatcagaaaaccggggtataaaaaggacagccaggaggttgaagacaaaatcaaaactggaaagggaaagggcagataaatgagcgcaatggcgagacggaatcagaagataacaccgtgcatcgacgtagaggaacagagaagatgaaagcacacatcatacatagaaagagagtgggaaaacacaacggggaaaaaaagggaaagtattgcaaatacaggtgcagaacgctcagacggtgcaaatcacatatcttagggcacatggtcatagaacaataatggagagcatgatctctagatcacgttagagtgttcggggtgtgcagctccattgttcaatggcctggtttgcacatcaaacccagccctgtcatcatcatccagtcgccttctccattctgccaagctatcactcatcagtgcgggtccatcactatggtccttggtaggagtccgctccagatccagctggctgctcagacggtaattgcggttggtgctttcccagtgacttcgcaaagcatccaactcgttggcaagtgaatccagagccatggaaccacgattgtcggggaatgtagaatcctgagaggcattgctaccagctcgtggtcgcccattgactccgctgatggtgttgctagaggcgttgctgtgtgtgcgcgagagtccaagtccattgggaccttgcccgtggtgggattgacggcgataatgaccaactgatgtttgaacctgctctagaagcatgttcaccttacgctctgcatcggaagcacgagattcaaggtgggtgttctcttgcttgagctggttcagctcggcacgacttttctcagcggcagtacggagatcttgcttaaggcgctcatgttcacttcgcgacaactggttctcagcggtggcttgatcgagatcttgcttgagctccgtgatctgactttcaaggctggcaatagaagaggcagttcgatcttggagttcggacatcgaaagctcaaggcgggaccgttcagcgtcccactcagcagaagatccaggtgtctggctgtctgaattctcaaggttcttctgagccacatccaattcagattgcattttagcattttgagccttataccgacttagctcatctttcatccgcttcaacatcttctcggtgcctttcacgtaatgaaccgctgactggtaatcattctcaagttgctcaagtttctctcggaaagctcggtcggcttcctgctcacgactttcaaagccgttcttcaggtcgtcatgagccttgatgctagccgagagttgttgctcaagctcccgtagtcggctttgctccggagtgccgaatcgtgatccgggcgagtcaagccgtggggaccgtctggtgtcactgttcaccccacgctcaccaagaagatccttcaaagcagcgtgctgagccgctaaagctccagcctctcgctggtgagtttcaagttgtgccttcaggtcccgattagttgtggcggccgattggctttctttcattgcagtctgaagctgtctgcgcaattgcaagccttcacggctagcctgctcctggtatgcttcaaggccagcaatccgttcctctgcacgccggagcttatctgaggcttcgttggcggctgcctggttagccttggctagagtggtggaccgctcgatctgggcctccatagcagcgactcgctggtcagcacgagatcggaacgaatcagtcaaatctgtagaagatgcgcgttccagcccagacagcaaggcaagcttgtgggtttcagcctccttcgcgtggatctctgctaatgcctccgcatctcgaaggcgacgcgtaatgttctccaaatcagtagtccgttcttcatgctccgatcgaagctgcagaagctttctctccagaccctcgcgacgctctcgctcctcttggaattgcttctcgacgagggctgtcttcgcagtggaggcggaaatagcttctcgaaggccgccaaagctagaatcatagtcctttaaacgggtggaggattcctcaatctgcgccaacaagtcttctttgtctagaataagttgttgaagagaggcttccgcttctccacgcaagaaagcctcttctctggaaagagcctctgcttggtggagctcagcgcgcagattttctgcttccagagtattgctttgcatctcaagctctgccaggtgcttccgggttgcctcattcgtctcttcggcaagctccttggcttgacgctcctgcgaaagctctgtggtctgcacatctaatttagctttcaactcggatagggaggccaaagcgagggcaaggcggcgtcccatgtcggtgggtcgctcgtcatctccatcgcgagaagcatcaggctggggagtgcctcgctgactgccaccatgagcagcgagcttcgcacgggagtatgcggcttcattgatagccatatcgcgttgatgttccacttcagcaacccgtttagatgcgatggccgcttgtcgatccacagtggcctgcatcttgctcaggtcagctctcatagccaagaatgcctcaaccagcgggcgatcctcatcgctcagagcctcattagcccgatcgtctagcgcggggctactggttgcattgggaacatagccacattttcttgccagtgcgagttcggaggcataccaggcattccgggccttggtaacctccaactcttttatcaaagcctcttggtggggcgtaagtcgaggagaccgtggctcatcaccaagtgtcttggagttgcggaaggtccgagattccaccgaaccctcgatgctagtctgccgaccgaggattgattcctcaccgctgtcaacagacccacgctgtctttgagatcggagcgaccgttgtcgacctggggtactgatcaacggagctgcctcgcctgcttccatggccttcgctgatggcttttgatgttgtgttggggttcggcgaccagctgatggaggtccctgggaatcttgcggaccttccttcataattggtgattcttcgccacgctcgtcgtttgctccacggatatccgcggttggtgtgtatccgcgatcattctttgtcggggtcttgctacgagggttcgcaccagctggagcgccattaccacgaggcccaggagagggtgcttgtccaggaggcggtgggccagcaggggcttgggcaattgatgcccgtggcagtcgagatccaggtcccaaatttggattggggccgaactcacctggcctattaccagccgcaccgtgtgtcatgctctcacgcgatggcgttggcccacgtcgcatttgcggttctgggactgcgttttgtgcctcgcgagacgagcgtccagacgagattccaggtttatcaacacttgtttttctggtcgccggctcgggaacgcgtcccccaggttgcgaatcattggggtaccggatcttgctagtatcgaggatgtaggacatgctaagctccgccgagtccctaggagccgagctcggctcacccgccataacaatgatctgcttaccgaaagcagtcatgctgtgaccagatcgaggggacggcgcagggcccatgttttgaaaggagtaccaacgtcgagttgagatgcggaaggctgacaggtctcccaggtccacaccttcatccgtgcgacctccgaacacatacatcacatcgttgaccaaagcagaggcatgaccctccctaggagccgggataaaaccaacgcaatcaatctcggtccagctgttggcgatgtaatcataagaccagacatcattgaaccactgcactccattcgtacctccaaatagatatagcttctcgttaaaactgacgatagtgtggtttgttctcgctggaggaatttggcctggcgggggtccgccttcgtgactgttcgggatcaagacctcccatttgtttgctgggttttgaagctggttcaaatcaaaggcaatcaaatcattgaagaagaagccctccacttggcctccgaagacgtagagtttggagcctaggatgttcaaagtgtgaccgtaacgcccggaaggtcgagagccgggaggaatcgcgcgggaccattggcgggaagctaaaaagataaagagtcagggtcatagtaacatgaataatcgatgccatccttacatgtgttcaaaagatacagggtgtcgtcgagagaatcattctcgtcgattttggtatcaccgccgaacacaatgaacgcattcccaacaagcaaactggcatgaccaactcgcgggccagggccttcagataccgtcgcaacctgcagacagttcaagcccccaccactgctctcaatcatccaaagatcacccttgacggttgatccatcgatcaggcctcccatcatgtatatgtctccttcctttgatgccaccgaattgattgctgctccataccgaggaaatgggttcatctggggagaagagaagttcaagcggcgttgcgaccatgggtaaagggatgaaccggggcttggatgggggatcccgttgggcggttgctggggtcgttgcatctgtcgtagacattagagctatgtcctcgtcaaatagcgaatggatcgcgaaacagatacccacctgggattccgattccgctctctgtcgcggccgcactgcgtctggactcgtcgggcttgcggctgagcgtagagagttgctgaaactaccgctcggggtcggtgtctgggaatttgtgccatcccccttgaccccatttgccatagtaggggatccagcgggtggagcaccctcggaggtgtggacatttctagttgccggggggagtgcagctgcagccgcctgctgactgtgctggtgcttcttcgatttaaacagaaaggccatcgtaatttatgtggtcgtaatcggtcgtatcaggggatctggcgcaaagtcaagctgcgcctaagtgtggactcgatccgacacccaaatatcgaaagaatggcgtggtcccgaaagattaagtggaaaatccgagggataggggagttgtctatttcagaagtgaagtgggaaccaggaaccactaggaaccataaaacgttccatgcacaagccgctcagcgtccccccaaaaaaataaatgtgggcagggggaggcttctgaacagaagcattcgcactaagaactcgaaaaacaaatcaaagcggcaaaagccaagggaagaaagggggaggttgaaggcaggaaatgtgaaagaggaaaagcgaagatggaagagatggccgtttcaatttcccggagatgctctaagtcaaactagtcttagtttcattggacatgcatactcaggggcatactatcactcgaatctttacttcaatgcttgtcttctacttatatcccccgtactgcgtacattatactatttccttcattcctttttcccagtctcttttttccagcctccaggaaccgaggggggattgacattccaccatatcagcgacacgtcttgagcattcggatgttagatgtcggtattcccaaagaaagtgaaaattatatagaaaaaaaaaatatataaatatatcaaaactataaaaaaggtttcacaacaatgtcgcaaagccttgagaatattgagctgcattatatccaagggttactccgtacttcaaatgccgtccacagccctggacctggaggcttgtgaaccctgactatcacactatcacactccaattgctatatgccacgggccgaggactcgccacggtgtgaacaaatgcaggtccaataacaattcatcctaacactgcatttctggcgatccataccccacagtgtgcaagaaacactgattcagattaaggctgtacaatataactatgtgagctaatgagtgactctaaatacctcgctaaggaaaagatagagcttttcgagctgatagatccaagggaaagggggttcccacctatgaaaataatctgggcgatctctcgtttcccggctctagggttattgtagggatgagcctcttgatactgatgtacttttgcagtaatctatcttcattggctacgtctttcttgctttttctttttggtctgctattttgtataagaatcgacgtgtcagattttggatgtccatcctttcttaggtgaaacctttgatgtcccctatgattgctgtcttagacatttccaccatacaatatctctcttagattacagcaaaattaactaatatgttcctaaattttgtcctacccagatagttaactaactaaccgtagtactccgtgatgtaagcaaattcctacctgcttctaggctggtgtccgcattcaacatctccaattaagatttcgtggttcatacactctatagataggcattcaaagctgactacgttggaagaaagagctattgaccatttacaggtcataattgcctctgtcatattgtagaacgacgcgccagaaaactacacatttgagtctatacttctgaatgccaagacatcattctgagtaatccccggaatatctgtgtttccgcatccatctcgcctctccgaaccacatccgctctagacctggcagattagctctatttggaccagaattcatagactgtgcgctgagctctctccgcgctcctggaatatctccagggcagtcgcaatttgagaccagtctatcactacaaatttgaccaactccaaggtcaccccggccatttcatcatctatctcttccccagcttcagtcgacaacacccagacccacacgagggaactcaaggaggaaactcactggttgtgaccgatgaccgagcggggatactcgcagcttgccttgacatatctttcagccctccctcttcccctatactcgggtaacacaatgatcaatcatacaacatgagggatcccactaccgatatggaacaaaactcacagcagacgaccaacgggtccacggcctcgcgtcgcaatccgaataaatcggtccgcgtcgcgtttggtcccgacttagagactacgattcccacccgcgaaagatctccagccccgttgagtagccatcatcgttcgctcacagcagttgaacacaagcagcccacactgacgccacacgggcgcccaaccagctcttcgggagagaacattgccatcggagagatcccacctcgccgtccatcgcctcggagatctgagagtagccgaccggctatgctgaagagagctaaaagtgattatggaccaagtcggataaccttcgataaagtggcgggcgatgacgacgaagatttcgctatgcgacatggatggcaggaggaatatacctccagtgaatatctcaagatcttgcattctgtgagaatgaccactctgatcatgagtttccggaagctaatataaatacccgctggatatagaatttctacatgtatttcaccgagaaacgccacgagaccaacggtattcccagggacccagtcgggagttggccaagccaggactggcgcatgaaagaccgcctgaaaactgtgtctgcggctttggcaatttgtctgaacatcggagtcgatcctcccgacgtggtcaagacgaacccgacatcaaagcttgaatgctgggtggatccgagttctaccacaggtggtggtcaaaacaagatcatggagcagattggcaagaagctacaggagcaatatgagactttgagtcttcggacaagatacaaacagtatctggatccatcagttgacgagaccaagaaattctgcatctcacttcgccgaaatgccaaggacgagcgagtgcttctgcattacaacggacacggagtgccgttaccaactcagtcgggtgagatctgggtcttcaacaagaattatacccagtatatccctgtcccactgtatgatctgcagtcttggctagccgggcctagtctttttgtctttgatgtttcacatgcgggcaacattgtccaaaacttccacacttttgttgagaagcatgagaaagaaaatattgaaaccaagaaacgagacccgaatgccgtccttcagaattatggtgactgtatcctcctggctgcgtgccagaagacggagtcccttccgaccaatcccgaccttcctgcagacctattcacctgttgcttgacaacaccgattgaaatcgcattgcgctttttcatcttgcagaaccctttacgcacaaacattcccattgatgacttccgagttcccggtcgcctacaagatcgccgaagccctcttggggagctgaattggatcttcactgcaattaccgatacgattgcgtggaacaccttacctcgggctttgttcaagaagctcttccgccaagatcttatggtcgccgctcttttccgcaactttttactcagcgaacgcatcatgcgcacatacaaatgccatccgatatcttcgccggaattgccagacacacatcatcaccctctatggaaaagctgggacctcgcagtcgagatggtgttatctcaactaactgctctcattgatcatgatgaaggacgccagcagtacgagtaccagcactcaacgttcttcgctgagcaactcactgcttttgaggtatatctgtcgtccggtcctacagagaagaatccaccggatcagcttcctattgtcctccaggttctcttgagtcaggcacaccgcttgcgggccttgattcttttgagcaaattcctggatctcggaccatgggctgtccaccttgcactgagcattggcatattcccttatgtcgtcaaattgctacaatcagcagctcaagaattgaaacccgttatggttttcatttgggcgagaatcatggcagtcgaccacactgtacaaaatgatctactcaaagataacggcattcactactttatctcaattctgaatccctcttcgcccattcctgtgggcaacgccagcgaacaccgggctatgtgtgctttcatagtctcaatcttctgcaaaaactaccctcagggacagaacgtctgcctttctgtcgagctgtttgattcgtgtctcaggcatctcggggatgtggaaaatcctctgctacggcagtggtcttgtctgtgtctcagtatgctctggtgcgatttccccgaagcaaagtggatgggcattcgatgtgcagctcccgctaggctctgcgagttgaatttcgaccctgtacccgaagttcgtgccgccatgcttcacgctgtgactacgttcttgggaattccagatctgactgaccaagttgcacaaatcgaggagactttagccctggcagtcttgcccatgtctgccgatgggagtgtggtcgttaggaaggagcttttagtgttcttctcaacattcgtcagacgccaccaaaacaaatttttggtcgcagcatttgaggagcttgaggaagaaaagcggtccctgtgtcatcgctgggagaacgaaaactctaagactaggcgcgccgaaggacaaactggagcattagtttctcatgcgaaacacccccagctgtctcgcaatactactttcggaactatctggaagcagttgctggctctctcggttgatcctcatcctgacatcgcccaggatgccgccgttatcgttgattacattcaccttgccttgctagaatccccaatggcgccacttactaacaaacttcagaacgagattctagaagtcacaggcttgacgaaatcccaacctcgcgagcgaactgaggtgaagaaaaccgtgccacctgcaacgcctcccttgtctggagcagcagcttcgagacaagaaggctatctttctttgggttttaggcgaactgccagcgtcgctgcttccctgaaaaaccttgcttttggcaattcgtcgccagacctatcctcggataattcaaaccccccttcgccttcaaccagccgtatgacaattaccccacgcggccgcgcccctcctgagtggacccgacccccggaaggaaatgatcatgttgctcccgcaacagcgtaccaccaggctccgattcccacatcccgagggttccaacccaagggcattgatgtcgtgcccgttattcccctaaagagtcgattcctcgactggtcgaccgaggtaattccggattttgaatcctttctctcccacaactatgattaccagcaattactcacaatttcgaagtatttccgggagccccaaatgaaacccaacgagccggatgagcccggtagctccgactataaccagcgcctctggagacgcggccgcaacgaaaagatcattgctgaaacccaacccctcaaaggaaaagctggagcaagccgatgggacaactcgatcgctttgctatcgaatggtagccagccccacaagatgtgcttccatcaatttgaggatcacattgctgtcgcagatgaccgggatacaatctcgtgggtacaacaagtcacctgttcttcattatctcctaaccattagtttcgtatagaatctgggactggcagagccacaaacgcctcaatcaattctcaaatggcaacccggtcgggtcaaagatcaacgaagttcgatacatcaatgaggacgaccaagccctgcttatgactggatcttcggacggcgtgatcaagcttttccgccattacgagactaataagaagattgaagtggtcacagcctttagagcccttcctgaactgattccaagcaatcgtaacgcaggccttgtgcttgattggcagcaaggtcagggcaaagctctagttgcaggtgatgtcaaggttatccgcgtctggaatgctgctactgaggtgtgcacaaacgtaagtattcaatgtcttgtctcgcaaatataccacgttactcacaaaagctcaatgacaggacattccggcaagatcgggctcctgcatcacatccttgacatctgaccaagtggcgggcaatatattcgttgccggtttcggtgatggtgctgtccgagtctttgatcaacggttgaagccaaccacatccatggtcaaagtttggcgcgagcacaagcaatggattacaaatgttcatatgcagcgtggcggtctacgagaattgatatcaggtggccgaaatggtgaagtccgactttgggatcttcgcatggatagcccgatctccaccatctatgctactaaagacaccctgcggaccttaagtgttcacgagcacgctcctgttttcagcgtgtacgtttcctccgccgccatattctaatgtttgttgtacgctaacataacgcaggggtacaaatcgccacgaagtcaagactttcaatgtggatggcacctatctttctacgtttgagccatactcgagcttccttcatcacaatcgatcctcgcccattgcctgcactgccttccatccccaccggactgtgcttgcctgcgccgcattgaatgaccatcatgtgaacctagtgtcctgctaattccaactcagctccgaaatccatgataccttcgtatggcaaccttcatgacgttgtttctttctcttgtcctaatattaccctttctgtaatatgcattcgcatacccgatgaacaaatctacacggcgtcttggcgattgacttgatcaaccatacattgatggctctgcgttgtttttttttgttccctcgggaatgcttcactgccctttgatattcgtgatgattcctttattcttctatttcgtgtgagacagtgtgcccagtttcgggtctatgaatttctttttccttcttttccatttttctcttcctcggtattaggcacacaatatcttgtagcaatcggcactagttgatttcctgacagaagaacgtataattgttggagtgctcgagctctgctcgctttaatgcagtaagtacagcgcaccagaggcagtcctgtcttgactgatagcctggcctggttctattcttcttctatgctttttgatgaatcgatacaatgcattagttagtattttgtgggatctagcttaggtctttatggatgtacttgatgcttggccgcgcactttaccttagtgccccacctgggcaggattagggcgtcatacgctcgctgggtggaatacgctggccgtttcttcgttaatatacttcggtgtagttgaagggttgacagccacactttgtgtttctgtttaatctcttgcatgtttccgggcttattcggccgattatgtggtctttcttcttgaattgacggtctgacgtgttgaataacctgaattttcaaatcatttagaaacaatatcaagccgttgaactgaacgcaatactacgatatctggtctgataagtttctggatatatcttctgatcatcaccctaccacatgtacaccatgcccaagggaatcacggaggaagtcttggttatatcgcatcctcccgaaaaggacattttcatttatatcatctaatgtgttgtgccaggtctgattgggaagaggcagagtgagggcaaatgtagtcacgtgtagtcatctacaagtaaaggtagtgaaaaaaagcagttagtagttttaaaagatacgtgctttgtgtatgtaacgaaaagcgatctatataattacgaagcatgagccgaaaatgtttgcaaatgtatcttcaattatttatcctgaccaacttgaattgacgatcattcgaatgcagtgagatataacaaaaaaagtagattgatattaacattgtttgatcattctcataaattactcaagctatgaagacagcctagaaaatttcatataacatcacactcatcaatcgcctagtatttgcgctcgctgtaaaccgtctcatccgcgtcgactctagggtcaagcttgttcaatagatcggagctgtggggaccagaggtcttcccagtcttcgaggtttctgtgtagctgttgccaccgccggattgcccagtagtgctgtagttctggctgctagataaaggattgttcgagctgtgaccggtctgtccagtggtggtgctgctgtaattgtcgttgctagacaaagggttgctggagccgtagccagtctgtccagtggtggtgttgctagacaaggggttgctggagccgtagccagtctgtccagtggtggtgttgctagacaaggggttgctggagccgtagccagtctgtccagtggtggtgttgctagacaaggggttgctggagccgtagccagtctgtccagtggtggtgttgctagacaaggggttgctggagccgtagccagtctgtccagtggtggtgttgctagacaaggggttgctggagccgtagccagtctgtccagtggtggtgttgctagacaaggggttgctggagccgtagccagtctgtccagtggtggtgttgctagacaaggggttgctggagccgtagccagtctgtccagtggtggtgttgctagacaaggggttgctggagccgtagccagtctgtccagtggtggtgttgctagacaaggggttgctggagccgtagccagtctgtccagtggtggtgttgctagacaaggggttgctggagccgtagccagtctgtccagtggtggtgttgctagacaaggggttgctggagccgtagccagtctgtccagtggtggtgttgctagacaaggggttgctggagccgtagccagtctgtccagtggtggtgttgctagacaaggggttgctggagccgtagccagtctgtccagtggtggtgttgctagacaaggggttgctggagccgtagccagtctgtccagtggtggtgttgctagacaaggggttgctggagccgtagccagtctgtccagtcgtcgctagacaaagggttgctagagccataaccggtctgtttagcagagtggccagtggtgctgccgtatttgtcgttcgagccatagtcggtcacttcgctagaacggccagtgccgctgccaaaggtgttggtggagccccggttgtctatgtttccatgttagataaatgactctagtatgttttccaggggcaagttaaacttaccgagatcgctatcgacacggggatcggccttgttggctagcttagagtcatggggaccagcattgatcttactggagccggtgttggatgagccatatccgccagcagtgtttgatccgtagttctcggacgttcctgggccgacatcaattggacccttgcgggaatcatggatagtgccagtgccagtgccagtgccagtgccaatgccagtgccaatgccactaccgtgacctccagcaccggttgtggatgaggtctcatagccggggccagagccagagccataggtgttggagcctgcgccagagccataggtgttggagcctgcgccggtagaagtgtttctattaaaagtattgtccgtagtcctgtccgaggatccgtaagtatcccgggtatctatgttaatagaataattagcatcacactgcaatggttttttttctaggaacaacgaaccatcagtcttgctgctggatgtcttcgactcatcatgatgatgaccggtcacggcatccttgactttgtgaatgatgttcgacatgatagtagtgttttgatagtaaggtgaaagatttggaaggagttgtagttggaagtctgactattgttcgagtcagatgattgtttgtttaaggaagaagtggaagataatgtgcttccatagccggtttatataccctattgtctttgcgtgtcttgaccagctcatgagttgatccctacttgtggagactgagtgacgccataacgcgggggctccacgagtataatcaccggtgaaacatggagaactccttcactgccttgtttacaactgtcatgacgtcccaaacaaactttacacatacagactcatagtcttggctgaaaatgcgagctatcttaatgtcattcatcgtcatgtcccggatcttcaagaccaacacgccactgagccaagtcttacaaggatatgctgtcgatctactcgccgactgagatttcatttcgagtgggttttccagactttcgtgccaataattctctgagtttgacattgctatatcgtggaccatggaagcttagctctgagcttatcttgtgtctttataagaagagtctagggtgttattattagtctcttatagacataataaacgtatcgaaggcagacgaagagattctcgaaagattcctgcaatatccactagtcccctttagtatatacacgtcatatgaggggttacataatttcccacgctaatccagatatggcaagtggggacaagctttatcgatcgtcaagtccaaaaatatctgacgggtgtgccttgaacttgttttaacattggacatagagtatactagctgattcgatcggatactacaacatacagtctatgatgttgcacacattcatagcgctgcttcaaatcaaaactggaaaagggggtggcttatggagttgcctagcagtgcccagccctggaggtgatggcatgatcggcgtagctcgagaaccttggaagcgatatcaaatcgactcggtacggagtatatcaaatctacaatacgtgtctgttattgcgagatccaaatgagggggcaaaaacgcaccatgccatcttgctaatatattgtgacattgtacgagttacagcatttgtcgatttctctcacaatacttgttggagtcttcttttcacatattaagcgcctgatgctataaatgagcggaggatatgcaagtcgttagctgagccagtatagcaccaaggtctaatagttacatattctacatagtgactcggtatctgatttaaggtcgtgtggtttgaggcaccaaggccaataaatgccttaggcttccaacacatgacacggcggacatgccgtcacttacccggggttagataatccacatcatgagttcatttccccttctccacctgacttcacttgaactcccctcctgtctatctgactccttgttcggtttggcttccctacactcgcgttggctgtcatctgtcgtctttcttcaaccagccatagtgctgcccattgtactcgatgagtggccgcctgctagcttgccgccaactgttggattggtcataaaagagtccacccaaagtactgtggtacagcggagccgctggcatcgtcaatcattcacttgatccaccccattttgcagtgattagatatctccgattaagccactctacggtagaagaggctaaacccatctatcagagacatgcgaccgccacgcctgctcatcgtactcttctgccttatcttcttcccgatcctcctcaccttcttttccgcgcttacatcacccgatgtagctcctaatactctcgctggtcagaaaactgggctgcgagctttgttttcttttaacataccatcgtccctttttcccccgtcggctattatcagtctcaccgatgacaactcgaccttctttctcgcccgaccagcggcatttggctccctactgccaaccaaaggccttagcggtcagctatgggtgggaagtggctttggtgaggggggattagctggtggtgtggaaggagaactgggctgctccgatatccccggctggggtgagagcaaaaatcataagaaacaagataaaacctctagagccgcggagcagagttccgggatctccgggggaagtacagtgaatgatcaatcctcaaaccgcccgcggtcggtgtcgcaggtcgatactacgcagaacgatagagattcaactaccccgcctttgacgaacgatggcactgacgaccatctacaccatccactccctgaatctggttcttctaaccccgggatgaatcagaaatatggagattacgtccaaaataagccgcctgcgcatgccgacatccaatcgctacaggaaactgccgaaatccagggtaaagtagtgctgttgagtcggggtggctgtgggtttttggagaaggccaaatgggcacaacgacgaggagggattgctttgatcgtcggcgatgatacccggggtggcaacttggtcactatgtacgcacgaggcgatacatcgaacgtcacgatcccggccttgttcacatctcacactactgctcatcttctatcgtcattggttcctgggcatacaggtggaactgccggtttagaagatgtagtaaaatcatcacaagcgaagctggcaggacaagctgaagccgataaagaacgggtggcaactactaccgcaacaacaacttttcctagtccgactgccagcagccattcgacaaccaaggagaaacctgcaccctcttctcactcggaaggcgggtttttccgtgcaattggtgcattcttgggattgtgcgataagaacggaggttcgcggcgtctagaagacagccgacgtccgcctagcagcggcaacattgattggatcaacctaggctcacggaatgaaaaagaagccccgtcgagcgcttggaggagatcaacagatctcaatcatcatggtcgggccaaggtagacgacacattcgacaagcacaaggccgacatgtccactgaaggtcttgaggatgatgactttgtcatcggggttcaggactggagagatcctgacttgatgccccctaagagtagcacccatccgacaactagcatccctgcaactggcaaggatacctccaagactgccagtgcggataaagatgcctcttcctcgcccaacggtcttcagggtggtagcatcacaccaggaagtggagaataccagagcttcgagaaatccagtgctggttctcatgacacgcaccgcaaggggtctgagaaagaaaccatcggaactcatgggaagtccagatcttcttccacgaagggctggttctcgagtcactttggatggggagatgatactcagcaagaccctcagccttcttcgtcgccttcactccagaaaagtattgcaaccaacgagcagaaacaaaacaacgctcccacatcaagccgtctcagcgcggagtcttccgaacacgaaggtctttgggttacaatgacacctaccagcatgtccaccagcccctttttcgatactctattggtacttgtcgtcagccctttgctcacactgacggtggtttatgcccttttgctgatccggtctcgaatccgccgtcgtcgctggcgtgccccgaagtcggttatcgaacgacttcctgtccgaacctaccacacaattgccaccacttcgtcctcgtcttccaactcaacgcgcccctccagtcccagtcctctatccccgacttctccactccttggcacagatagccgaccaagcgcatcccgatccaatagatcacgttcacaaacattctcgggcactatactagactcatctgtcgtacccaaagaagagaagtgcaacctgcaaggtggatctaccttgtggcgacggaagtacacaggaaggcaggtggagtgtgtcgtatgtcttgaggaatacatcgatggtcagagccgggtcatgagtttgccatgtggccatgaattccatgtggaatgcatgtaagtgacgtgaatttttttgtcttggttgcgaagttttactaacctcttttctcagtaccccctggttgaccactcgtcgacgaacttgtccaatctgtaagggcgatgttgtccgttcgttggctcattgtcaatccggcgattctcggggtcatcgtgagcagtctcttgatgatgttcgcagcgtccagtcaatctctagaggcagcgcatcttccgctccagtaccaattgagggcgtcaatgacgatgcttcagatacggaacaaaatgcaggtctacctggcgaccatgcaaattctgccccacagtcaagctggcgaaacctcgctacccttagcttttctgctctgagtggcgacaccatatggcaccaggctcgcgcagaccgcaatcgctaacatctatattctatccactcttttcgattttcattaaaacattcccccctctgtcctgtggaatttgctctccttgtattgaagcatgctgtattagcggtcgtttggagtttcttatgatttggatctgcttggcgtttggtgagaacagttcggcttgctgggcggttgcaaagtggctgcaaggattgttgaagcggctggaatataccgcaggtcagtcgttcaaatcgtgtacgttcttatgttcttttggtagaatgggtgtttgaatggatttcattgacacttggctgtcataatactattgctatgctaccatcctctagtttattgacactgaataatcgcctaccaacatggcctccgcagctgcacttgtttgtaatttatagtaatcgaagctgctcaaaccacacctcgattcaatgactcagaccaaacgctcaacctcattccttctcaacatagacattcctagcaatatccccaaacacatcaagtgtatgaaccagtcgatcacgcgccaattcaaggcgaggaatcatatcccgacccaaaggcaagaaccactcactctcacgtccagcacccacgccctcaccaacgatgacttcatacatcgccttcacagccttatccgtatcgccatcagggacaaaattaccagtctgtaaaacatccagcgtctgcgcaaccatagagccgacatagtcgaccggtaaaggctcagcgggggaacgacaaccagccccgaactgcgtgttgaacgctcccagccataccgtcaggacacggacgttaaagggcgcgacttctttagcgagggctttacataaacctgcggaacatacacatcaacacataaacgagacatccctcggcagaagaaagagaaaaaggagaactgtaccatccatagcagccttcgccgacgcataagcacccatactctctctcccttccactccagccccagagctgacattaacaacaaccccaaaccgtctttctctcatcccaggcacaatcgctctgatcagccgatttggtccaaaatacacagtctccatctgggcccgcagctccttgtccgagaactgctccactgccccgaggatcgcgtatccggcgttgttgaccaacacgtcgatcttgtgtgtagactcgagcttggataccagctcagaagcggcggttgggctgtcaacgtctagtgtgtgccattcgcccccgttttgagttatctccgatactatctccggggtgcgagagggttgtcgtgatgttgcaagtactttgtggccgtttgattgggcggcgcgtgccagtgcgaggcccaggcccgaggagcagccggttataagccagactagcgggcggttgggtttggtgaatgttggtgcttctgtggccatggtggtttgtgacaggtgttggatgatggtggtaaagatttgactgttgtgatgttgatttgcgataaacttatgattacagtgtcataatatcagaatagcatgtctcttatatcgttctattactgcgtgcctcggacttagggcggagttaatatggtatgtcagcattggggcttccatttcgaggatttaaggtggaaaaaggacttaagctggcgtccggcggttgacaaaggtcatcatcggcttgatctgatatccaagctacctcacatccacaaggttgtaaatgaagttgtcataatttctacagagtgactccaatataaacatgcaagccaaatacatacaaaaagaaatcacagaaaaaaaaagagaaaagcagcccatcaccccggaaaaaaacaaaagtcaatgccaagttcaacaagatcccggcacacacgacaagctacaagcgaaccgccggaacggtaaaggccgaagcatctcattcggacagcggggcatcttcattccattctcgaacggtatcaagtcccaccactccatccattcagcacggggaatcacgtactcccgctggcatacggagcaggactttccaccagcagcacgcacttccctcgcttgttgcagcaagggcacaatcagcgccggatactcggccagctcttcatcggtggtttgctccaggtaaggaagcttgctcacagcacggagcgcgacttcacggagggatggggcgtcgtttacaggagatgccaatcctggtgtgagagtgagtctgttgctggatgggctgtctcccataggattgccctccatgtccatgtaggtgatcgtgcctgttgcgaggtggagaggaccccacctctcggtgtgcgattggaccgcaggagacaagtcctcgtggttctctttttctttgttgttgtagtgccgttctgcgatcttcgctttgtcgtatgtgaggaatgggttcgggcgtacggtcaagtgtttcagttcgccttgctggatgagtttgagaacctcccagggaaggtaggtcaactgattgacggaaaggttcaaaacttccagtgctgtcagtttgcagattgtagatgggatttcggccagcttgttgtttcgcaggctgaggactttaaggttgctaagctcgaagagatctttgtgcagggttgatagagagttgttggggagatatatgctgaggaatggctgcagagacgtgaagacgttctctgagaccggggctttcttgactgatggaagcttcgtcaagtgctgtaggggtagtaggagaccgggtggtatagttcccaaattgaattcactgcataggacaaagctattaggatcattggcatgggtgaaaagggacatcagatgaaatggcattagcacataccccaggtcaatgctttcatgtcctttatcaagacaatcaccgataacctcccgggcaaaccgatgaggatcggattcctcgggacttttgaatgcaatgcgagtctgtgaagacatgttctctgtctcaatactgacaggtatagagcttccaggttttctaggatcaagcacagacttgcgcaagtcttccccccacgccgagccatcctccgacggcaaaagcgactcagcaaccgactcatcactccccatccacacaccactatcaacattcctcttatccttaaagtctgcccttttccgcttcggatccagcacctgctccccccaccaggtccctcgataccgccgtttccgtcccgcgcccgatactggcgcatggtagttctccagcccggaagccgggatatcgtcacttgagaaaagcgcaggatcactggatggctgactagagcggtcgtcgaagcgtgatagtcgctgtgcgcgctggaacgagaccgctgcgcctgtcgctgagggattcttcacgggtgagcggtgccggactcgccgcgacggtgggagggggatctcgctgtccattgcgatctcagttcgcggattcagacgagtctcttatagttctctgcctagatcattgggtttctattccaacacggtttcgatctgatgttcggagttgcgcgacgcgttgtggtccttgtggagacccgcgatggagacctgcgggtgtcaacaaacgcgctaatggatggcgcgattgggagagataaggggataggatcgactggaatcaattgagaggcatcttatattttggaagaaaaccagcttcccggttggaatggaagaagatcagatcaagagataagatcacagcacacgtgcacgggcatatcagttgaccccggagctcacggcttccccactggaatgtcggatcgacacgatcttctctatctttctaccacgtcgctgctattggtgtttatagttggaattggcatcaaaggggaagaagaaaggtgtctatattctgtggatgactcaaactcgactcatgcaagtcctggatatcagccagaccagtctgacaactagcaggtcacccatgacaacgtatatggacaaaagaattgaatcaacagggtttgaagaagagaataataacagcatcaactcatatcggtccaaaaagtcataatgaagtgaaaaaaatggggtatttgaaaaaagcgttaagccatttcctctctgaaaacgggttcttcagctgaccgagaggaatagaaatgttaaagtgtaagaagaaaaaagaagaagatcccggctctgctagagataaacggcaatcaacaaggcagcaagtcatgcagtatgaactgggcgcagtatggcagtggctccaattcatgatcgttgcctgcatgaaggcttcttgccgagaaggcgcgattgtaattacaaggcttggcccaccatcacaacgatatagccagcgacggccaaggcagctggcatgccggcgccaatgttggccgctgcgccgatggaggtggcggctggaacagcagaagtagtggaggccacacgagagaggggagtcgacgtcgaaacagacatggtgctcaggtatctcgcgctggaacttgggctgggacttgggctaggatttgcgatggtactcgccatggtacccgcgacggaagtcgtgatggaagtcgtgatgggagtaggagttggggtcaccgaattgacgcgaaccagagtcttagtaacggtcgtggttgcagtcgaggtaatggtctcctctgcggcgacgaatggagccgcaactaggcaaagggaggcgacgatggtggtgaacttcattttgcgaattgattcgaaggtagatatcaatacggaagagggagcaaagcgattgaattggatttaagattggtgaagcgttgatatggcgccaagatgagaatagatgtttcaaatttgatcgcaaaagagtgagcgtcaaaagagagattcaataaagatcgtgtggagcgctgctcagacagtataaaagggtgactgaaacgagtgtatataagagaaatctctgcgtctagggaaaaagggaaaaaaaaaggaaatttagggcatggccggggctaaataaagtctcgaacctggggaaaagagccattcagtcaaagaagtcttgtggcgcttctgttttggtcttgtatttgctctcttgtattattgtttgatttgcaagtgaaacataaccttcctattggtccattgaacacgaccctggaagattgggctccattcagaccgaactataacatctgaagccctaaataccaaagggttttccgcacagactctacaacaaagacgccaggggtaaagtctgtgattatcgtatgaagagtagttaaatgccatagttgggcttatttacatctgttgctcgtaatttcaaactgtgtcccttggtgcagcaaacacgagaattcttcgcctcgtactccgtatactccggtgtaattacgccacttcctatgttcagaactgtttccagtggcgcctttgcttattttgcttactttgttgttttgctgttttattacccctagagtgatagttagaatgacgattctcgctggacatcacatgctactgcaagtgttcactccctcgcgggcacttccgtcttttccggacccctggcgtcatgcgcaggaagaacaatcttagacataacaataacagacagtttatggaggaattgacttgggtcctgatctgacatcttacctgccttaaaatggttccggtggttcgccccaatactgaaatttaccgcaatttgcccggttcccacactatttagaaagaaactttttgtgttatacatacggagtactatttcctatgttaaaggctctgtagatcgtttccgtggttctattcaggaacgaaaaacgatcgtcgctcgggcctactgtgttgggaatctcgactccgtggcgtagagtctggggaggaggtgagtcattcgatgctcactcattcgtgttcttagccttacaacatataactacattggcacatggtgttatgtgttggcaccatgtcattataagaggtgtctttttcaggggctctggcctcattgggctcgccaagccctatgtcctccacttagaatacaacgacaaatcctaaggctactacggagtatactctgtcgtgtcgatcgacttaaaatttgaagatgatcattatccactccattgtccgtactcatccgtctagggtcatttggacaggaaaaaaaagggaagggggaaaggggttcgctcttttccttctcatgtttagcgctcaatcttattttttgttcaataagattgcacaaagtagttggttcaaattagaggcactcaaatcctacacatgataggttaaatagtctctttttagctttggttgtaaatcggtgctttggaaatagcgttgagaccaatactgtcatggttagatgaaatatatatcagtacccattaccagttcattggtccttaaaatacgatcattttcgctgcaacagagcccgatatcaatcaaagttgtctctagacactaggttcctctgggagaactcggagaactcgtggccattgacatttggtctttgatgtgcgatgattctacgtcgtagacctctaggtaaagactgtattgtatgtagtatcgaaagtaaagaccaagcatgtcagaattgtcaatcacatttgcactcgctcatttcccaactatttccccattcttgtcatcttcaatcattccagttctctcgcttacaacgcaggcttctcatttttgatatccccgaactgattccgccagaggttctgatatcttccaccctccttcttcagcagttcttggtgagacccgctctcgacaacctgtccctcatgcacaacaaggatccggtcggcgctggaaatagttgaaagtcgatgggcaatgacaaacgtagttcgcttggctctcaatcggcccaacgcagtctggatgtccgattccgtgctcgagtctacggcactcgttgcttcatccagcaggagaatcggtgacttctttaggaaaacccgagcaatggccatccgctgtagttcaccgccagacaacttgacaccctgctctccgactgtggtgttgtatccgtccacaaatgtgaggattttttcgtgaatagctgcggcacgacatgcttcgtggatctcttcatccgaagccgagggccgggcataccgcaaattctcgatgatagatgcgttgaataagacgggatcttgtggcacaacaccgatagtctgacgtagtgagctgaggcttatgtcgcggatgtcttggccgtcaatatcaatatgaccagcagtaacatcgtaaagtcggagaaggagtctaaggattgttgtctttcctgaaccagtcataccgaccagtgcaactgttgtcccaggttcgatagagatattcacatccttgagagtcttcaaccgggaatcataggcaaagtcaacatggtggaacgaaacacggccatcaccaggcttcagcggcatcgcacactccttgtcagtgacgctaggcttggattgaaacaggaagagtagccgctccgcatcaactagatcagagacaagccagcgatattgcgcggagaggtaggccaaaggagagatgagcgaagaccaatactgaatgaagaaaacaaagtctcccgtggaggcgcgtcccacagaaatctcatgtacgatgagcgaggagagaccaacgaagcaaattggtttgagtaagtccaggagtgatctgcctattgctcggcgttgaccgaaacgggcgctagccttcaaggcgaggtcaaccgcttccgcaaagcgagacctctcgtacgaaaactggttgaagtatgtaacagtctgccagccttgtacggcctgatgcataatccgagtttcgtttcgctgtgtctgtgaaacatcacgtctggcgtcgatgttccagttagaggtaaagacttccgtcgcaacataagcaatagatactatcaccaccagcaaggacgcgtagatattgaactttaaatagaaaacaacacatgcaatagccaagtcaatcactgtcgggatgatttctagaatggcaacttctaacagactgttcagcgctccaccttggtcgatggacttcataacttctgccgagtcattttcgatatggaagtccattgacagattcatgacatggctgaaggcagcagcagtgatctgccggtaagagaactgcctgataggaatcttgacaagtgcctcgatcaatcctagcccagctccgccactgatgagctgcagcagcgcccattttcccagtgaagcatatggggttttgttggcaaagatgctatcggtgacatctgctagttgctgaggaatgaggatgttcagagcccggtggcatactaaacagaagatactggtggcaacacaaagctggaccttgcgattgtttctggggaccaagtatggcagaaagatcgagaagcttttcagatattccaaccaacccttaaatgactgcaacttgtcattgcggagtcttttcctgcgcatggctgcatcattcttattcttgccggtgtccgaatcgctctcgctcttggagtccacgctgctattttccgagtcgttgccattcgctgcgccatatcttgtatgattgccatttaggaaaggacgcgactcttccgatatctttttcttcctctgtctagtctcaaatagaatcgcacttgccacaaagacaagcagggcaagtcggatcgctgagatggtgacctgcgtgattggcacccactgtctcggcttgggacacaaagagagcgcaaggagtggaatttcgaaaccagcggtgaccaacgagcttccagccacttcgtacctggaaggattctgtcgcagccacagtgccgtccatatgaccgcttgagaggtcatatgcaccaagaatggctgagaactgtccaggtcatcagtggtgattttcaaggccgtttgactgagatatgtgaaaacgatcaagctagccaagataactcgaggtcgactgcggcgcttggagcgagtctttcttctctttaccggagtgcgataaaataaaatgcatattacaatgtagagacttgctatcaaagtacagctataatgaaggggagatgctagctgagtagccatgatgggaggtgggacggaggttctgggtaaaacctctctagcagggtactagcagaggtggttctttatatattcccccattctgagcctcattcctataccaaagacccgttattaactgagcgactgcttattggatagacgcactgatcatgtcaaaggtgcctcctgcgccaggggctgggagaagggtgtcctagcggctatccaaactaaaccgggctgtagacttaggccgaggcggcaaaatggcttcattattggttggaccatgcagatcagactggaatttacctggctacaccgtaagttgatgctcttagttggcagacatgccttactacttactttgtactccgtgcagtggacatctaaggggctgactatgtttcggtgacttgttcgaggataagtaataagggaataatcctgttcctaattatcacactgtgatataggttctattctcaaactgcgaccgtgaccgtacttcgccttcgttgtctgtactttgatattgatcttcacctactctctataaagaaagttccatataacatgacattctacttaccgttaccgcgtacctgcacatgtcaaggcaaacagtacggtccctaactggaataatctaggattaaatctctaaatccccgagagcggctggaacagcaatctaacatccgtctgcatctggtttcaggatcagacaaacggaaacaaacagaactgaatcgctggtacagctgcctgttagctacttgtaggtagagatggctcctcttaaagggggtttctatagtttggtggctatgatcaagacaagacggttatagccttacatactgcctagcctgggcatcaagccacgtcttgagacaaaatagatgccagtccagtcaaataatatgacggttggctgtggttttactaaaagattgacaatcaacgtggtcgtattcagaaccaaccagatttcttgccctgactttggacttaatcaacaagggtagccagactagcccatacatagaatctttgacctcgtagattgatcccccgcccctttgagctggattctcacatcattggaccgtccccacacagaatcacagaggaattttctttccaaggacaggattgaatcgtgtaaaagagaaaaaaaaaaggatatattatcacgacaacgcctcacatggaacaactgagacaattgaacttcaacattcatgttctgggtactgctagattatgtacatcgcgtgtttaagtagcgagtacccatgaacttgtcgtcacagccatatttgggtagttgtcctgtctcgaaaccaccagaaaaagtatctcttaaccatagagattatatcgtacaagggacgtcgccaaggagtggtcatgtcgcatgtttcccgaacatagccataagactgcgagaaaaactgtgttcactggcgcattggccggaggggactctgtcgggggagcatcattggggggccccgagcacgaagccaggcatcgttgtgaggtccttcagagcggatgacgctaccgatggacatgaagagtctatttgaagggaagttgattagccagtgattctcaaccaaagtagtataacttcaaagctttcaaggagtcaaccatacccgaaagtggcgcctgaacctagcatatacttgccgagagtccgcataacaccgttggggccagcgccatattggaagatcgtcacagttcctgtttcagttagcttatcatgcacaccttcattcggggactaagtgggaccaaccaataatgaagcccatgataccaccaacagctgaaaggggagctatgttagcaaaagctcttggtgaacaaggctcggttgttttgtgatcacgtactggaacccatcaggcagcccattttcactaggaatatgtcagcatacttggttcaccatatatatatagtacccaaggaaaaaggacaccacgcggagggtgatctatatcactaggttgtagatgacatactcttctccaaagttgagggagcaccccctgggcccgcttgagcgggaggtccggcaaccacaggcattatggaaagctaaaaagaagcttgtgaattagattaaaaacagcatgcaacagcgctgagccgaatgaaagatctcgttgtgagagtcaaggaacaagctctttttcctccccggcttgatgcttctccgccttcgtcacgtgagtccctaacgggcttgaaatcgcacacgtgccggtatagcacgtgacccattttgcctgtcggcggcatcaagggcgtaggaaacaaatggcactcttgcgctcttgcgtgggttccctcatggcaactatcctcggtctctgatttctttttcgccacgtcttttaaagggctgcctgaagcctgcgccgaggcggcagtcccgtcttgtgcttatatcattgccctggcgtgagcccggtcgctcacgatttccgacctccacacaactccttggtcttgaagcacctattttattccctcctaaatatctctcagttcacaattctaaagtgagtccacttcttactccaaatacacaactattttttgtggggtcgaggcaagacctcgacctaggagtcaatctatttgtctctccctaaacagcactaacgcgaccgtcttgactttagtcgggcgacccaagtttcaatcacccttgcgcgcattcaatatcaccaacccccgggcataaaccaacattactagacgtcctctttttactcttgagacctcctcagaagacggcctacggccccttttacagttcgcaaccgtggacgcgctccgtgctccgtctagatattccattcccttgaaccattcgcatccttctctatgactgccgtggcatctccacctagtgtcgaatcggggtctcgcttgggatggtacagctctagtaacggaggagaaggagctctgtcttcagcgaatgcggacgacgtgtcacggatgttcatgccacggaaacacattcaacgctcaaactcctcgtcctctctagggtcgaactcttcggtctcctccgcatctactgtgaccaccccttcccaagatacccatgccgcgcagaattcggccagtgaatcagagacttggtcgtcatcaaaaaagaagtattcgaaaaatatctggcctagctcgaaatccgagccggtatcaggggtgacaaacgcgcgatctcaggcggtgcctgcgttctcgtcgggcccaagtgcgtcgtcgacaatgtccgcaatgcaccagcctctaaacatcgtcccatcgcaacagatgccccagtcatcgcagcagaatggcgtccgtgcgccaaccggcccaccctcggagaatctagcaattttgattcttttgccgatgaacggcacttttgacaggaaacagatcaatgtaccatattatcccgacgtcctacgaatcgggcgccaaacaaatgccaagacggtgcctacgcctctcaatggtttctttgactccaaagttctctctcgacagcatgctgaggtatgggccgataaatctggcaaaatctggatccgagacgtcaaatcttcaaacgggacatttgtgaacggtcaccgactgtctcccgaaaatcgggagtcagagccgcacgaactgcgagaaagcgataccctagagctgggtattgacattgtcagcgaagatcaatccaccatcgttcatcacaaagtctcatctaaggttgagcatgccggaacttatggcactactcctagtatccttgatctgaactttggggacttggatcctgcctcggggggaggccttcttccttctcccttgagccaaccgctttctcatacgcgcggtagagccggtagcaacgcgagtagcagaattgcccagagtgttgccagcaatcagctcaatgctttgcatcaacaacggcagatgaactactggaattccccaatctctatcgaacaggttgtcaagcggcttacggtgtgtatcacaatttatctgtatactacatatcactgattttttccagggcgaactgaaatccgcaaagcaacagacaacagatctttctcaagcagatgaatttttgacgacgatcatgaaaccaggctatgcagagaaagaaaagctcattaagccttctcctttggagaacagttctcatcgccagatgaatggtcggcccaaaatgcctcgagtcgactccttctccagattctcggatcctcctgcccctccacctcaacagcctctgccggagaaacccgacgcgttgtcacgaagtacatcagagccgttctcaccgctgaagcgcagcgatacagaaaaaccgaagagtggtacaggttctcctgtctcccgcgattctagtcagatattgaatctcatcgaggcgctatcttctgccaagcgagagattgaaacccatggaacacgtgtcaaggaactagaaaatttgctattccaagagcaggctgctcgtaaattggcagaagacaaagtcaatgaattggagatgcgctcattggatgttgaagtcaaagtcgaaaacggcattgttccacctccagagaatggcgtagacagaaagggggaacaggacgatccagaagcaaccgtacaggttaacggcacccatccttcggagactcccgctcccgacaacagccaggcagacgctcctgtggaagacaagactgctgaacttcagactcgcttggaaattatgatggaggagatggcagagatgagaaagcaaatggcattctttaaagatcgagccgagaaggctgaagatgagaccacggagtctcgcaagtcgttgaacgaaatgattgaaaccttgcgccaggaacgcgccgagaaggcatcagccacggcgcttgacaagaaaaccgatacgcatgattgcgagccaagcaatgggttagcagaacagtcgcttacgagcgatgatattccaacggattccaagacgaagactccatcgatgcagggctccgattcggtcacctcgcaaaataaggacatggatgctgcaaccgcagccacagcctttgcaacacaacgccatcgatacaactatgtacaagaagcaagtccttacgcttctatgtttggcgtggtcttattgggagtaggcctgatggcctatctcaacagttggcaaaagatcgacaaataaaccagcctggcctcgctttcctatccctttgacggctatttctattgcataggccctttgcataatttgactttgtcttctatctttttcagtctttgccagtcacgactttctggcgatgaatgtgctgattcttgtctcgcttgaggaccatcttcttgtcttcatattcggagcatattccctttagcccacactgtctcttttatctcacgaattttttgatgactttctcgagatccctcttgggaatctccttcttggtcgtcttctccgacgtccgttcctccccctctgtcttgccatctcctttttcttcgttcttcttctacctcctaccatgttactattagcctgtcacccttttataggtcgacatctctctttctcttttgtctgtacatgataggaaaagcaggatacattccttgcagcctctctttgaaacgtttcgttcgacaaagggttttcaggcattatcattcatcatgtcatgtcagcacagggctttgtgagcgtatcaaggagttcttattcgtactatgtcgttttctattcatgccatttgttattcgctggcagattcgatcattctccctcttttaacctcttttcttattggagtagtaccttcaacctatagtcctatctccctctctttcattttccatataagtccgtccagcatatacagtgcgtcaagtcggttggatggagcatgcgctctggggaaatcagagtttatttctgaagtatactctcaatgtacatgattttgcgctaggcttataacctaagggcaaacaaattgttccttgactgatcctgatcaagggccttccgcacctgtaatgtggatattgcacctgtagagcggtgagggtggtaaaaaaaggcttgagggctcgactgcatcccagaacaggaattcaggataaaaatctcctgaactgggttactgggtggtgtatagtcaccatcagcgttccatttggatcgtagtcactcagcaggatgtgcgtgtactcaatgttctagcgggtaattctgggcttggccacaggctcatagttggttcgcagcaatgggtgtgaagccttggagttgaacatccagcagatgatggtcgtgcaatcggatgaccgactaatcgtaggagttttgtcggggtgaccgcaagcgaattcacttaaggctgacggcgacttcaaccattttgatccaccttatccggctctcggggagctcggcatcatcctctaccgcggcagcctgacgtttcctcttctttgcggctgacttggattccggcttagaagccgcatctccctggtcagttggggtttgctcttgctgccgttgccgtttctgttcttcttttgctttaatttcttcgtcctcgacgatatcatccacgacaaccacgctccccgtattgacacagactgtgtactcggtttccttttcctcgaaccatttggctacgttcagcgccttctcaatagcccgccctgtcgccttcacaaaaactttctctcgcttctctggtatcttcgacaactcctcgagtatctgtttatcgttcttgcgcgtatcctcgagattgacgtttgctgtggcgcgcttctcggcctgcagcaggagtttctggacgcgcttgacggcgctcatgaatggcgtagtcttagacacatagacaatcttaggtactaatgcgccagcatatggggatgcgactggggcatgaggtataggacgcttctcgactttggcatctgttatccaaaagtcagcagttgtgatccccggttctcagcattggccgtttaggcgatcggatgggaaggcgcacgttttgggagtctaataaggtctttgttctttttctcaaactggagcttgttttccaatagcccctttgccatggctaatatatgccttgcacgaatgaaaatttgcaaaatcaagtcgaagtattagagctgcacgtcttatcgtctgcctttttctgccggccgcccagggtgtgtgatctgcttatgtcatcgcctgttgaacctgcctaattgggaattgggaagctacaactaggtatttctccaaagtagatcggcaaactgtatgatacctaattaggtagcaccttctcactaatttgatatcagtagcctgatcatccacataattatgtagctctatgcacttgttgatgtacttgagtgtaaaggagaaaacctagcgattcgcttcggaaggcccgcggtgtgctgcagaccggtgatgttccgtatactttctactttcgattgaaagggaagtaaggttgacttgaaagcctactccacattcctgagccgcattaaagacgttggcttaagttatgtacatactgtactcaactgttaccatgatccaaacgccccgactcctgtcaggttcttttttcactaagctagcaggcctactgtccagcactgggcccgggtatggggtcattgagcaatactttgtgtttggcagggtggacctaagtacggagtacaggcatggtcatctatttgggtgggccagaagtccttttgatcggatggagttttcaggtgccggaacacgccttatcgcctagtaatacctacaccggcttgttgcgtttcggagagaagatattagctcataaccacactccgtaattcaagagactagtgggcagtggactgcagatctcgaacggcgatgagcagtgtgatctttgttatgattctgaatggggcttctaaccaggtgatcctggtctctcggtttatgtgactatccgtatggagcacacgcatcgagaatgctcagtcaaggcctattcagattaagggcgattgatgtgtaaaggggtactttttcccactccggactccgtcctatatagtttaaagtggagaacatcgatatgaacaggcagttccttctatattgtagatacccaaggggccgcttgggcatctcgtccaatatttaaggaatggctttgataggtgttccgtacattctagttgatcaaagcaccgttgcggcatcttatgtatgtaggtatcgaggcaaagagggtccaaagtgtctgttgacccgagtattcggtagctggttctcgcaatatccatatcttggacggagtaaggagtagggtacggagcactccgtactccatatagagtacaataagggcgatcaccacgtgagcccccgatggtctggcaaattttcccctgaggctggtcaacatatggagtacggattacggtataacatcgaatgtgaaccaaggcgttgacgatcaacacatctaggcttgatggatcgacatacacctcgagctgaaagctgggcagtgatgtacaccaaactagtttgggaaggtcgccaaattggcgggctggtgggtcaactgggcagtgttaatttgtttcgcctgtttcaatgatgaaagttagatcatgtgcatatttgatgtttgatcttcacttttaagaatcccaagtatcaaattgagttgatgtagcaaatcctgaaggttggaaagtggacctacggagtatcatcggcgaacaaaaaacgccttagactagtatgccttaggcacttactgacagtagtatcgtagtcaggttactgtggaagaccataggtaatgtctattaactccggctgtctgcagatgaatgattgacttaaaagcactgaggatattctagctcttgtatatataaaatttgctttatcccatgtgactgctccaacggctcctttttcgagtgcccaatgcaacggtcacaagtgggttcatcaccagggatatatatgaacacaatatagaagttgcaggtatacatactccatattgtgtatgtactatatccaggggcccataggcgatcgaagccaacacaatcgtaactgttcatcggatctacgtattatgaattgaagggttgaaaatagatagggcgacaggatggttcatgctgtactataataataatggacactcatgggtacagagaaaaaaatagtctgtgtatgttgtttttagattttcacaaaggtacgtggccaacatgagccacaatctggaaagatctgcttgcagtgcatggtagacataagctgagggtaatacatagctgacacggaggcaaatttccgagaaatcgcctcttctaaactgacctgtcgccttctgcataaagaacattacactgcactggtgaatatgacagagccaaaatatttggtaggcgtaacggctcccccagttcccggtcacaacgttagggttccgcgtgcactggagccttaaatgcaagacagcactagtcgtctccggaaaggcacgggggatgataatccaatcataaatgtgagctaggctctttggcttggaacctacctgaagaggaaaggtgttcaacgtaggctagtggggtcaacggctgtctctgaagcattccacgccaatggtaaaccataggaatcggagctaatgacatgttccagcgggtcggtgcaggtggagtagctttaaaaaaacagaatccatggatctggactcggatagggaggggtttgtcttagttaaattgattaaattatgggtttcattgatttaaacaaagaaaaataataaataaaaataaatcacacgcaaagaaaaaagaaaaacaatttaaatgattaatgtaaataaataaaaaaatcaataaatcatttaaacaatttggatttccagattttgattctcgcggacttttgcgctcgagtgcgtctccaccttgtagaatggtccagccaaagggcagcagctcgcgcctttttgtatgggactgttcccctccaccgaactattttgaactcttcctcctcaactctccttgacttccctctacattcacttggtctcatattcccagccactttggtcctttctctgtttaacgttctctactcgatccttgaagggagttaagacgtgtctcacgtttcagccggaagctagccattgaagccgctttcttgcgtttttttgcatacatcagatctggcgtgcaggagatccaacagatcccgtgtcgtgattggtttatttctcaagggatatcctagagacaaaagtactcgctagtcgcaaaagctttttctttctttgttggcctccttgtaccccagggctgatccgaccaaccgggtcccctccatcagtcttctattcctctttgggcctatcaggtctccagctaccccttgacggcctttgagctatcccagccgctacgactcataaatatcgctcttttggccactggactcgcattcgtttcttctctcttcctatcttatccctaaaacactttttcttgtcccgacaccagtccttcaaaatattcatagcatgtctccagacccttactatgagacattggatgcacccgacgggacagcattgacgtggatctttgatcattgcttgcgttacgctgacagctacgaaatttcccttcgtgctgcatacgaactcaattgccacccgtcgaagagcacaatgacaccttcatttattcctcgatcaccctccatcttccgcgataccgtttggtccaaaaaaggccacaactccaagtcttctgtcgatgctccttcttatgacactaatgccgaattccgtgcctgtttgagcaagactgtcgccgaagtgccttctcaaccttgcgcgctccctcccagcttcattatctcatttgtgcgccgctgtttctgtttggatttgtccgaagtcgactttgcccaggctttgactgcccttgattacatcagaaccctccaaaatcgctggaaaaaggagattgatgccgccttcaaccgactcaacgtaacttcagaggatgcaagggaccctgagcactcggaggtagctcgcaattatcctaacttgttgacctggtacgaaaacatcagcaacaaggcacgcacgatcgattttctgtacactcaagtctatatcggcttgcgtcgctgggtaagttttatcccgagatcggaatagcgagttgtgtgtctaacgtttgtttctcaggttcttgtcaatcagatgatgctcgagccattcgacaaagccaactgccttgctcttcttaacactctactcccacctgtccaccgagacagctctaccccaacacagcagttgtcgactgccacccttgggctctatcgtgatacctttttcaaatacattaccacctttgaggctgatccttcaatcgtggaacctatcatacagcaaggcgctgcacccggtgatgagaatggatggcctgcattgcatgccaccattgagcgatacatgaacgcagccctcgagatgatcgacgaatgtgtcttgatcaacgagccttgtcagattaccaagtctggcgtgcagcgccgcaccgattcgggtatcagcttcggtgtcgatttcggtccctgtcctactatttcgcactcttcagacaccgaaaagcccctgcctcatttcccggaaccgaccataggcactagcaagcatggttcgttcctggaacgattttcctccctgtcagcatggggcaagaagaaggatcccaagaaggagcagcagaaggagtttgcgcgcagtctgaagaagatgcaatccctcggaaaactcactagtccgactagcagcgccaagagcagcactaagagcatcaagagcgtcaagacaccaccaaagttcaaggcaaatatatctttcgatttgaccgaagacaagcgccggcgtttgattgatgaagcccaagctcgcaaggcagtcggcgctaccgaggcggccgaaagcatcggccaggccacttaatcgcaacttctctgcaactcctaccaaagcaaaccagcaaccaaaaaaaaaaaaaaaaaagaaaagaaaaacccaaagcccagccaagggaggggaatcaacgtcccctccctttccccttgatttctagcactcgactcggtcatcccttactcttctttcatcctcgctgcagtcgcccccctgcaagcacaaaaccgagagggagcattcgcttccaactatgccaatgctaggcctctgttgtgcagagccagcctggctgcacttgtgtgacttaccttagtatgtttcggaacaaaaaaaaaggcgtttggacggaaagcatatgggggtggatttacgacttaatgtcttcacgatagcgtccagttcactggatttgaaacaattattattacctttatctttatcattctccctcccatctctcatccagtagatatagatacacataggatcttactactgtagccaatgcgatacaacgcggggtagaatatgtagtcgccatctaggtatactcggggattgggggttgcgccagttgccgctcagtccgccgtagaagctgcgataagatagcgaaacttcccaagtgtccagatcagatcagcagattcattctcgatctcactgccgtctttgttgagatccctggttatttggggcgtgatgattgtaaatggattgacctgcatatctgctaattaggaagcccaccctacatcacatacggctcgcctgatacgaggctatcccctataccatacaacagatatacacaactgccttctcacactacattgcgcgataatgagggttcctacgggatctcacattccctggcagtggtatgccgtcgtcggagctctgctaccaggctgggttgccaatgctagtccagccgtgaacgtggcgctccaagcctcctttgactcggccccatacctcgtcgagctcctgtacgttgcacattgagtgatctctcgcctgggatatatatgtcaatatgatggctaattaattcaatgtagggagtctgctgcagaagaaaactccaccgcctattttcctttgttggatcgcatcgccgatgggacgtttgaggacctcacaactgagaaggagctctacgaccgcttcttgacagttgtgaaggatgacggccatattcggactccggagggtctttcctcgttcaaattatcgctttcggtccgatcatcggcgcctcgtattgaggcgcacttccagttctataacacctcagttcagcagtccttgatggtggctcaagatgcggtgtgtcccgtgtgggttcactcggaaggaaagcagtattgctcttctaccatggagcgcgcacagcaggacgttgtcggagaattgtgggtagagctttgttcgtgtcgcatggactctaatagctgacattgaatttgtgcctttagggatcctagagagctaccgtttgatcgtgtcctaggcgatgcatcgctccctccggccgttctgtacgcagatatcacctctccgatgttcagagattttcatgaaaccctgagcgacatggcaaaacagggacaagtctcgtaccgtgtacgctatagacctccccaacactggatttctcgtcccttgtttgtgtctggatacggcgtggagcttgctttgaagcgaacggactacattgttattgatgaccgtgatgcagagcagctcgaagaaaagggcgcccaaagtcttccaactgacccggatgagaccaaggaagatgctccaggtgacctccggcctctgtcttcctccgatgtgacccgtctaggcttgaactctgcgggctacgttatggacagcgctgatcctttgggaacattgatcaagatgtcccaaaatttccccaagtattcatcgatagtagctgcccacaatttcactggggaaatggcacaagagatccgccacaaccggttaaaaatgctccctggtggttacaatgccatgtggatcaacggtgtgcagatggacaaacaacagattgacgcattctcacttattgaacatcttcgccgagagaggaaattgattgagaaattccgcggcctcggtctctctgcggatgatgtcgtgaagttactgtcacatcgactcctcactgaagctcaagctagtggcgaggagcaacggtatgactaccgggataatttagaagggaaccaggttatcatttggatgaacaatctggaaaaggactcgagatatgagtcctggcgtggtgatatcgagggggttcgtacttatttcgtatggctattggacggaattcatattaacataattctagtacatcgccggctcttacccgggacaattgcctccggtgagccgggatctgcacaatgtcgttgtttctatggactcgtctaatccagaacacatgatgcttgttgctggaaacttgcacgccttcatcaaccgaggaattcctgtgagattcggcttggtacctaccatctcgtcgccagagtccattgcgcagctgaaggtagcgcattacctttctgatgcatatggcatagagtctcttgtgcaatatttccaagagtatgccgcgaaaggcaaaatgggcttcccagacaaatcatgcttccagtctgcgactagagaacgcgacctggttgacgaacacgaagctctgtctcttgatcaagtcttgaagagtgaaaagtatgacgctgtggtgtcccaaactggtgcttaccagcgtcggttgagtctgacgggcgacgcacctcaatttctagtgaacggtatccctgtctcccgagaaggcaactggatgcagggaatgagcgtacagatcagcaaggacttgaaattgatccagcaaggcattgttcagggaattttcgaggaggacacatggcttccggagtttttcctagctgacgcattcgcgaaacgcaatactttcctcatgcccgaggatcccaagagtgtacagattgtggacatcgctaatattcttgcctcggatgaagatgcattgagtaagactcgtgttctctcagacaagggagccctagagagcactcatatgatagttgtgggcgatttcgagtcagaggcgggtgtgaaactacttaccgatgctcttaatcttcgaaaggagaacagtgacgtggagattctgatgctgcacaatgcggcatcggacgccgaggatgatgcccccaagaatctcgctactctctatctctcgcttgcgaaggaggaaactatcgaccaagtactggctaagattgcatccggtaatcttgagactgaagtccaagatatctctaccattcaaactttgcaccaaatcctggccaaagaacttggattcaaccctggcactgagggacttgttgtcaatgggagagcagtcggccctattgagaaggaacatccgttgagtgtgggagagatgagccaactgattgcctacgaacgggtgaaacgcctcgattctgttgcggcagctgttgaggaactcggattcgcggataagatttcaaacccgctcgatttcgctaaattgacatcgcttgtggctctttccaccatctctgatgtccctgagggcattttcgaaaatactcctgatttcagaatggacgtctccggtaaatggaggacggagcactctgttatcaccatttccaactccgatgatcccacgattcacgttggtgttagccttgacccagcatccgaggttgcccagcgatggtcgccgattctgaaggtactgtccgaactctccggcgttcaactgaagattttcttgaacccgaaggaagagctcacggagctgccagtcaagcgattctaccgctatgtcttggaatcagagccatctttcacggataagggggctctggctcggccgcaggcgtcattcactggcgtgccagtcgaagcactgctgactttgagcatggatgtgccgtcatcttggctcgtagcacccagtgaatcagtctacgacctggataacattaagttgagctcggtcaagtctggtactgatgttgatgccgtctacgctctcgagcacattctgatcgagggccactctcgtgatcttacaacgaagactccacctagaggtgtccagcttatcttgggcactgagaacaacccctatttcgccgatactatcatcatggccaacctgggatacttccagttcaaggcacagccaggcttgtggcagatcaacttgaagcccggacgtagcgagaagatcttcaagatcgatagcgttggtggtctaggatacaatccgcagagcggtgacgagaacaatgaggttgctctgctatccttccatggtcggacgctattccctcgactgtcgcgaaagccaggccacgaggaagacgatgttctcgagacaggagtccagctaggctcaaagatggactattttgccaaaggactcaactttgcatctgacgtcctctccagtgttggtgtcgggtccaagagcggaggcgaacagcacgccgatatcaacatcttctcagtagctagtggacacctctatgagcgcatgttaaacatcatgatggtctcagtgatgcgacacaccaaacacaccgtcaaattctggttcatcgagcaattcctctccccgtccttccgcgccttcctcccttctctcgcccgcgaatacggcttctcatacgagatggtaacatacaagtggccgcactggctgcgcgcccagaaagaaaagcaacgcgagatctgggggtacaagattctcttcctggatgtgctctttcccctctccctggacaaagtaatcttcgtcgacgcggatcagattgtgcgcaccgacatgtacgaacttgtcacccacgacctccaagaagcgccctacggcttcacgccgatgggcgactctcgaaccgaaatggaaggcttccgcttctggaaacaaggatactggtccaccttcctccgaggcaagccttaccacatctcggcgctgtacgtcgtcgacttgaaccgcttccgcgcgcttgctgctggcgaccgtctgcgcggccaataccagatgctctcatcggatccaaacagtctcagcaatctcgaccaggacctgcccaaccacatgcagcatcacattcccatccatagtctgccgcaggagtggctttggtgtgagacttggtgttcggatgaagatttaggtgtggcgaagactattgacctttgtaacaatcctcttactaaggagcctaagctagagagggctaggaggcaggttcctgaatggacggtctatgatgatgagattgcggctttggcgagtcgcgttgctggcgagcaggctgctgctggggttgagtttgtgcagactggcgaggaccgcaaagatgaattatagttgacccggtgggtttcattggagagcgattgcatttatgattacacttgttgcatttattggattgaatagtcaatctccgttacatttttatggaagatttcttctactgcatgctctcataagaattgacatcctagcaaacaagtgtataattgaatctagaaagcaagcaatagcaaaggcaaaatcttcatttcatgaagtttcacagctcttccgagtcactctcgtacttgaagtaaacttcgctgtcctcatctccgccgtctgagtcatattcatcgtcgacagcatcagcaccgtgagaaacaggtgatgtgggcaatgggaatgcttcgacaacagaatgagagggcttgaccaaagaggtagggctgccaatggaagcttgtttctgcttcttggactttttcttctccttaggggattcattactgccagatgcctggttagcctcctcggcagcgagacgttcctcttctaatatctttcgcttcttcttctcctccctcctcttccacttttgctctttgcgtgcggccttgtcttccgggacttcttgctcaatctgctctcccttttctttctcttgcctcttcttctctcgttgctccttcttctcgcgtttcctctccttcctctccttcttctcgcgcttcctctcctccttgctcttttggggggcgccgggagatgacggggctttctcgatgggaccggacgcggaatcttcattgtgcttgcgcttaaattttgacttcatatcatttttgagaggtgcgggcaagttgggctcaccctctttagactgcgcttcgtggtcagactcggcattggcattgacaatggaagatggtgctgcctcatcatggggctttgagctcggggtggtagttatcatgtcttcgtcgtcatcagtatcctcgttcacgaattgagagctcttcctttgcgtctccaatctcatgttccagtgggcacttttcttagcagcgagtttgggatcgaacaccgcgtctggctggccattggcccgcaggaccatgacctgtttcacgatcttgcgccatttgtctgcacattgttgtcgagaccgcacataaccaatctccttgctaatgttaccccatacaatgaggcgctcatccagctcgtacatgtccttgcctgccttatcgggaagcattggcttcatggtgacccacgtcgattccacagcgtcaaggaacatcttgtgttcttcctccgaccacgcaccttggttcatggtgttctggtgctcgagcttgttcttccagcgctgagtgacatcgtcatcactgcgcccaatgagcttaccaatgaaagtccatttcggaccgtgttgggcgtggagctcgataagctcatcatcttgttccttcgaccattcgtgtgccctttgagccgaagcttggaagtgtcgacgcatgaatcggtatacagatcgccgatcacgatccggaagaagagcgtagatctcgtcccaaaagtcgcctttgtggatgccatatgagaagaatggagattcgacgcttaattcacgggtacgctcagaatgctgaaccatctcgtcgaatttggcactaggaatgccatgcatggtacagacattgactttgtacgcttcgatttttcgcacttcatccggcgtatagaagccaattttcaagttgtccctctccctaatgcgcgagcttctaactcccttggtcttgcctcctggcgtgttgctatcctcagtgttgggcgagtcaggggctggagttcgcttggtggcagccagctgctttacagcggacggtccttctgcaaccgttgattcgagagtaggttgagcagtggatgaagtgaggatattcaagtttttgccattctgcttgcgaaccttctttgacgaagacttaggctttgatgtagtgggttggctgggagtgggggcattgtgaatagcaatttcaaagcgggttgagcttctttctggtgaaggtgactcggcaacggagttttctgatttgcgaggcttcttgatcttttttttgcgctcaggttcagagtcgcgctttcgctttgaaggattcgacatgttcgagtctaattctgagaggcgctctgtaccataggctttcccaatcactggagataatgcttcggtttctgatgatatgtgttccttattatttttcttcgtcccgccaaccttggggggattgggagtttcagggactgtcagattgcaaattttagtaccgagtcgcgtgaagatcaagtgatttcaccaaccgatatctccaaaatcgtcagcaatttcagggtatggttcgagctgagaagatgtatttcccatggcaatgagctgcaacaatgagtagggaggggggaagattagctgctgcaatgaaaaggagagaccaagcttcttcaaaatttacagcatgcagcgcggcaattgggttcaccgctgaagctgaccgcctatgtggaactatatcaattgctacagtacaattgtcgatggttgtaggagaacaatagaatcacaacgaagaaaggacttgagactaagataacatttgctaaaaatataaagcagaattattaaacagtcccaaataatggctggccattgtacaactttacggagactcatgtattccatacagtgttgcataacaaatctattatgtattcagacattgagcattcgttgaacacagtgctggcaggtatcatgctcatgattgcattaatagtgtacatgctggcataaagaacataagaagcaaatgcaagtcgtgaaaccaatactctaggtcctactgacacagtcaggacacgagcttcatatcccttaggattttcatcactagtttcttttggtcatgagtgtgaagattttgttgatcggtctcctgtagacagcgcccaattgcaacagtgaccttgacagcactttctgcagcgatagagcagtccacccacacctttccattgcggccaactgcaatctcaaatcctcccaagctctccagcttctttccaagttcagaaagaacagccagcccttcaattgcatccgtgttctcggcagaagtggagcttgctcgaatcaaccgggccgccataccagttgaaacatcaaataccattccacctgtcaagggtcccaatcctccatcagccttgccagttgctgggttgacacaggtgagttcaacttcggcgccggcaccgagtcccacggactgtacccgggcatacaccagctcgccttgcttcaacattggtcttgtcttcttggatgcgccctcaaaggacagctgacccagaagcgcgtgagccgtgtgtggagttaccatgcagtgaaagaaatcaacgctggagtggtggatctgagcaatgacgaagtcgttgacggtgggaatgtatcggcgattcgggaaagaaagaagcgagacggtgtttcgtttcgcatcggtcgtcaacagaccggcctgtgttgctgttaagacatgattggacccatttgaagagggctgtgataggatacggaggccggggcctagtcgtagagggttggagttgttggtaggaagatggtcttgaggtacctcatcgctaggtaataggacaagggcagtcatgatgctagactgatagctgtattctgaaaatatcctcagtgtagaatactccgagggaagaggatcaatgcttattgctgaatttctctcaggcagtctcaggtagatagatgcgactgcttttgcgcattgatcctgttggaaagaaaacgacatttcttatcaccatgtgacctcaatgaatgcccgcgatgccttatcgacaacgccacaaccactatcgataactattagccacatttgcggcagacgaaaatcttcaaaaatctttttcgatcgttccccctcaatcgagatttccaccaattacctccgatacccccggatctactctcacgccgtaacgtgagatccttgttctttcaatccaaaaaagtacatatttacaacttcgacatgggtgacgctgccaacagtgcgcccgctgaggctgagcgctttgctatcggtatctcctttggtaactcatgcagttcgattgcccgtatctcgcctgtacgtcctgatattcattctttgggtcaaataactgtgactgacacatttataggagggcaaggctgaggttattgccaacgaggagggaggtgaggacaatcaagccccacgatttgagaatttgaattaacatactcagatcgtcaaattccttccattctttcttatatcgacggcgaggagtaccacggcacacaagccaaggcccagcttgttcgtaactccgccaacaccgtcgcatacttccgcgatttcctcggcaaggaattcaagtcgatcgaccccactccctgccaccagtcggcccacccccagcagcagggctcgactatcgcgttcaccatccgcgacacctcgagcgaggcccctaacactgtcactgtttccgagatcaccacccgtcacttccagcgtctgagacgctccgcctcagactaccttggtaaggatgtcaacgccgccgttatcaccatccccaccgatttcaccgatgcccagcgtgaggcccttgttgcctccgctaaggctgctggtctcgacgttctccaactgatccatgagcccgttgccgctgtcgtggcttacgatgctcgccccgaggcgactgttgtcgacaagctggttgtcgttgctgacttcggtggcacccgttccgatgttgccgttgttgcctgccgcggtggcatgtacactattttggctactgcccacgactacgagcttggtggtgcctccctggataagatcatcattgaccacttcgccaaggagttcatgaagaagcacaagactgacccccgcgaaaacgctcgtggtctggccaagttgaagcttgagtgtgaggccacccgcaaggccctcagcctgagcagcaacgctcagctgagcattgagtccctggttgacggtgttgactacggttctaccattaaccgtacccgtttcgagcttctttccggcaaggtcttcagccaattcactgctctgatcgagcaggttgttaagaaggccgagctcgacgtccttgacattgatgaggtcattttctcaggcggtgtttcccacacccccaagctcgccagcctggccagcaacatcttccccgagaagaccaaaatcctggctcccgccacctctgtcactgccgttaatccctccgagctgtctgctcgtggagccgccttccaggcttccctcgtccaggagttcgaccacgaggacatcgagcagtccatccaccctatggtcactgtcacccctcacctgactaaggctatcggtgtcgagttcacctcccagaccgagactaccttccagcccctcctcggcgccgagactgccctccccgcccgccgcatcgctcagtacttcgcccccaaggagggtggcgatgttcttgtccgcgtgtgcgagggtgcccgtgagatcaaggtcaccaagcctgagcccaaggctaaggaggacaagcccgcccaagacgaggatgactccgatttcgattccgaggatgaagaggaagaggagacccgcgagatcatctggaagaccgagaatcccgttgctgagctcgccgtcaagggtgtcaaggctggcagcaagatcgaggtcatggtccacgtcaacgccgatcttggtctgcagatcgccgtccgcgaggtcggctcccagaacgctgtccgtggtgccgtcaacggctccgcttaggttttttttcctcgtgaaataaaaataaaaatgttggatttcgtttatggtgtgatgatgcatgcatgactgatatagaggctgtgatttttctttttgtccacgatttgtactgcagttatcgtcatggagtctttccctttattagttcttaaatagactcagttatatgcaaccaatcaatactggttctcttttcagccagcttcactctgctaggccctattcatttctgacgtatcagtcgacatttctccttctgctctacaaggaataatcattgagactagctttgctccaaagcgtggttacacaagaatccaagctatatgactttataccatttacatcgcaaagatcatcaaataacggtggtagatattatattacaactagattagataggttcgcaaccgaaagcacaaattcctgcatgatcttcaaatcggggagaatcatcgaaccatgggattcatcaacagatcatcaaaggctcgagtgccttagaaaacataaccggactcaaggcagggagagtatggcgcgaagaatgctcaattgccatcttatacaggaaggccgtagatttatcatgtggtaaagatcgtgaggggttcgtgatagcattaagcgagtgtgggtggttcgatcttccaggctgcatccgggtctatcagatgcagattgacaagatcgaagtgtaacaagcggcctcctgaagaaagaataaactctcaaaggggatatcaacgcgggaatacaaagtcgtgtgtgaaatggtccagagatcgacgttttgaagtcgacattttcaggtgctccggctcgttgtcgaaatgaggaagcgggcttttcatggcttgaggtatatccatttaagcgaagctggtgccctccttcttctggcttttcacgctgtttgagcgctgcgaagagaagaaaccacggcggcgctccttgcgtccactgtatccaccgctggtatcttttcggccgacggcaccaccgaggcagtacatcaagcatgaaaggaactggcaaacggatgcggtccacatgaaggcgaatgccttgacaccgaggtgtgcgtcctggccgttactcttgaacgcatggcggccctggacaaagacagcactatgaaatatagttagcattttgtctttgggacaaactaagttccgattatagtgatacatacgtcatgagacaggtcgtgatgacctggaaagtcaaaccgatccaggccaggaaaccggagaggtagctggcaatgcgggtgcacatggccagcataccagtgaagaaagagcacacggcgaagaacagaccgatgatgatgaaggggaacatgaagcgcgacatcaagaagtagtgcttcgatctatagcgcgcgtatgtatggttagcgcgacccggtaaattaggatatatcagttggaaacctacccgacaaactgatgagggatattttcggtcgtattaaagttacgatggcttggggggtcgaatgggaaatccacatgggtctctccgcagtcactcctgccgttggtcactccacagaggttccagaatgtccatcgcgaggtcgatgctgcgcctgggatatttcccgtgtctgcctcgaggaagtagatttggttcagcgggttgctgttgcgtacacctcccaacagagtgaggaagatcagcaagatcgctcctgccatgaaaaacaggcccgtaaagcccaatgttgctcctagagacgacgatcagattaaggtgttgtagagttgttaatcaggggtcaatcaacttactgctgaaacccattttgtttggcgcttattatagatcacctgggaattgaggggcttttttttcttttcgaaggtttgtctctggtctcaaaaaagaatgagttgctcaaggagagtgtcaagatatgaaagagaaggtgtcagaaattgaagcgacaaacgctagctggtatatggatacatataagagcagccggggtatccgggaccacttgagtagtgtgatataatgacgagtgggcatcatcctgctctcctcttctctctacaaagctcaagcccatcgacgatcataacgtcatggttgcacctgatagactagccgttcctagttagcttgcactatacttcccgcgctagaccagatcgggttagtctcaggcggtccatgacgaggtcaacaaccaaccgacgttgcacctctcgcaacaacattggccctttggaaggaaagtgacgtggaccatcgtggaccatcacatatgaaccttccaagatttcggtcttacccactcctgtgccttaacgaaaaaaaaaaaaccttgtctgcccaacccaatccccagactcgaccaagggtacacactgcgtacctcccaacccgtacaacgttgtaatggcgacctgggcatacccgccactgcccgcagagcagatcaaccgtgaggcggacactgcgctggtatgtaaaacaatatatggacccctacaacaggcgatctcttcatggaggcctggttggctgtagctatgatccatgaaggagtgtggagcccttttagtataatgccaacaacgtcttatcttaggcccgagagctagaatggctattgcattcgctgcaggattcacttgcttcattgaaggaaggtctgcaagaatgcgtcgccctcctagctccccaagaaccggggtcaaccttggtgctgtcctccttgcggtcggaaagtgtcaagggcttcgtgactagagtcggcaccaaggttgtgaaaggcgtatgtatcttgagtgtggggaagaccaatgaatatgcaactaaaccgatatccttctaggatgttcaacttcgacttgcatcgctcccgcctcctcggggtgcccccagcacccgactgaacatatcccagtcccctggagctccggaactcgtacttcgacagctggtatcggttcgagatctcgtggctcagagcctggatattgtggatgtgagcacgtggacaggcgatcccctcaacgctggcttcattttcagtcaactacaccttttgctcgagacaatcagcgaggcgcgacaaatgttgaaaggagaaagcgacgatacgcgaggcaagtggtgggataccagtgccaccgaagatgtatgttcgatttctttgacagaagtacttcgatatttttgctgatatatatactacacagatgtttgaccctccgcttccgccgcatctttctttccatctctccatcacagactccgccctggtccttgtccttcggacactggagcccactgccctcaatcacgcgccaaccgctttttcctcggatatctctctgaccgggttctcgctacgagatcggatattcggttcgcgagcgccaacccatgatgaggccggtagcctttttcaatggcagggagaagaagttcgtgtcaaggagaaggtgcgggtggagagccaagatcccagtctgatggcggtcatggcgaaactatcggcccttgagcatgaggtgatgcggtgcgttgctgcgctgcgggtgctcatgggcgatgaagatacagagagcgaggcttaattatttgattgataccctactgcatttggattatgaacagctgcttgttgcaacacttgattcattcagtattcgagttagggcctttcgaagtattgaatgggctgtagtttgagatatgtttttagcggccaccttaaggcttcctagggctaggactttgttagcatgccgtatgaaataaatgataccaaaagcacccagcaatataaccgcatattcctaaatatgtaccaacaaaaaaaaaaaaaaatcatccttggatgttatagatctttgataggtaccgagctacatagaacgcgaccgggggaccagccaatgagaggcccgcagtttgtgatgggcccgcatgaccatcttggcatctttttttaggcttggccattttctttttttcttctctcaacctctcgaaaagggactgtcgacaagagttggaaaatgttatcctggtcttcagcatcaggcgctagtcggtcgcaatcgcgcgaactatttcacaccttttctcgcccttctggatcgcgacagctccgcggacctgccaaccgtgtgatacctacaccgcaacgcactttcatccagaaatcgtcgcctttggtcgcgtctagcagtttggcgcaccgaaggaacacatcagcacaatgtcagcctcagcggaggtttttgtcaagcccagtatccgccgacttgccacctcaacccagccaatccaccgaaccagatgatatcaatatcctaatcgatcgaatcggcgaaaatgaggcagaaatggtacaaatactcgaagagctggaaattatgggagaagagggcgaaagagacgagctcatggacctgatcgcccagcgagacgaacacactgcagagtcgtgggtacacatgattaaacagcgctttggagatgaaatgccagaggggttgttggacgatgctgagctccagatatacgcccgcctctatggagaaccaattattcgacgggaagtcgaggaaacggttgaggaagaggaagatctgagcttgctccgcgaagatgggcaaggaggatgggaggaagtcgatttagaaggaaacgctgtcgccgaggacgaggccccactcgtctatgatatggacttttccccggaagagcgggaaacacttgccatgcagcggaccagagaagtggcagagcagttgggcggcgaggtcatgctcgaggaatttgagaacgaggcagttcctgactccgctccaagaatgcatccactcaccctcgagggaaaatacggaactgatccttcaactatccatctgccccaggatactgtcactggtcccatatcggtaattctatcggaattctccaacaagcacatttccgagactgctcggcgcctgtttggaggaccaggattgccccattcgagtacaacggcacctccacgtgcccaattaccacagcttcctgtcgctcttcaggcttcgcagcgtcaaatgggagaaatggaggccaacgcatacttggcagccctgtaccctgggatctacgcatcgaccctcagtgttatggttgagattcgcaagcgattgggcatcgattggatccgccgtcttatcgctcaagagggtgggccaaacgttcttgatgctaacggtggtggtgccggcatcctggcctggagagacatcatccgcgcagaatgggagctcatggtgcccgatcatcccgcgggagcacccatcccatttgggagatcaactgtgctgacaggctccgatgctcttcggctgcgcgcttctgccatcctagaaaacacgactttcctcccacgactacctgattacgtccatgtgcgcgggaagcctacaattgacgactcgcggaaggcccctaaacgcaagcagtacgatatcatcatcgcaccacactctcttctcggccttgaagaagaatatgagcgtaaacagcacgtggagaacctatggtctcttttgaaccccaacgggggtattttaattctgctcgagaagggccgccagaagggcttcgaggctatctctggcgctcgtgaaatgctcttgaagcgccatatcgcaagccccggctctaccgaatttgacaacttcctcgaagaccccgaccaacgcgaggtcattgagaaggagcgcggaatgatcgtggccccttgcaccaaccactcaacctgcccgatgcacaattctgcaggtgctactaagggtcgtagggactactgccatttcgagcagcgatacattcgccctccattcctgcagcgcataatgggagcgaaagaccgcaaccacgaagatcttaaattcagctacctcgccgtgcagcgtggcgtagacctacgacaagagcaagcaattcgtcaagattcccaggctacagatgccgcatttgaagggtttgaggaccctgaggagtctgatatccctaacaaaccagccttccacgctctgtctcttccccgcgccatttacccacccatgaaacgccgcggccatgtcatcttcgatctctgcacacccgccggcaaaattgagcgctggaccgttccgcgctcttacagtcgccaggcctaccgcgacgcccgcaagtctcattggggagacctgtgggccctgggagccaaaacccgcatcccgcgcaacctgaaccttggcgataagcatggtgagggtaagaaggagcgtctggcccgccgtgtggcgaccaagaattctatgcgtgacgcagaggaagagggtgactttgagaatgaaggagaggaggaggaggatgaagactatacagttgatgactcggatattcctgatgtccctgttaaaaagaggggccagcatatccccagttggaagaagcataatgataaaaagaagcttcgtcaagtgtacaacaagcgttctgccgacgaataagtggctttgatttggcgcaattctttttttggggtttggatgttcgaaaacatgtactatactaactactggcagcatttggcattgggacggggggcggattggatcttgtttgtacactaggatattattctcacttctacagatgtaaatatagcatcttcactctaatcaatgtttgataggtatctgataggcgtcatttagcccagagttaatttccctctccaatgagacggttggggagacggttgggcattccattaagtcggtcgtaatgaagcaaagtcttgtcacgacctgggggaactgagccaggcccaagaagcgccggtagtcacagaaaccttgtctaagctctgcaatgcacaggccgttctttaaaatgcaccgggcgcgcggggcattgatgttctgagaaagacagccgctggcttcatgcttggtactgttctagccagagctggcgcaccatccacagtcaggaatgacatggatagaaatcaaatgaaagtcaggttggagccaaatcctactgacaagctagtcggttttcgtaatagcagatattcctatctcgcaaagtgacaccgccacattcactgcgctgccatactctttcgcaactgcctttgcttctgtgtgctttgcaactccaatcgatcgactgcaaatttgagccgttctttcttctgcacgagtcttctcagctctgctgccttggatgctgctgcattacccgacgagccagcgctggaccccaccatgcgaccccgcagtgagctgctttgaggttggctgcgagtagctgatgaccggctctccggggtagacgagagtcgaccttcttgaagatcgcattttgccttgaggccttgttcgcggcgcgcgagcttttcaacatggttcgatgatagtgtgaggaggtgggcgatgctgggagtgatttcgtcaaggagggattgctgcgcttcgcgtaatgtaggctccgggaggagttcaaagtgctattcaaagacaaatggttagacttatagcttcttgtttctcctcttggatgacaccttgggagagcatactcgagttgtctggaggactttacataaacgagggaaatcgttcacgcccgcatcgagggtggatatagagttgtccaagatctggagagaggatcgtaatgaggtaaccgaggaagacaatgaagctgccatagtgtgtgatttgaagctcagtttggagatggttgtttacagtggtcgggatagatcgggctgtaaaagcggcatgacaccgcctttaaggcggcgtggcctcgggaccgggcaaacctcccaaacctcacttctcctcttccgtcctcctgcctcaccatcttcccgaacgccgaattctccccgcattcgattcacctgtcaaaatgtctctcctcggaaagaagttccccggcgctctcggtatgtgttttttggaccacgatcatgacttgtccgagaacgatatgaggaccattgactgacgcatatgctcttttacagccacacctatgactcccttcttcgctgccggtatgcatgcccttgaaaatccgaaattccctgaaaatccgcaacgcatggattgccaattaagaacactgcaccctttcagcagtcattgatggaacattactctgacgattctcctctccaggcctcattgtgctctacggtgtcaactctctccagaacgctctgtccaacagtgagtccactccgcacggctattcatagatgacgacgattttgcggtcacatgcgacaatatccacaaaacaacgctatgatgagcatctgcgagcatcagctactaaccttcatatccgtacagccgctcagtacaagaacgacccccgcaacgtcaacgctaagcccgctggcaaggctgaccactagattgggtcgacaatgaatgcattttgagatcccacttgttcgttgaagaggagcgggacgaaccgtcgcgatgtgtgggcggacggagatggcctaggtcatcaatggccggcttgcactttttgtgattactctgcgagcagttttcccctgttcaagcatatagagtgtacccacttcgattggggtgacttggatcaattcacaaactgtaccagtaccgttctgagcaaggcgccttttccttttgtagtgtctcttctgctggatgatatcctatatttcagagcaaggaaagtaacctaagccgaatattccggagcctgttgtattgcaggtaaagctatagggtttggaccgtatacttcatatctgctcattgcggcgctatctcacttagggctagtttttcacttctttgcgaccgcgcaataagtcgaaattagcccttattcaatgctttgtcatttgattccaattgtaacagctgactatccctagtactagttagtagggctttgataccgctctcttgtatcaaatacgctaaacccgatcgggcatccagttttcgccaactccgcctggccgaaggacaatcattttccgacctcaactccgcaataaccccaattaaacacgccaaaatgagcaaaacgactaaaatggcagggcttttccggcccaagaagcttgatctctctggatttgtcaatacccgcttgattcgggacaacaacaagcgcatggccttcgagcagactgagccagaacggtacgaacactgtccatctcctagatgctccagcttgaccgaggatggctatcccgagctggaaaatgcttggaattgaaaaacaaatgctgactctgtcttccttcgcagacaagctctccgctacatgatccgcaacacctctctctctggccgagtgcgcgcgcaggctcagctccaattggcgcagatgcacccctatactcgccctacgcagatcaagaaccgttgtgtggcatcaggcactgcccgcagtgtcttccgcgatttcagaatcaacagagtaagtggaagacttcagccaatggcctcatattgctaacactatatttttctacagtatcaattccgtatgcaagccctcgctggtgaactccccggcgtgaggaaggccagttggtaattgtatgagattattgctagttctctgtaatatgtggagaaatctagttgaattgtttgcacgatggcgttttcttctttccttccatggggtggaagcatgtacaatatgcatctctcattagtagagaaatcaaatctttctttgttatttttggatcctccgattcaaactctgctactctcggcgtaggaattgacttattgacaggcctaggcgttgcctgatcctcgtttgctaatgtcgtgagatcaggctttctttgttggcagtgttgagaccgtctcaattgggttgtttgcttctatcatggtggttagttgcagatcagcctggctcatttgattgatacctgactgataattcatcatatcagctcagtggtggtgtatatcatcctcaatatcggcgagaagattcttcatgtccgcatcatccccagtaattgcgcaagtagggagctcctcgatacttgccataatcatatcgtgccctgtcctgaaatcactttcaaagctgcggtgccttccggtcctgctcgtataaaacctcccacctcttcctttcgttttcttcttcctcttcctcttctaattaaccatcactcataaacatcacccatcttccccttttgtccctttgaccttcttctcaaatcaacctcacacattgatttgaagcttcgccacaatgaacagcattccggaggacctcctccccgatgacatcgtcttccctgaagacctgctggagcttgggtaagtttttccgtggttttcaaggtgacatcttagccttggagtctaacagtctattgaatggtacagattcgtcatcaccaaagatgacaagattcgttacatcgacgccccgggccagggccctcgttacaagatcaaccgaagtgaccgcataaaccaggtccacattgaggcccttcacagtgagtttaccattagattcatttccatcctaggatgtggtttggatgaatcatttggcgctaacaactccacagaagcgattcacatcagcatcattgaccgcctcctaggaatgggcatgcatttcatggaggtccccgagggcagcaagcagcagcttcccatcatggtgtcgggcaatgtgaccgctgcacctcgaattgttgttttcttcggtgagattgtcgaggacctgggtgtcttctcgtaccgtgacgcttgcgatgacggtatctctttcggttcgatcctgggctttgcaaagggtctgctcggtgagaattctctagattcgccgaatgctcttattcttgcgaacgcgggccaaaccgtctggtacaatggaaatggtggctcggcgatgaccacagacagtcttcatggccaacatcgtgcctctgccgtgcaccgcgaacgttcactgggtgcccgtaacatcattaggggcaacatttccattgatgatcatgtccggaatatctttgagcaagtcttgatgcgcagtaacttccgagtcgatgccagaatcgacgtcattggcctgtctgagggcggccatgctgccatggcatacctgaagaatcgatgtgagtgtctgactgaataaaatacctagagttcgcttactgagatggttctagggagtttctggatgccccacatctcctccctgtccttgatcaaccccgagacgattgttagcactgacgccaacaaggcttccgacccaaaggagaataacttattcggctggttcatgaaataccgttgccgtggctggaccatctgtgatcagccgattggtacacgtctgcgcggtcttaccctccctcatggttgcaacacgtactcctccggcgaaggcacgaagtcgtcgggcatgattactcgtggtgtgggacacatcttgacctggatgaacattatgcattactccccagcggctatagagagatttgatgtggtcaagggccagtataatcccaacttcgcagctgagctcggagcaatgacctacggagaccaggcgcaactccctagcggcaagattgaagtgcacagcctggatgttatgaaacagattaaagacttcctggccggcgtcaatttcaccgaggaaatgaccacttttttcaatgacaagtcgtacttcagtgacgatagtgacaacgaaagcgataacgacagtcagggttcggtcgtttacgcagataaggacaatggtgtgttcggcgtccctcctgccattcctggcactcctaactccttcaggtgctcccaacactcctcctgacactcctgacgctcctggcggttctggcggttctggcgtttctggcactcttgacatgcctgttgacatgcttcctgacgcttcctctggcacttcccctggcacttcctctgatgcttctggtgttcgtgatgttccttccaccatccctggcggtcctgacgttctttctgactttcttgctgacgcactttcagttccggaaagtccaacctactatgacgacgtaatcgtcggtaagactggcccgttcgacctcagtgatctgcaggccatccgagaggaggacgaagggcaagagtaaattctctgagtgtgccctgggtttcttctggattttttgtttcccggtgttcctaccggtttatttttgcttttgcgctgggattattcgcgagcagatgcatgttctttcctccctacttgaggtcaattgactagaaaacacaaaagcacaaaaaaaggagggaaatgaaacccatctgcggaagcgaatcaataaaacctagcgtatcaatttcccaggccatttttactgtatgcgacgtgagtacatatgtacatgtaagtatgttgggatagaacggtggaattgttcaatgaaaacccggcaaaatcagggccaagacggccacgacggtcacgacggtcacgacgcaacattctcaaccctttccgagacaagcatttccccccaccggaacagttttgatcgagtaagaagaattggaccggaagatgcccagacgagaagacagtttccatcgagtaatctgataaagcgggccattgataagcggcaattgcccggagattccacatcggaggtggccgacggccttttctcgcctcgatcgatatgctatactcgtctcaacatgccaatatcccagagatataaaggcacaggggcatggcctctcaggtgcttcctcgtatggcaaaggtgaaggccattctgcagctgcatgactgtccgaaccggctggtttgcgagtacataatggcaacaccggggtctggaataatggctcggcagtgggcctgtggatattctcaggatattccctgggtaatccccttcttcgctgggagggagatcctctttaaccccaaggtgggcccggactgtttttttcttcggaggcagtgggcgtatttatatctcccccggtccccttatcttaggcctgttgcccctcttatcttctgcttatctgaacggctttcttatatttgaaggttatcttttggttatacttcagtcttcagttcgacatatctagttatggcaactaatctcccctccattgctgtggtggcttcatctcgcgccgttatctccggccgtttgacttctgccactgttgtgatctcactgacaaccggtaagatcaccgccgtcttcgattccgtgatcccagcatcggagttccctgtgaatactccctataccgactactcgcctcatgttttgctacccggcctggttgatgcgcacgttcacctgaacgagcctggccgcacggaatgggagggcttctacacaggcacccaggccgctgcctttggcggtgtgactactgtcattgatatgcctctcaatgccatccctcccaccaccaccgtgaacggcttgaaggagaagatccaggctgcccagggcaagtgctgggttgatgtcggtttctatggcggtatcatccccggcaatgcgggcgagctcaaggctcttgtccaggagggtgtccgcggcttcaagggtttcctgattgacagtggtgtaagtgaatgatatcagcatcgtgtgttctccaattagtattaacattcttcaataggttgatgagttccccgctgtcgggagagaggatattaagaaagtcatggccgagttggccgatgagccaacaactctcatgttccatgccgagatggtgcctcccattaccgcatctgtgggcgacgaggttcagacatccgatgcacctgccgaccctgccggcccccttgaggcgtatgcgactttcctggcctcaagaccttcttcattcgagacctgtgctatcgaaagtattctgtctttggctcatcttgctcccaatctccctctgcacatcgtccacctctctgcaatggaagctatccccttgttgcgggaagcccgcgccaatggtgtcaagatcacagccgagacctgcttccactatctgtccctagcagccgaggaagtacgcgacggcgacacccgccacaagtgttgcccgcctatccggtcaaagctgaaccaagatagtctgtgggaagagctggagaagcacactggtgacggcgtcatcaagaccgttgtctccgatcactccccttgcacaccagatctgaaaatgcttccagcccatgtccctggccactgtaccggcggcaaggaagaggagagtggtaacttcttctctgcctggggcggcatttcttccgtcgggctgggcctgcccattctctggacagacctcagccgccggaagggcctgacttcctcgccagaagacgagaacaccaagaacgcccttcaagacgtcgtccgtctctgctgtgccaacactgctgcccaggttggcttgcagtcgcacaagggcgacctggttgtcggctttgatgctgatatttgtgtttttgatgactctgccgaatggaccgtcgagccgagcaccatgctcttccgcaacaagtgctctccctaccagggccgtactctgcgcggcatggtccgcgagacctggctgcgtggtgagcgtatcttcagccgcgaccagggcttccatagccaatcgccacacggcaagcttcttcttgagaaacgagtttgagatattccctgctttcttactcttcttctttctttgtccacgcttatctcggcattgcgccttgctatctcttctatatctctgccactttacatctcgatctcaacctgtgagatcgaaccctctgatgaaccctctgatgagcactaatgatcgcacaacattcatacccgttagattaatgacctcgcattctagcttttagatagaatactaaaagcaatcaattgaatccttccaagtctcttaaatcaagctagcacagagaaatacagtaatacagtcattattgttgaatactatatagatacatatcaaagactcccaacatccttcttcccatccctccccttctcccacttctccctaaccctcctcctaacacccccattaacccccttcccccaaatttcctccttctccgtcccaacctcaacagcctcatccgcactatcctcctctccaaccggcccaataacaaccttcctctccttaaccgccctctctttaaccctcgcccgatccaccttttcaagatatgtccagtacaagaacgcctctgcaacggcaacactcagcgccgaaaacaacccgagaagaaccttaaccgcctcgctcgccactatctccggcgtcgggaacttcgtgagcgccgcgtacacgccgaacccggtcaccaccaccgagatgaagacactcgaaaccagtgagaccgtcagcgtatcttcttctactcggccgtcgctcgtgtagggcgatgcgtgcggatccgcgtggtcagcgtttggtcggtagtttgggtttaagagtcggttgtaggattcttgttcagttgctgcgatgaggcgtgcttttgatgcgaggtattcggcgctctgtattatgtaggatgttagaatctggtttggtgtggtttgtgtattggaggaaaggaagggattggatggggttgtgtatagaccacgtacaggctctggcttctttggcggcggagggacgtagactttcgtgccgcggaggagggaactgaggacggttgggatgtgagaggcctgctctttgtattctgggtcgttttggaggtatctggcgagccggatcagttgttcgtgggctattgggccttgtgcttccagcgtggtaggcaagtctagctcctcgtggcgcgaagctggaatagcttcgaacgcggcgaggatgcgatctgtcgtaagaaggaggaccattatgatacaatccaatggaattagggcagttcaatagaattgaggtttagttcagttcatggggagataaagcggaaccccaaaaaagtggcagttaagctccccacatcgtcatatcttcctctctcctctctcacatacatttttgcgactatggcggactcaaagaagaggtaaatttatattcctattctatatatctacatccccttctatctgccaacctccaacctcaatcccatgcccgcatccacagaatccagaaaactaacccctccaacagcacggtaacaacacaaaccaacccgcgcgggatccccgtcgccccattcatcgacaatgtcagcgactacgtctcctcccgcgaggaagtcgagcccactctccgctccttccaggagatgatctccaagtaccagttcatggaggtgaacacgcagcgccgcggccagggcttgcgcgagaagatccccgatatcaaaaagacgctggagatggtgcggttcttgcagctgcgcaaggaggtaaatatgccccgcgcgcatcctctatttatcatacgcacttcgaagaaaaggcgatttgtggaacatccagctttgggaaattgaatcggaaattggaattcgggaatatcaagttcactaacactcacttttctagtccaacccaggctccgacctcgaaactagcttcgaactcaatgataccctctacgcccgggctgcgatctcacctgctgatgccgaggaggtctacctctggcttggtgcgaatgtcatgttggcctaccctctcgacgaggcggagaccatgctggatgacaagcttggttctgcggagttgagcttgcagaattgcgaggaggatctggaattcttgcgcgagcagattacggttagtttattcggtttgcgggcataggtgtgggaggttggtatattggcgcttttgctaacatttgactttttgcagacattggaggttgccacggcgcgtgtgtacaactgggatgttgtagaaaggcgtaagcagagggctgatggcaagggtggtgaagaggaaacgaaaaaataagaagcgccctggtggctgaatatgtcttgaagagatttatgggatattataaaaatgttgccaatgtcatcgattatgaagggtctattatcttccaggttgaatgtcaaggaaaagaatcaagagaatcataatgcagcatggagaaatattgaaaagaagtagtgaatattaagtatacgctctaaactaaatgccctatgcatataaaccgaaaaaagagacgcatgtcatgattcgtgaaaaccttgagaggtaatagaaaatcgccacaaaaaaaaaaaagaaagaaaaaacagaccatcgaagtgtcctccataacttcgttgagtttgaggacgccaccttcactatgaaccttccagtccacgcgcctgtacggcatattattgttggcgacaggggatccgaagatggtagagaatctcgacggtgcgctgctgtgtcccaaacaaaacgaaatgctaatcattcaactttgggaaacagaatcattggaacatgttggaacctagtctgtcggcatcagaagcagctcgctcacgcatccgcttcgagatgtcaaagccagtttcatcaccgacaaaggtccactcctcaatgtcatcaaggtcatcatcggctccatccggggaggtcttagctgtaggtgtaggagagaatggggtggacgaagcaagcgacttttgtcgggccaaggtcttcgcgtattcaagatcacgataaagggcctgaattgcagtagccacgccgtcttcctaaacaagggaatatcaaattagcactccatcaattaagcttgggtagacttagaacaactcacattccgaatctgaacacccagatttgttgccctcataatcatacgttcactgtgcgtcgcctcccacagagcccgcgagaagacactgacgttcagtttcttcaagcagatgccaacacctagatcctccacccgggagccgaagaagaactggtctccgaagaatggcttgatgatggtggggacgccagctcgaagacttgccccagtggttcctgctccaccatggtgggctgcagcatcgatttgagagaaaagccagtcgtgaggtgcagattggatctggtggatttctggtggcagaggtatctcggtcttcgtgctagctgggtcgccaagcctatcggaccatcccttcgagaggatgcatcggacatctgctttctggactgattcgatgacggtccgtgtcagagcagaaggatccgagaccacaatggatccaaacccgatgtacacgagcttcttgccatccgctctggcctgtgcaatgaaattcgatagttcagtaggaggagtccaatctgtgccctcattcaaaaaccagtagccggtaatgcgaatccaatctgggtaatcaagaggagggaccaccacggagggcgagtagttatagaggaacggaactttgttctgctgcatcttgtctagggttgtggccttcaatcccaactcgttgtttcgccagcggttcacttgccccgcgatggccttccagaagatgttgtcgaacatgacgtatgtgatgtagttgtatgctccacccatgcgattctctggcactgcgaaagcatgagggtaggcccgtgttcttgtccatggcatggtgaatccgcggaagtacggaatccttaaagcctctgcaatgtgaattccggccatggcgctcggtgactcgattagaaggtcactgccctgacaaccaatccaagccgacgacaagaggtcatcgatccatcctctgaacttcattgaagcttccctaaggaaggaatatgtaaacatcccgttctccacgcaaattcgcattagctctgcaggatcaccgtcaacgggagcaaagtcaatcccgtgttttctgatccagggctcgaactcggcgtgggttgcaattttcggtttatggccctccgcaagcagtcctttgcagagcgcaatgtacggttgcacatcgccccgggagccgatggttaggcaagtaatccttagaggctcggaaggtttgaagttgataatggaagcgcgaggatcgtcgaagaacggatgtatttccgatgaatcctcggtgaaagtcggacgtgcatcatcttcctcggggctgtccagccttgcttcctgaagcatgcggtgctcagccttagctgcttcaacttcgtctcgttcttcttctgctagcaagccagattccaccaggaatttcacggactctagattctgatgcagtgtgactgcacagtcgtctcgtgaatcggaggcattgaactcaaagaaaagctcttcatggccacggatgatgacaacaagtccatggtacccaaaacggaagcccttctctttttcaacgttctcaatgtctttgaagggtagaatcatcttggtccgagtgccaggaatcaggctccggaagcaaagtttcttctgacttatatagatcttgccgtatagcgggagcacacgatgcaaataggcgtaataggtcgcctgcagtttttcggtagatggaagagcgaagtgtgcgcgaaagcgatctccataattgaatgaaccttcgttgtcctcgggatcaacgttctgatcttcaagcaacggcccttcccgttctccataatgcttctggccaccaatccacatgccagagaccttttctatatagcccattgactctgttgctaagagtgtactcatttgtttcgagcggctcttcaagtattctgcaaaaccagcggcgcgttgaagggggtatgcgcccactttgacaagatcgtttaaatgagtaacggagctcggccctgaagattgcattgtattagattcgccagcgatatatcgcgtgtcttcggtggtttcattgcgacctagtgttctagatggagagcctgtcgctgcacctaggtccagccgtgtagacgcggagggggtcgtatcatcagaattccgttgaatattttctccgacacccaatgagcgtccttgcagtgtgcgcatagtgggtgattggaagacgtcgcttctgtgtagtatctgactggcagattcagtggtatctgtcatggattgtacaatcggcgatgattcggtcccttgctctgcaaatgaatctgtcgagccttgattttcgtgtcctacgctggagcttcgcttgcgcggtgaaacttcctgcctctgatcagacaaacgaacgctactgactgactgtctcttttgatttttgatatcgtgttggctctgcggctctttcattgcagaggtagccgacgcagcattgaccaggcgcttgatgtagttaaatgcgtcttggtccgaatcaaagaatgagaaaaagtactgtgaactgattagcaatgaacttagtaacgtttcatccaacgacctacctcgtcaattgcgtatgtttcgccgctgtcgagaactcgaatcttgaatgtctctgcgaaatcggccattgggctctcctccaggtcaataatattcgctattgggaatgatactttgacactgtcgccttcattatgcgtccggaagatgactttctggagggctttcacccattcctttgcactggtagcactgtctgctctgaataaatatgtccgctgatcagtggtgacctgaaagtccttcacatcaccgtctttgcgatctgcgagagacgcagagatcccatatcgaagatcgacatgtccgctagggaaatagagattggagggatctgcgtagtatgagaggacatcacccttcagcgcaaaccaatagcgatgatacgtagggttcttgcggccgcgtttggataggtatcccgactttatcgccacgttggacttctttgggaggtaggcgtaaaagcagatgtgaccttctgtcacatacatgtagccttgaagaagcatgctctggagcaacgagcatgcatactccaccagaaccttttcgggcttcgcaaactcaaacatcttcatcaatcgcgtagaaagagcggacgcggacgattccggttggtcttccatgggtttgtttagatcgggtggcgagtgtggtgttgccgatgttaagtcaaagtgagattgcgcttcaaccatgcgacttagaaccggggctgctcgcggcgtcgcactgcgagttcgccttaaaggaggcaccttgagcatcgggtcgattgggtttgatgactcgcttgcctcgtcttctgaatctaacttgggtaatctctgcaaaagcttattgtctgaccttgttctttgatggcgacgtcctctttcttccagaaccagtgtgtttgattctggtctcttgcttggctggcgggagtccaaggatggcacaggcgtccgcgatgaagggtttccactagtttgctccatccacgggtgttcttccatatctccatcactatcacttgattcctcaaaccgggcatggaagtccgacttggacccgacagcagcaatcatggagaagagggactgttgcatataatgcaaattgccgtcccgtgaacccataccttgcggcggagctgtgaaatcaaactgagcatcatccccatccttaaatttgtctggcactcgatctgaaaatggacggttggacgaagtaggtttcatacttgcgctcaactgccggtctgcccggcgtttggcatcgtctctaaacggtttcatccttatctctggtacaccgatacgatacaatcgatgcaaaatgtgggtcaaggatgggagtaaacgatgctagggcgcggtgaatcgctgagatcggtcgggcagtcagaagctcgagccaggtgacagctcggcgctgataggactatgacgatcaggtatacactagtcaaacggcaagacacatcagtctggacaacatgtgactttgtcatatcaaaaccgcggtcaggcgccaaaatcgtgatgagcagggttaatggtgaacaacgcacgggatggcagggtctaggccgataagcgctttgaagcttggacactatatctggatgatgctgtcaatccacactccaaatcagccaagcgccatgatatatattaaaaagatgatggaaatgaaaaaagaatggaaaggaagtccaaatctatcccaagagttcacagaaatctcagaatgcacaaagggagaaacatcacctgggctctctccgcatgcatgtgatctatgactccatcgccccttatgtcagctgagtgcctgaggcaaacagaatttatatgttgtaggcctttatgcctcttcagatatattgaataccaaattgaagttaaattgaagttgaagcctattactttgcgtggaagggaatcttaacttagagaggcgtttaaaaaaagagctcatcggactacactcattgcttcgacactatcaaatcaacaaaagacaatggaacacagagaaaataagattgtaaattgtacatagtattggggacgtcgttaaaccaaagctattctcaaaacacactaacgccaaatcatgccttttcggacttcttccgcttcttttcttccttgtccttgtgggacttcttcgacttcttccggctcagattatcatcctcatccttttcttgtgagtgcttctttgacttcttccgaggaagcgctgcagcttggggagcttcatcctcaacgtcatcgtgatcaagcttcctcttccgttcctctcccttgggaaccttgaacgaaggcgcctcaccctccgattccgagctagatccaagcgtctctggaagcgcactcgttgtaccgacaggccggaagcgcattttcatgtgcttcggctgcggccgggctggcttgacatattcgcgcaactctgccactacagcatcggtcttttttgatgtgcttgggagaccgatcatttcttggacgtggtaacttgggatgctttgggctgctgtggaatatgtttgtgtcttctcgtcgaaaagaagtagtgatttggttgcgggatcggcctcggaaagagcctcggctgggatgccgtagttcacaccgtcgtgggagatgatcggttcaccctgcatgatcttggccatgcacacctctttgattttggacaaaggtagagaggccggtgctgtgaggtgaaggacttgcttgccgtcgaggttggagagaagggaggagactttggaggatggcggggcctgcttctttgcagacttgaaacccgctggtggtttgtatagctgaggaccggagattacaaccctatgggcacaagtattagttaccataagagccgatagaggataatctctcacttcttgcctgagctggagtcgggcttcatctcgttggagtcgtcggagtcgctatccgaatccgaacctgagtccgaggtatcatcttcgcttgattcctgtacctttgtattcttcgtcatttctttctctttttcagtcatgaggtcaagcgaggccgatctgctcgagctgctatcgctgtcggatgatgccatggcgattgttcaattgtgtagggcaaactcgaggtcgacactcaaatgctttcgcaagaatgcgcggcgtttggtacacccgaaatccacaagacgaatgaaatgaaacgatgaagtaatgtacagggtatatacgcgaagtttcagcaaagccgatttcgcaaaatgaattggatcgacgttgagtgaggatgctcaggtccaacgatctttttttttctgctccgcgggagcacggaccaccagccaactttttttgcttatcggctttggatcgcattatcgaggtcgatttcttttcgaacacaagctcgaagcttgtctacccggactgtataatatcatggttaagcgaaaggccgaaaaacagcaaccagctggtaagccgtctatccatgccctacaactctaatttgaagctcacatgtcgtttctctaggccctgttagcgctgtcgctgctttggcagcgcgcagagctcgacaacaacaagaagcacagagcgcgaatgtaccagcggatgcaccgcaggctattgttgcgagcgaaccaccctcgaaaaagtcgcgacagtctctcgatggacctgaggcgactgggacaaaagaagagcatcgtacacggacaaaggcagcaaagaaacaagataaactattgcgcacagagacaataccggagcggcccctaagagctacccggcctcaagaattggaagtgaagcccgagttggaggatactcatgagcacctctcagacgagcagtctgaaaaggaccaagtcgagcatacagaaaagatggatgaggatgatattgcatctgttatgggtgatgccgatggctatgaatcacccgcagaaacacccgcagagcttcagaatttccctctatccaaggctcggttgaacgaaagcaacatagtctacagcgatgagagcacactttgcattcgcattaaggaacgcacggtatggatgaactttccggccatttggagtgaatactgatctttcccttagaacctggcgttggtgggccattatgatctctgggtcaaaagaggtgttgtcagtctgatgggcgcgaagttacatccgtcctcgcagttgcatagagtttatgctccctcgacccactctttgccagttatcaaatgtgttgctggaattgatggcgacgcagaagtagagatcaagtcttgtactagcggtatctcccgcctccgtgacctctcgcctctgtatcaaaggatatgggctggtgagaacaccgctgcagataaaatcaccctgaaaggagccgccaaagactcaaagcggactttttcagtggtatgcaatcatactctactccagctcgagctgtgttcaaagctaattgacttgacagttgtatacttcggcagatgattctttaaatagacatatccgaccccttcacctcgacaagaaatggagcgcgtcgatgaaaggtctctcacaacgtgaaggccaacttcgtgttctaatttgtggccccaaagcatccggaaagtccacctttagtcgctacttgttgaatcacgttttaagtccgacacccgagaccgagaatggatatactaataccgatggagttgctttcctggatctagacccaggtcagcctgagtttgcccctatgggtcaagtgtatctcgcgcggttgcgctctcccttcttcggtccgcctttcacccacccatcattggacgattcccgtgacggtgaaatagtgcgggcgcatcatatcggcgcagcgtcgccaaaagaagaccccgatcactatgcactggccgtcatggatcttatggatcaataccgctcgttgctggagaaacatccccaatgccctctgattatcaactaccctggttggatctttgggcaaggattagaggttgcgacttggctggtcagatctctcggtctctctgatgtggtatatatgagtgaaaaaggcccatcagaagtcgtggatccgttaggtctagctgcccgtgaggcccgagtccccttgaccattctcccatctcagcccactgattttgtgagccgatcaagcgctcaattacgagcgatgcaaatccagtcatacttccatatgtctcatccaaatgatctcatcacttccctttggtcagatgtaccgctatctcgcacgaggcctattactgtggactatgccggtgcacgacaaggtattttgggcgttatggtaatgggatcacagatcaatcccgatctactgcacgagacccttgagggtgctatcgtaggcgtcgttgcagtggaatcgccgaacgccatcatgagtgagatgtcagcatcaaatgacgaaggccatgacgatattgacatgggttcagcaaactcaggcgcgggtaattcggctgagctttccatccctgactgcattgtgcgaacatccgaagatcttccttatctctttgttggttccggtagttgcaccccattggatcccaaagcgtcaaactgtcttggtcttgctttggtccgttcgatcgatacctcttcgcgcaagcttgagatctccactcctattccctcatctcacctagaaaaggccatcgagcaaggtcatggcattgtgctagtccgtggccagcttgataacccgaattgggctattagtgaagagtactacgccgctcgtgcggcagagcggcgctaccagcaatcgacctctgggccgaggaaagctggagacattggcagtgaacaggcatacgagctggatccggccgagcatagtcgaacgcttgcactgctgcgagagagggttcgccgagcgagcaatgtgccttggatgactgtcgtggaagataatagtcgtcaccagcgtgaagttgctgcgcgacgagaaaagtcactatggaaattgaggaagaaggcatatcccggcagcgagagcgaggcggactactagctcccttctatcaaatatatacatagaatttaaatgtgacagcagtttgcacataaagttactgatttctatgtataggcctggaggtttcacaaggcatttccaccccaaattcctcattatttgattctatgacctgtgatttctctcgggtttggctactgattgaatccgtgatctgtatgtagcaacagatacgaatgaagagactaacttgaagcattgaaaataccacaaattgagcgaagacaggaggactaggtgtcaactggtagaattactatggcctgaatttttattactttccatgcaacgcacttttcttgacatacaattctagctagtcaaatcttttcatttagacctatagattgatatctggaaggatgtagtccatcctgagccaatggcaaccatacatcctcatgcgattccacaattcagtcttccttcctcgcttaacacagtaatactttccataataccgtagttttacttgccgagatcgatagatgtcgatacagatatactatattccgactttctccccggcactgtagatactatgagatctttagacttgtcctagttcaccccttatgcagccaccattctacaacggactagagctatggtaatgccaatgttcgaacagacacagagttttccaattattctactcaagcacagagatcctgtccacgcttaagggattgagatattgatgtccacgtcatttggttggtatagacagaatcatgctaggcttagggtttgaggaatggctagaatgcaaaggaggaagccatcagtgataatttccttttcaaaatatactaggctcaagtctggcgttaaggcctttcccccgataatagtacctttccctgataagatctttgatcgatagaatacggcgaaaaagaccaaatgataagtgatttctcacttaatcttctatactacatcgtggaagcgagattgatgtgtctaatgactttataaaaaaggcagttaactaagagattgtgtatgtgctgaatcatccggctgctggaagtatcctcctcccaatcgacaagatgtataaataagctaatatcgactttggttgtaaattgagaatggctttgaggtcccatatcacagcggtatttattctcgagccaacgtagttccatgctaattttgtaaaccaaactgcatacacactgtcttcacacttccctccgccccatagtcgctcaaatccatgtcaataggatcccctatatcatgaaacccgcacttccgatacatcgcgtgacctgcagatgatgcttccagccatgctggtatcttatggaaactggcttcctctagccctgctttaacaagtgcaatgccgacgcctttatcctgggcttgaggacggaccgcgagaacctcgaggactataggacatctgagtaaaggcttctatcgtaaaaatctgttcaactcacggctagcgcattttccagtaatccattttcttcgccttgctgctacagctctatagaagtctaggaaggctgccggattacccgcagtgtcgggggctgttttctgtctctcttcggtggctgccgcttctctttcatgggttttttggtcaaggtagacagtccacaatgaccaccccatgatttcaccagtctttctgtccgtcgcctttaaaaacagtgcagttgaactagtcgtgagtagcccccgaaggaatcctatcatgtcttctctctgatctggcgagccgtacatcaaatgcataagcttgtcattttcaaatgcctcatcatggatacgaacgagggtcggaatatcctcggcggtgactggttgtaatgagaaagaggatagcctagacattgtgcctcgaggcttccttgttgcggaggaatttaattaagtgtcaaaagaacggcaatagaacggggactttcgaaatgtatctgtatctgctgcgacggctttgaggtcttaattggaagctcgacatcaaaatgcctgtggggataactgtcgaatagaactccgtagagtccgccccgctatcatgtgatcgatccaactacgtttatagttggcgatagaggcataatattggttagcagactgtgcttcatcccgtgctgatccatcagactgtgcacgtctttgtaccagcaagatcccctcatccgaaaaggacatttgacatgacaagttaagcggtaccgttatttcattctatatcgagcggttcatataagatcaggttgtaaataacaaatgcaaggctcataacaagaaaaagactttccatgcataacgcttagtttgacaaaaggaggctggcaagccaagacaagatataagcaggcttacagctccctgtcccaggacgaggcatcactgtctgtctgatctccttgcttctgccacgactggaacatgagagttgccacgttccggcccatcaacgcactagtctccattgtcgagatgaagctctcgatgccacctgtgtaccacacacctggagctagaagagtctcctcaaaggtcactcgcggatacagaagagggtatgggttccatagcttctcatggaaccagctgatatcgcctatcgataggtctccaatggtcgtattgctccccgcaatctcactctccagccccagaatctgggcaatgaattcagccgtgggccgctctggcgagaagattttgtaaacataatgttgctgtttgtctttggaacccgcaacagaatgatctactcttcgaagtgtactaatactccaaaattcagtgaggccaacaccatctgggttcgaacccagatcaacgcccttgggtagagtggtcagaatagtctcgggcgctcgagcatttgaatcgttcagaccaaaatacttcggcgagatgcggtgaggggatgcaaagagagtaacgtgcaagttgacatatggaatctcatctggagtgttttccaagggaggggagacggagatacccgagtactgcaaaggaccggcaatgacaacttcgtcgaatagctcatgctcggagctggtagcggtgttgacctttgaggagacccgtacagtcccatcatcgttgcgtgaaatctcagtggcggtggtattcactttgatattcacctccgaggccctcagcgcgccatcgaaaatgcgccaatttccaccctcgatagaaaccgctccatccgtagccatacagacgacagattccaagccatgaatcagctgcaggttctgtccataattcactcgagtacttgcttggatgatctcattcgcaaacagcgagctgatttcatttgcccggagaaacacatcgccaggagatgcagtagcattgatcaagtcagccgcaatagctgcctcagtaagagagctgaaagggaataaaggctcttcataaaggcggagaaacctgccaacgacactctttaccagattctgagtacgcagaggcgccagtccataacgccagaagagccggccgatattccaccagctatacgaattcgtcaacgtgaaaacgaactgggtcccatcccagatcccgatactctcagcagtctccctaggccgtgcatggtcagcactattgaccgtcaggccgagatcacgggaagcgttgaccaggttgtaattgatctggacaaaaatggaagcacccagttcaatggggtacgatgggtcgtcgaatacattgactgttgttgagcggccgccaacatatgattcacgctcatagactgtgatttccacaggaatgttggcttcatctgccagcttgcgcagttgatatgcagcaaacgagcctccggctccggcgcctatgggagtatcagccccgtatggaactgtgttctttagagagaggcataccgattattgccacacgctttggggttgcactggcggcttctcgcagttgctcttgttctgctgcattgccaaacgagacgagtagggcagctaggatggagtacagtaagagagggatatgccatggcatagacggccacattattatggtagcactagaaaatggcagagctaattggtagttgaacagtagatactgattagccagagatcaatgtatttcaagatatcatcagatgaaggatcaagggcggaggtgatgccatccatgagtctaatttggtagtcggcccatgtcacgctagtctcttctaggactagtgcgtttccatatcgcttatctttttgaggggcatcacagttttgattcacttaactccgaacaattcaaaatggattcctatgacagtgactccagtgtcgatgaggacttcaccgataccggtgtgcttctaggctatgctgctgaggatgtcatcgaggatgtaatcagccatcttggaggctggccggtaagttaccacgagtgatcactttgtataagcaatttcaactaaccgctactttggttcagaaatggctcgatgaagcatccccagcacctggcgatttcgccaattgcaaagtctgcaacagcccaatgctgctcctcctcgaattgcacggcgacctgcccgatcacttcccgactgatgaacgacgcctatacctattcggctgccccagaaagccctgcaaccgcaagccaggcagtatcagagcattccgcgcagcgcgtaaagtcgccgtcggtggacaaaacagacaggttgaaacgaaaacagaggaaacccagcccgtcgcaccagaacaacccaagcaggacctaggagcgagcctgttcggcgcaacaaacttgacgagcaacgtatcttcgaacccgaatcctttctcatccgcttcgggcccaacacccgcgggaagcaaccccttcgcgacaccagttcaggcgacagcacctacagccgagaagcccgccgtgtctgcaaccaacctggcctcatctttcgccgataaagtgcgcatctcctcgccaccgccctcagccgcgacaaagaaaacaccggaatcaagcacagcggtcccgtggcccgcgcagtccgcgttccctccgccgtacaaaaatttctacctagacgcagaatacgaaactctctcccggccatcttcacccacagtgccagataatgtgcaaattgaaccaatggaggaagaaggcgctggtggcgcggagctcaaggacactttcgagtccgaactcgacaaggactttatgaagttctcgatgcgcatcgagcacaacccggagcaagttctgcggtatgagttccgcggtacgccactgctgtactcaactggtgacgaggtcggtacccggctgcatgttcacagtgctcctggtgccaagatcaccacactcggttcggggaggatcccggcctgtgagtactgtggaagccagcgtgtgttcgagttccagcttgtgccgcatgctattactatgcttgaggaggggcgtcctggtgttgggcttgggaaggatgatgcgggcatggagtggggcactatcatcatgggagtttgtggtcagaactgtacgccgcaggagttgggcgttactgggtggcgggaggaatgggctggtgtgcagtgggaggagttgagatagatgtggatgtggatgttttgcattagatgtgagggctttgcctaccctaggttgtacatagcaatgtgaccaggaaaacggagtattttggatgtattgccgagagatcgccttgttacttttttgtcacttttgatgcagagaatggctctcgtatatcgaatgtttgagtctgcccacggaataggagtgctgcgttggtgccatttatgcgacgatgattctctatgtgagttttgctctctttaagtggcctcgggagaagttctgtaaaagaagttctggagattatatcgatacagatgggcttcgcccatttgtcagtagcaacttagacatagttagggcacgggtacctcaaccggttagtttatatacataagaagtgtgttagaaccagttacggaacttccttggttttctagcaatctaggttgtatgtatatttaaggtagaggacatgataaataaacctagtactatcatcttttctcttaaagtctatatatccgagaaggattgattgagcgcttgaggattctttgactgggcgggtccctcctgttaattcagctgtattctgattcagctgggaataaggtcatatctgaatgttgtcatttgggctgataactatccttcgcaaatgacactatgtcgtgctgtatccccattgcttctctagaactggctctgtatgatttttgatattggcagcaaagccggccttatggagacacgactgaagttatgctaatggtataaacatcacatctatctctcttcctcatattacccagtgcaaatatttgcacggacaagtaaaaaaaaagaatccaatacagacaagagaaatagaaaaaaaaaaaaacaccggatgcgccaggccccgactcatctccgagcccctcctccatgcgaaatctctcatcggttcgtcacttgatcgggggtgggattcatgaactcatgtcatggatggaaatcaaacgatttccctcacacagctttttggagattttaaaaaaaggtgatgcgaaaaaaagaagatcaagaataaagagcttccgcagtaggcgcttatgcgggcaactcgaagccacggcggatgacacgaccgaactgctcgataccgacgtgctcgctcttgacctcggagcgggcctcgttctccttgttggtaggcacgcggatgacggcaccatcgaccttccagccgcagacgtcgacgacgaacttgtcgagcgcgtcacggctgcggacatcgagccaggactcgaggttctcggcggtgatggagcggaaggtgttgccgacctcaacagcgatgcggatgcggacgagttcctcgaagccggcaacgtcggcggtcaggtctgcgtacaggtcgtccgagttcagagtggaccagaactgggcgtactgggcggactcgaggagtgaggacaggcgggtgagcttctgcacggactcgacgaagtcggaggtctgcgaggcggagtgggcttcgttggtggtggggaagggctgggtgtttgttgggagcagagcaaggcagagcgagaaggcgggcgaggggaacacggtcagggccttgaccaggatgttggtcacagtgtcgggttggataaggtgggggttgaactggaagctggatttttttgaagagtgttgttgtcagtttggattcgcaaattttacgatgatttaggtaaccaatcaatgggttcttcacgttcagtatcttcaatttctcaacattcccaagtatattatgggatgtcaggtaataggaaacgtttttaaaagatactcatcatagtggagctttccaaatatgattttcgcaatgcaatgcctcgctaaaagaaaggggtctaactcacagcttcagcagggccaagttggcgtagcagtcgaatgaccggtcctcgcactgctgggacacatagtcctggaagacggtggtggtctcggggttgtaccgatcgaggccattgaggattgcctcaatatgggccggccgggtctcacacttgtcgaaggcgaccattttgatattgctggagggaggtgggaggtgatgcgggtcttttgtctctgctgttctttttggtgggattttccaaggtttgattgtggccgtggccggattaacctagaagggcactattacccggaattcttccggactataccacacatttgcaaacaataatactcgattctccgaaatagaaaagtggccaatggccttagattgactcgtgttcaaataatacatagaatacatatctcttgaatgcctcgtgcgatcgtgacatctcaatcataaattagccccagtcccaagaatggaaacccgctagagacgtgctcgaatcgaactccgtgaagatcgaacgaggtgcccaagagaagaaaggcatgtcccttcaagaaaaaaaccgaaaacgaggctggtaaaacaagaaactccgttccgtgtctgtaagacgccatagtctatgcccatgcccatatcgcaaaaaaagaaaaaacaaaaaacaaaaaagcaaggaaatgccgaatcgtatgcaggaagcaatgcagaaatcggtcgaaacaccttgccaaccggcataaaagcacaaaataaagcgcaaaaacaaagaataagagaagctcaaggttgaaggtgcctgaaacacaagaacaaagcaggcgggtatctcaataagaggttcatgcaaatgacgaaaatattatttcaagccatgacgggacgacgaggagcaatgggaatcgccttgggtcccgccgagatttcaagggtagacatgtcgatgtcgttggtgtcatacttctggccgttctgtggctgtatggccttagatacgaggactggctgagaagcactaggaatttcatcgtcgcccacggtgctgcagacaaagcgttcctcgttgagagggatgccgccaaacattaagcccagctgttgcagaagcgcgacgaaatgagcatgtaattcggtaaagatgtattcattgccgacgatttcggccaaattacgggcacgaatctgaccggccgcgcgccggcccgccggggccatacccccgcccgggggggagggggaannnnnnnnnnnnnnnnnnnnnnnnnnnnnnnnnnnnnnnnnnnnnnnnnnnnnnnnnnnnnnnnnnnnnnnnnnnnnnnnnnnnnnnnnnnnnnnnnnnnnnnnnnnnnnnnnnnnnnnnnnnnnnnnnnnnnnnnnnnnnnnnnnnncccccggccggtgaggaaggatgaaacgggagggtactggcgaccggcctgtcttgggttgttctgctcatcgcgggtcttctcgtcttcctggaagcgttcagcagcgcggacaatgctagtggcgatgcggccgaatgcacgccagatgatgggacatgcgcggaatgctcttccggcatctcgtcccgccaatgcgaccagtgcataactacgtcgcttgccgcgggccatggggtccggcagacggaaaatgtaggcaatggtgtaaccggcgactccgtcgccgaagcagatcgggccggacgaaagtccccggggcaggagctcacagctcagggtgcgaatagaggagcgtcggagaagagcatagtcggcggggttaggcggcccgcgctgggagagataggtatggatgtgagtgtggcatgaagaatcggaggcaaccgaggcagagtgaagtgattcgggaggagaagcatgagtgtgatagtcggtctcatcatccacctcggaatggttgttgccacatgagtaaacgagctcgcgcgagcgaagcaccggactagtagaattgcctttggcatcgcgacttccaggcgccccgggtggcagctgtttgctcacattttctggcagagacaagctgcaactcgcgcaggtgtcgccattcacaccacctcggctggatttttcatcgggtgaggtcggatgtcccttgagaaagtatgggtgatcttcaattctaggcgacttggactcggcagatttattcgatcgagtctcatcgaagcgcgattcatgtgaagccggggtaccctggggagagtgatcgggttcggggtgacattgcggacatgaaaaaggtaagacctgcgagcatatgatagaggttggaccatgcacctcgcagaagtgcgtcaaagaaagctgcccaagtcagtctaagctcacggatatactttttttatactcacaatgaaatccatggtggacctgatcaagcaacaaccagcatctttagtccattgtcccaaggcatgctgtgactggataatgacgaaaggccggtatgcgggtccacacagcgaccagttccaggggggggggagaaggttaaaaaaaggcaaactaaaaaagaggcgaagaaagagaagggggtttcgagttgagatattaaaaagaaagagaagtacggagtagtggagttgtgatgtgataaataagaagacaagcaataataatcgaaggggctaaggccctgggggggaacttcttcggtggaagcccgggagttgcgctttcgggaacttcccaaatggaaggtcgatggaagcaaagaacgtcgaatccacttggtttcggattttcgttcgtttcgtttctattctttcgtcttcgcttcttatatcttatatctcgctttatctcttcccttgaatggctgtacttcactctagttacaccacccttccggatgtcttccgatcacattctttcatgctcctctcctggattgctgcatgtgaaagtcattataaaatcgggccgaccattaatattcctgggtttccgtgctttgcctagcgccttgtcccgaggggctgttctcgtttgcccttggaccgttgcgtacaagtggagatagtggctgcaaacaggggctctattgtggaaatatgtgtggtaccaatgatcgtgcagagaatttgactgaatattacggagtacatctatgatcttcatcttgatacatatatcaatccatacaatctatatcaatgaattcaaaggtttgatatgatctatcagaggaatcgacaggggtaggggctcaccgcttcctctctcagcctcctgtatagatgtagcttctcttttttttttcccctctcacttctcatgttactcaaaaatcagcatgtgtcaaatcagtcgacagccgtctctattccagccatctgcccggtggatttctcggggagtaatctggagataactccgtgttaggggcacggcaaggaggtaaagggaagaattccctgtcctccgatttgctggtggacgtcatcgtattggatgtgtacaatatacataatttcatgggctacactccctgacctctggacactggacagacgatctttggatcccaaaaagatgctcatctttccccaagtgggacaccaaacagttccgtggaaaagtgggaatcggggccgattccatgttagcgtgttcagcagggacctaaaactttgtgttgggatttccaagcctccgggagtcgtagggtcatcgttgatatcccttttccccgttacattatcgtctgcgatattcaatatactcgaggcgaaggatctccaacataatccccctttcatccggatgagggtgttcttcggagttaaactccgtcaaatattgactttgtattccatccgtccaaatggcaaacggaggtttaatgtgcatctccgatcctatttcgtccaccgggtgagcatatcttttccaggctgtttccaaaagatgaaacagaccttgatactccgaaataggagccccggcattgggccggattcctaaatcctagatccttgccgacatacgaagccaggtgacctccgtacggactacggagtagtcgcacactaagtacggattactccgtacgctaggtggcactagtggtgtactccatacaatgtgtcaaatcctgtcgtctagttaccctttagtgatataccccggctcattccttcatcccggctactatgtcatctcaccctatcacgccgcgggcattattgatttcccatcgcttttaatttaggattgagggatttaagatactatttgtaacggaaaacgaaaggaaccgtaaacccactcgacaacccactgacgagcggatccccttattaatctcgccaccaaataagcacacgacacttgaccggcgtttggcaggcggagtacgcagtaccgaatatctattcccgcactgagggcggaatgggtttccctacgttatacagaacgtagtggtatacccacatgggcatggactcgactcacataaaacaccgactcatgtgttccacaatcaagatctactgagtacacgtgagacaaaaatggatatgttgtattactgtataccttatatactactccgtactccgtgtaatagggttatccacccacgaaccggatacccgattgttttgggaaggtggtttatgtatttcgtacgtaaacgccaatatggttttcatgcagaagtggatcggcaatgagacattcttatattggcccgaggtcaggcacaatcggcaagcccaaacacttggctcgatccaagacattgacgatctagccacgtgggatttttaaagtactagattgatgatcagcgtcatagatgcaatgcataggtaccacatacattcgagtatctacaacaccgaacaatatacggagtatgtatacgatcattggaatcggctgcacggccttgataatagcaggtcacacgatctggtcaccactcgactccacagaaccgttgctccatcgacaatttcgccctaatatatatgggtactacggagctctcgccagctgtcgccaccctgcgggtatgccagtctgcatacatagcttatcggtttgaataatatttatcatgcagctttagctagccccactagcgctagttggcaagtttattcaagctgctagggaccgtcccgttgaaccatatatcctagggagtggaacgtgtttagtctgtatgtggccaagttctatgtgaatttgcatatacacatacatagaaggcgcgagggtctagcagacatttaatttatttccgacttaattacatctttgaaaggatatgtaattgatccgtagttaacctagagaaaacatatcaaggcaccaaggcctcattagccgccctaggcggaattattgttaagcccgacctagatcacatagttgaatccacctgaaagatggaatcataatgtttttttttcttgtttttccatcaatagccagcatggcacttgaaggatgtcggttcggccgcgtcgccaaccctctcatcccctgcggcgggggtgtaaggcgatatcatagacctcggaaaccatattgactagcaaccacaataggaacaacccctgtctttggtcgacggatcgctttgtctaactaaacgagacacttcagtcgatcgcatggggtggcattaaatccattgcagattcagagtctgttcttcctttctcgggcatgtcgaatgatgactccgcatagctcgagcatgtactatcatcttcaaggtcgatcatatttgggcatgcgcatgttcatcattgacagcatattgcccgccggaccggaggctccagcttggccctgaagactctccagcaaattcttagcgaggttgatgttgatgttctcatcctcgtcatcctcattggagatcttggcagcctttcctttggatgtacttgcctcagaagacaattcttgcgggcgccggttgagatcgagcacacccgtaccttgcaattccgcctccattcgtcgggaaagctccttgatctgctccgtgtcgtcttccccgtccgagtcaagctcttccactcgtttgcggatggaatcgggtgcagagggcatgcccatcatttctttcatcattctagagaattcctcttcgttgaatgacgcatccttatcctcgccttcactgtcaacttcctcgtcatcatcatcatcgtcgacgtcggaatccgactcaaagtcatcaatgaaatcggcaccatcgaagcccgctgagttgtcattcaggaactcttcaaatcgagccacgatccgttgaagattttcctgggcaccagcgtcaccgaatttgccagcatctgctccctttccttcacctctccctttgagctctgactccaaatcctcatagttgatatccagccatttttcatcgtcttctcgcttatcccaggtttcttggatttcttgatcggtcggaagggtttcatcacctgtgtccacatcctcgagcaggaacttcatttccctgactgcaggcttatcttgattttgggggtcgtacagcagcatctcgaacccacacgcaagtttcatccccgcttccgcccgctcatatgctttgtgatcctcggttgggggcaatttgcccgcccaggtctttggcaccggaaattcctggcttttgagttgcgcatatccgacacgggtaaaccgaacactaacgtcgaccaagtcatccggcttgaaaacaaggtcggacgcatccttcgctcgtaatggtcgcatggcgatcggatcacgaacatagaacgcctccaccgcaggcgagatatatgctggtttttgatgtaggagaaatgcgaccttgcgaggaattgtaatgatggcagagtggaggttttcgctgatttgctgagggtacttgcgcagacggtaaaaggcctcttcttgaattattgtcgagcgaagaaggcgaccgggttcattctggataatctttcgtgcctctgggagtgagattttctccgtgacctgtctcttcgcctcctgcttaggcttgatgattcggagctctccttggttaatccacacctatagattggctggttagcatgatatcttgaataagccgacacgaatcaacaagccatagctcaccctattgtctgcgacatctggctctatccatgctgggagtgttcccgcagcctcaatcagaagaaattcgccatcgccatccgccactttgacccagatatctttgtgccgcttagtcagttcacggagtaagtacacaatgacccattcatcttcgatagagtcaccaaaggtggtgcgaccctgtagtgaggtgattcctaaatcccgcgacaattagctttagcgctattcagagagaggtcaagagttctgtaccatcttcttttgtaatttccaatcgaaaggcatcacgctgccaaatgtaatctttgagcaagtctttggttaaatcggctgctgtacgttgcacctccaacaatcgcgcccgggtctcggcagcttcatcgataacggcgggggtggggggcgggatatgataaattgagtattcgaccgcgtcgtcagggagctctggttttgggataggacggaaggttgattggaaccatgcgagatcctcctcagaagtcatggctgatcttatgctcttaaagaccagagatgacctcatgcattcttctgatagaaaaaagcaaaagcggcgaaattcacatcccgtgatccatacgctaatccccattaggttagaaatcaacagaggtgtccacgctaaacctaacgcagccggggataactcgcccaaaacacgtctgtgattgtcaggcgtgaacttcctgtctcaaattcgctcctgcccttattgacggtgatggttacgcgctgaaaggttctggcccacctctccctgttcaaatatggccttcccctacatcgacacaccgcgcaccgaatacgacggcaacgcgacttatcttacaactggatttcgcagcgcggggcgacataacctctctgcactcgattctctcgagaattcgttccaaacaccatccaaggacaatgatttgatcaagggtttcgacaaacgcgtcactccgcgcgccggtgcagcttctaagtcaacgagaagcgcgttacgacatcttccagcagcagcccccgggaagggagagtttactccgttaatgaagagcgcgacgaaaaacaaccttttgagaaacatgtctgcagcccgagcaacagacggtccgaaaacaccgggatatcagcgagagacccatcgcagcaacgctcacacacccggcttgcctgctatggacatgtctgatatatacgaggaggatcggacaatggaagaggcaactccggttccacatgcggcaagcagtagtccgcaaagtacaccattgccaggaggtaacgggggagtccttggtgacggagggaataatttgtcgctcaaggaccaagctatggtatgatacatatcccaaccattgggcttgcacgcaactttcttcgggctaatgctgatgttcataggccattgatcgactgagcaaagttaatttcagtctgaagctgaggattcacttcatggaagagcaactgcaaaaagctggaccggaatacaataacgacgccctcaaagagaacagagagctcaagctcttgcgagtaacgatgcaacgcgatatttctcgataccggaagagcctccagcaggcagagaaagatcttaaggactaccagctacagctagtggagttgaaggagaaatcatggagggagcaagcggatcagacggtacaacgcgaaatggatctgatgcgcgaagagcttgagtcgcgtgacctcgaactccgcgaagcgcgcgacgaattgaggcacattaaagatacccaatctcaagagaccgataaacttcgcgacgatattgaggatttagaagcaagcgtgagggagaaagatcggctactcgatcaacgcgaagaagagctcgaggatctgaaacgtaacgccgaggagaatggcgcagcttcagagctccagcttgagctgaaccgtgccaaggagcagatgcaagagctccatgatagtcttgcccaggccaagtccgagatcagagagtcagttgatgccgcaagggaggccgctgaagagaaggctcgtgccgaggaagatttgagagaattgcaggacgaaatgtcgaataagtctttcaccaccaaaggactgagccggcagatggaggacaggaccgaaaagctcgaacaagagatacacgagctgcaacgagagaatggttctctgagaacagaactggagagtaaaagcaaccatgcgactctcctcgaagagcgttatcatactattcagcacggcctagaagataacgccaaccagctggctgaagatcttgctgcaaccaggcgtgatcgcgatcaagtccggcaggaccttaaaactacttctgctcgactacaagaggccttggatgaactccagcgtggagtggacgaaaaggaacttcttcaaactcgtcataatgcgctgaccgacgaatcggggggactacaaatcgaactcgaccgtgcacaatccagaatccgcgaacttcagaaagcggttcaagatgccacatctcgggctcaggatgaagggcacaatattcgctggcagcacaaggcagaactcgaacggctgcaagaggagatcgaaaaccttcaccacgaaattgaggagaaggagggacaatttgcagtcgatcaaagtcgctgggaaagcaccaagcggactctgcaatcagagaaagcatgggcagaaggccaagcggcagacttgaagcgcactattgacacgcttcaggaagccggtagcacatactctgggaaggagtctaggctacaagaggccattgatagcgagaaaaagcgctacacgcaagaaaagtctatgctgaaccgccaaatccaagatctcaaagacgacctcgataagacaagacgtgaccttgatgaaaaacgagacgagcttcttacagcgaagcaggatgctcggctatctagacgcgaagagcaagcacttgcagagaaggtgcgagccctagaagacgaggtgatcgttttacaatcgactctggcggatgagcaagagcttgccaaggatcgacagaatgggacatctgatctagacaaaaacctggaaaagtctattgccgagaggcagaagctccgtgatcagcttgcaaatgctcatgtcgagatatttgacctaaaggcttcggcgcaggagattgaggctgaacgcatcgagctccaagctcaactcgaccgagtccagaacgcagatgacaccacccggtttgatcgcgacaaacttgaactacgcaagactgtgacaagacttgagaacgaacttaaagtactgcgagacaccaaatcgtcccttgaggaccagcttgtctcagaaagtgaacgatttgcagcagaggagggtcgtctttcggctgaaatcgatcgtcttcaggggaaattgcttgctaattcgggtaatcgagatcgagaactgacttcggccaagacgaaggcacagcgcctagagcgtcgcgcccaagaactggaagctcttcttgagcagcagcagcctgtgatggagaatgaacaatctggtacacatggggacctatctttacttcggcacagcctggaggaggctaggaaacgcgaaaagatcctcctccagcgtgaatccaagcaaaagtcttccgcgcaaagctataagtcacgagtagaagaattggagaaggatcttcatgatgcgatgatgaacaaattcgagtcacactccccacataattctccatcaaacaagcttcacgaagagctacgcagtctacgaaaacaagtcgctgaagcgcaccgatcccttcagaaggtgaacacgaagaaccgagagctagaacgtgccgcgatgaaagaagaggaccaaaaagacttccatgagctccttagatcctccactctcgaagccgaatcattagccctgaaactttccgaacgggaagcgcgcctgaacgaattgaaaacacatgtgcggcggattcgcgaagaacgagatacccacaaacgtgaggctgaagcagcaaacaaaaatctggatgtgttacaaagacgccacgacgaaatcctcgagaagaactccctttctaagaccaccaacaagaccaaacatgagaaagagatccgaggcctaggcaaggaaatcatctggcttcgtgctcgcctgcatcgtgaggagaaattccgccgtgatcttgcctggagcaagggcttgatggaactgggtgaacgcgtccgagttgcatggttcgtaatcccatctctgccgaatactatttgcaatatagctaacaagttatcaacagcaacgatgccgatctccgcatgatttcagagatgggcgtgcaagcccgtgaccgagctcctgtccgcactccacgccataaactaaaatccgccatatcccttgtgagggccgctgttcgcatgcaaaagatgagcagcgattggaaacgcaccaggaaactaggcgagggcttgaagcgtgccaagactgaaatgctcaagcgccgtgatagctcaaacaagagcttgcttggccagtagccctggagatcggttctatcttatgtcattcgttctgattttgtctcttgttcttccagcgtcgacattctgtcatgagagattcccccgacatgtcttgcaagtatactagtttttttctcgacttgttttgtgattctgtctaccttcttttttagagtgttttacagctggctttgtgccggtttgttcgaatcatttgtgtatagtcatcccgacaaggaatttgatgattcaaaaaccgttcgttactcatttatgtagcgtctgccagtacagaaattgagccttgatgacacctacaaacatgggcgaaagaatcatacaggttgtagtcttgaaagcagtatgtatgctactcgcacgctttcctatgacggagacacttgcggggatagacacttgaaatatttgctcagccaacgcctcgccgttgccaaaagtaattgagaaacgcttctaaacaccgaaatcttcggagacaccgaccaaaaacacaggaatccgagatgaagcaagcgttgacatgggcacagataaagcatatgagaaaataaagagactatgggcaagggcatgggatattcagatttcgtcctctctggacaagccaaggagccatggttttatgctgtcgatgaggtagaaaaattcacatttcggaggccatgatgggaaggatatcgattctttcggaagatacgatcaggcaccttcactaccgaattcttgggtccattcagcgttcctcgtgagatcctctccgctaacggttggccgggagttcttgactgccttgacgaaatccttcagagcgagaggtggctccaaaagcttatctgcatcgatatcgagccagctcatttccactgcgccctcatcccctggtgagcaaggcgtgactttctctacaccctcatcgagtacctatgatggagtcgggtcagtcgctgtggtctgggacggtgagaactgagtatacataccttcttataatgtgttgctccttgaatcttgcggattggctgcattagtgcatcctgcacgcaaatactaatatcgctaccggagtagccttcgctcagatcggccaattggcgatagtcggtctgggtcatttgacacggcgtcgagcccacggctagcatgaacatcttcattcgtgcattgaagtcgggaagactgatgtgtattcttcgctggaatcgtcgccgaatagcagcatccagttgccaagggatattggttgcgcccaaaatcaaaacgcccttcgagtctttgccgacaccgtccatctgtacaagcaattcggtcttgatacgccgtgaggcctcggactctccttcgccacggggtccgcacagcgcatcgacctcgtcgatgaagataatcgcgggcttattctcacgggccatgttaaacaactgtttcacaagtctagacgcgaattagtatgcaactctcgaaactcccgtagataaagatatcgcatacctttcactctcacccatccacttcgagaccaggtcactactgctgacactgaagaatgtgctgtttgcctcagttgccacggctttggcaagataagattttcccgtgcctggaggaccgtagagcaagatacccttccagggttggcgcttgccagtgaacaaatgagggaacttgatgggtagaatgactgcttccttcaatgcttcctttgcgttctccaggccagcaacatcttcccacttgacgttcggcttctccgacagaatagctccttgaagcgccgatcgaagctttttcgcatccgcatcttcgccgttgtcgtcatcttccttcctgtccgattcagtgttgttagcgggaatacataggacaaaagctcacttgctaacactgtttatcacacatatggcggtgctaaaacataaacttttgtccaaagaagttgatacataccctcccttcccactgccttgcgccacctttccatttgcgccaaccgcactcggttttttccggtcctcagcgaggtggttcttaagcttctccgcgcgatccatatattcgccggcctttgagcggatcatttccttcgatttcgggttcttctcccatttcagggccagcatgaacaactccaatgcggagtagtacatctgataagccttttcgtactcgccatcgttgtcattctcgatcgccttcttgaccgtatcaatcgcccgtcccaggaaatctgtattactcatgacgggcaatgcgggtgctgtctgtagaggtagcaagccgaccgcggaggcagatgtgataaagcggggagaggggaacaagggttagggcaatgggccaaggctggaaggataggcagcgagtgccagaagaaagacttggagcttcttgggtgtagaagaaaagaagaagtgcaaaacagtcctagaatcgagagttgatgagaattggaggggaaaagtgagaggtggaagttgttgacgggcgggatccattgattttccctcctcccacttcacctccaagttcaccatggacgcccagaaacagcttcaagcactttcggaagagttccagggactgcagaacggtatgtctctatatttatttgatgatagcaatagctgctgaccttttccaccacccagagcttgaggttctggtcgatgctcgccagaagctcgaatcgcagcagcaagagaacgaaggcgtgcaggctgagttcgtccagctggacgatgaatccaacatttacaagctcatcggcccggtattgctgaagcaggagaagaccgaagccaccatggccgtcaacagtcggttggagttcattgagaaggagatgttagtgccacttccttgaccactgtgagccaacgagaaatgcgtgctgactgagatgttacagcaagcgaatcgaaggcgagattgatgcgacacaagacaagagcgagaagatgcgctcagaggtaaatcgccctcatccaactgcaatccacaccccactatatgcatattctaacccctcacccagctcatccaactccaaagccaggttcaacaacaggctgctgctgcttcagcctccgcataaggccaaagaactcctagagcctgcaggtgaaaaaggatatatcacccggagatgcaataatatgtggcgtgcgagctacgactaggatggggaccaaccctcaaccgtttcactgtgattcagtacatgcgatatgcaagtcgtgagccccatttgggggtagcccaaggaatgtttgggcgttaaggaccaaatcccaattgagatggggtagcttggaaatgtatgatttgtgcagttgcctgacaccaaaacagcgcatggatcggttcaaaaaagatatacccttgaaaatttaatgcaatgctgtcaaaagtgatcgattgatctttgaatgaatcaaaaaaaatatatatttgcacgatcttttcttaatgccttctagtgagaagatttgaaatagtattcaatttatatcgaggacgcatgtgattgcactcaagaaggccatctgaagcacgcaaagaagctagaggatggatgacttctgatgccatgtgtatattgacaaaattctattcgttgattcataatcaaacatttacatatgggaaacttgatctaggacttgaccagcagactggtaccggtcatctccttgggttgctcgacgcccatggctgcgagaacggtaggtgcaacatcacccaagacaccgtccttcttaaggctccaactctcaggggcgttggccataacaaagggaaccttattaagggtgtgggaggtcttgggggtacccttctcggtgagcatctcctcggcgtttctgtgaatgtgggttaactagcaatcctctttgataggaggttatcgtatttcccagaataacttacccatgatcggcggtgatgaatagaacgtagttgttcttcttgcaggcctcatagatctcaccaatcgccttgtcggtggcagcaacaccctggatggcggcctcgtacacgccagtgtggccaaccatgtcaggaggggcgaagttgttcatgacaaagtcgaacttgttctcgccgaggcgttcagccatcttatcaccgacagcagctgcactcatctttggatcaagatcgtaggtagcaactcggggcgaagggatcatatcgcgcacttctccggggaagaccttctcgataccaccgttgaagaagaaagtgacgtgagcatacttctcagtctccgcaatatggcactgctggaggttcttcttgccgagccattcggccagcacgttacccatatgttgcggggggaaagcaacattgaagttgtagtcagttttgtactgggtcatggtggtaagggagatgttcttggggtaggggaagtccggaaggggggaacggtcatagtcgcccagcagctgagtgatttcacggacacgatccgagcggtagttgaagaagaagagggtatcatcatctatacaggctcaattagttgtcatggcatttcctttcagtttggaccaaacgcaccctggacacggcgctccttgccgccaacaatgatgggcttcaggaactcatcgttctcattcttctcgtagcgctccttgatggtctgtagcgggtccgagctgtcctcgccctcgccagtgaccagacccttgaggccaatctcaacacgctcccagcgcttgtcgcggtccatgatatagtagcggcccacgatagtcgcaatcacaccgacaccgatctcctgggtcttgtcaagcacttgctgcaagaacttgtcggcgctcttagggtcggtatcacgtccatcggcgaagaagtggatgaagacctcgggaatctgcatgtccttggcgacctggagcaaggcgaataggtgagcgatgctggagtgaacaccaccatctgagaccaagcccagaaggtgcagacgtccattgccctcctttgcgcgagtgaaagccttgacaatgctgggcaccttgcccatctcgcccttcttgagggtctggtcaatgcgaacactgtcctgccagacaacacggccagcaccaatgttcaggtgaccgacctcactgttgcccatcagaccctcgggcagaccaactgccagcgaggaggcttctaactcggcatagccttgggcagtcttggagttgggctcagcgaagccggacatgtgtggggtatcggccgcggcgattgcatctccctggggtggggagtcggggcctgcaataccccagccatcaattacaactttgagacgtacattagcggtatatctttttgaggacctgggtggcagtcgaccatactcaaagcaactttttggtcggccatagtggggtttattatggtggctgaatcacacctagaattatacgacactggtcaattgctgggccaagagaaaatttgaacgattcacttacttttagacggatgtttggagaagaagaatttgaacgactaacgcagataaaaggctgccggtgaggggcatgagccccgacgtcaccgtcaccgggtgccaggagcgtatttgctgatctaatcatatgttgcggccgtaggagcgggtgtgtcctccgactcttccctaaaaacttaccccagccgggatctactcgtccttcagatatatatcctcggaatcattcgagtcaacatttccgacaatggcttctcgatccccgccagtgggtactccgctgctaaaatcccctgtgcccgagacgcccttcaaagacgcgccaacaccagtaccacaaacagtaccttttccttcaccacagaccttcgaggtaatcccaccattgcatgggattctttctcgcttgctctcctccaaaggtcagcaaagcggtccatcagacgcacctggggatacaacaggtgtcccaggagcttcccaggcacagacccaacaagcaccttcgaacatccccaatggcgggcacaacggcaacaatacatcatcacatgccgtaccagaagtatcggtcctcggttcaagcgctcatccgccgctcgatgtgaaaaacctccctaccgaaactagctctgtcaggattcgaatccagaaggctcgtacagtcgtcgaagggctaccagatgtgcatcggtctgtcaatgaccaacaaagagaaattgcagaactagaggatcgtgtgagacgtttgcgctctatcatctctgacttcgggtatcgagcagggataccacatgaggacaccacaaggaccttggaagcataaagctcgaaaccagaggatctcgggctacaatcggaactcccaagttacccaggtgctgcaggattttgagattgatttattcggcgtttataaggaaataccctggtgtttttagcgatcatttcaagatagcaaaggctccatcatttcatgagctgtggcaaatctagcaattcatactcctagtttctcttctttctttttttcaaggaattcattcttgtttgaacctccagccaatctagttcgatttgccgcaccaatttacaaattttatagccaaaaccctaatccggccaactgtctccgatatcgttcggtgggttaaagttcagggcctgaggcaacggaagatccctcccccaccacttgcatttattttttccccttctcttcacctaccatcctccatatcaattttttctgtttacctcataagacagattaccatacttcatcatgtcttacgctctttccgagtcccaccgggacgtgagtatcacaactgccctcattttcagcatctagatcgttgactcatcgattatagcaaatgcacaactccctcgtggccagtgatccggagattgctgccctcatggtacgtcgaaactatataccattgagacctgcagtgaaatgcattgtctccaccagaaaattcggctgtgctaattcttctactcgtacaggaaaaggaaatccagcgtcagcgtgagtcaatcgtcctgattgcctccgagaacttcacttctcgtgctgtcttcgatgccctcggttcgcccatgtgcaacaagtactccgagggttaccccggtgctcgttactacggtggcaaccagcatatcgacgccattgagatcacctgccagcagcgtgctctcaaggcattcaacctcgaccccgccaagtggggcgtcaacgtccagtgcctttctggtagccccgccaacctccaggtctaccaggctctcatgcgtccccatgaccgtttgatgggcttggatctcccccacggcggtcacttgagccacggctaccagaccccctccagaaagatctctgccgtttccacctactttgagaccttcccttaccgtgtcgaccttgagaccggtatcattgactatgacactcttgagcgtaacgccgagatgtaccgccccaagtgtctggttgctggtacctccgcctactgccgtctgattgactacaagcgcatgcgcgagattgccgataaggttggcgcctacctcatcgtcgatatggctcacatctccggcctgatcgccgctggtgtcattccctctcccttcgagtacgccgatgtggtgaccaccaccactcacaagtctctccgtggcccccgtggcgccatgatcttcttccgcaagggtgtccgcagcaccgataagaacggcaaggatatcctttacgacctcgagaaccctatcaacttctccgtcttccctggtcaccaaggtggtccccacaaccacaccatcactgctctggccgttgctctcaagcaggctgacacccctgagttcaagcagtaccagcagcaggttatcaagaatgccaaggctctcgaagaggagttcaaggttcttggtcacaagctcgtctcggacggcactgacagccacatggttctcgttgacctccgcgccaacaaccttgatggagctcgtgttgaggccgttcttgagcagatcaacattgcctgtaacaagaactccatccctggtgacaagtcagccctcactccttgcggtattcgcattggtgctcccgccatgacttcccgtggtatgggtgaggaggacttcaagcgcattgctcgctacattgatcagtctatcaccctctgcaagaagatccagagtgagctccccaaggatgccaacaagctcaaggacttcaaggccaaggttgccgatgagagcgttcctgagatccttgctcttcgcaaggatatctctcagtgggccagcaccttccctctccccgtttaaatgggatattgaggacggagtatgagttacggaaaaaataaagagggatctgaatcaggatcccacgagttcaacatcatttcgtataacaaaagaaaaatacacgggtgcgtttttaggggttaattaccggtctgctttttcaacctgacgcgggtcattgggatatgggaatgcttttttgcatgtgaaacgagcaattgttttttttttcggcggatgggcctcgcacttattcaacagcgggctcacatgaatttctgagggggaaaaagttcaacattaattgggcgtcctatgtacattctacaatctgttctcaacacaaggatctctagaatccaaggattattttcttctctgctttatctttccaaggttcctgatacggtcctattatctatacatgtaagaataagtcgtgtaaaccttttctggttagttttgcccgacttcgagccctatacttggcgcgcgatatggccgttgaaagcacataaacattgtagcggcgcagtgccgttattggcttgtcctggttcaaatcttagataaaaagtctttcgaaaagtccaccacaaagacattactcggccgcattagcggccgaatattcttgttcctcatatttagatggagaaagagcgaaccgctacggatgtatggatctagtaaatattcatgcctcaacggaaacatctccgtgcgaattcattgttcaagatccctactccaactatcctctgaatttttgactgcatcatgctctcagttctcccaggcgcgtgaaaagctcaccatccgctcagccgcatctggctggctgagaatttcgcccctcgggtcttctccaagatcctcctcccatactgtctgcggctcggaattggccttcaggttattgtacaggcacatccgcaggtgccaacgaagcaggtcggcgctcatacgccaggttccactccgagcagagtctctgagacgagtaccaccaattcctgtaggaaccggtccgaatacgatgatcttgtagttagcctatgttcacaaccattagtatataccgacaaaatatcgtatatggaaagtctcacatctgggtcaatccctagttcgatactatcaaatagggagtggatatctgcgctgaggaggagtccattctgagcagagtatatacgtgacttcccgatctcggtctcggggagagggtccgtgatatactgctggtatccatctcgtctctactcttccatactgctcacggggaatatatgtgtagcatcaaggtcgcggaaagggtctttaaaactgcttgccctattctgcccagtgattgcacagcaaccgtctctttgacggaggctattacggaatttcgtttgctatagaaatgattagcactggctgtttatgtttttagtcatttctacgtctactttaccagacgactccattcactccggccctgggattgggaatcggggtcttgagttccggtatcttgagttccggtatcttgagttccggtatcttgagttctgactcggcggggcgcatagttggttgtcagctcgattaattggtgccctagctatacgattctcagccttggaaaacctagttatgagacgtatcaaacacacttagatccaaacccatgtagttaccaggcgccaccgaaatcccactgttaagctggagtgcagtggtaccttgtgtgttattggctcctaacttataaaattcccgctcgcttgggttatgaaagacgaatgtgaatgaacagtatcgatagagcatctccggagagatatgtcgatcttgttgggcagttgggattgccagggctataacaaggctgtattagtcgcactggttcctatgaggctatcgtgacttacaggcaagaagagcgccgttgctattataaacctggaggtttaactgcgggtacctttgtgattgaagaacaagagctggcatagctgttgccatattggagctgatgaatagagaaacatagaagcggttatactccccaattaggttagcttggctctgatgtcatccgtaaattcctcaggtgtcgatgtatagaatataagtcagccagacactccatctagttatagagagaagtacctgtcagcttgtgttcccgtcttttttggcaactgacctcgatatcgggtttatatcaggatcagaaaccgtgggcttaccattggaaggggttgggggttgcctcttccgagtgtttgtctcggtataagctaaggatggaatagttagaataaatgaaatgtaagtgagaaggaagtgggagataccaatgaactgtaccggggttgcactggcagtacaatgtaaacaagacgcggttgcatagtagaatagtagaaagtcaaaatttacaccacacaccagccacggcaggtatgaaaccaaaatgccagtttatagatgataattagaacgatgacttccaaagaaagcaagaaataagagcaaatagcaagtgagaaaacgcaagtattttgatggagtgcgcaagtggtctgtaccggataccgtaccgcaggctgcagacccaacagccaatgagaagcgcgtatttgtatataaacctcacttttatcacatcaactatgcttcaacaacttcaaaaattgctttataataatcaagggattagaatatataggtgtgagatacaagatgtagggttttttgactactcgtatgtaaagtagaagtcaggcagaattaaattgataccttctatgtaaggcagaagcaggcagaatcaggcagaagggggggcggtacatttagacgtccacgtgagctccggataactcaaccttggaaggttcctcgttttctctctctctattcctctctctctcggtctcccgacattttgtttttttgctcttttcttttcatctcttgccctttaactctcgttactgcactgctttacaatccccacggccttcctgaatttggcccctcattagagttccaggctccatcgataaggacgcaatatcttatcgctccggtccctcacggagggcatatacttagatcaatctgcgtttgattaaaaaccggaaacagtgcagtacatcttgaagaagtcaccggcgaaccaagagagaacaggaccttgcccgacatggcgaataccgcccaatgctactattgctttgagtctctcctcgcttcattcgaggatcgcgagcccaccaccttggcagccgtagaggctctatgggaacagcacgaacaaactaagaagttttcgagtcttgaagagcaaattgaagaggaagatacaggccgtcagcaatccgtaaatgaactagacgaagatgacgatagccaccaatcgtcccagtcaagtagtcaacccacgaagatgaaactccgcagcatcagtcgtcttcagagccaattctctacctcttccagcatagccacgtcttcgtcggccgcatccaatacatcttccatctcactacagtcgagctcaaccaatatcaccacgccaagtgtggtttccgagaccccccagctgagatcgcctgatcagcgatatcccctgttcgtgacatggaacaccctatcacgaagcggacacaagtctctacgcgggtgcataggcacatttgaggcacaggaacttgcagcggggttgaagtcctacgctttgacctcgtacgtgtgttccgattgaatacccctctctcactacaacgctacaagcaacggtacacccctatctatagatcggactgactcacgtgcgattttgttttagggccttcgatgatacgcgttttgaacccattcctaaatctctcctcccctcactgtcgtgctctcttaccctccttgggtccttcgagccgtgtacagatgccatggactggtctctaggcactcatgggctgcggatctccttcatccaccgcggccgtcgctatggtgccacgtatctccctgacgtcgctgtcgagcagggctggaccaaagaagaaaccgtggagagcttgatgcgcaaggcaggctgggatggtggtagcagcagtactgcacggagactgctacgcggtgcaactgatgggaactccagcgccacacagccttgggaccaggtctcggatttccgtactgtgagataccagggcctcaaggcaagcgctagttattcagaatggcaggaatggcgagagtgggttctcgccctagatgacggggaggaaatcctggaaggcgcggattagaccgctttgcttcttgtcccacatctcaatgctccaattggaactgatgattataatgaccaagatgatacgcttctttcgtgggttttcgatgaacaacttttcggtctgggtgttaataaggaatgacaatggtccgagaattcacggttgtgatgagaatttgatatgatatctcagctctataaagatagacaagtgttttaaaccgagaattatccgagaattattgattataaacactggcatcattcattgtattgataataatgtgataatgcagacattgcaaaggaacccaagcgaaggaaaagcctcagaccatagaagagcagccagtgattgtcctaaatccgaatccgaacatccctacagcagaaacacggcattgacaaaagccgatacatatccatacattctaccgaggggtacggctccacaaaccagcaaccatctccttgactcttcgctcctgggcccggatctgctcctcagtctgcccgcgcgcattaccacggctatcaatctgcatctgagccccgccagcattggccggtgcaggcggaggggcatggtgctcctcctcggtgatatcatccccattgacacgctcaggcttgggatcaacgctcaaaacgccgtccatcatgaagccaccgccctcgcggagcttattgatggcacgcacggtgtcgatagcacggtgcagcgtgcggcgcgcgttgaagttcttcttgaccgttggcagcaggtcttcgcccgagccgaccttgccgctgtcggatgcctggttgacccaagggtgctggagagcttcatgggctgtcatccgtgactgcgggttgactgtcaggcagctgttgataaagttgcgcgcttcctgcgatacaccacgccagtactcaaccggcgtgaaggagtagtctgctgctaagattgcttgcatctcttcgagattggaatcccggtcgaagggtgtgtatccacaaagcaagaagtaggtgatcacgccgatggcccagatatcgctggaagaggatggctgttagtaaaagataaagagaccgtaatgtgatgacttacactggcttgccatgaccgctctttttgaagatttctggtgccatgtatcctggcgttccgcaggttgtagtcaggacatggaactgctcctcgtccatgatcctcgacaatccgaaatcggcaatcaaaagatcggcgttgtcttctggcgtgcggaaaagtaggttttccggctttagatcacggtgcacgatcccgtggtcatgcagataggccacggcagagagcactgcgcggacgaggtctgcagcgtcagactcatagtagctgcctttgcgacagatgcggtcaaatagttccccgcccagcgcgagatcagtgacaagatatactagagagcactcgttagtgagggtgtagctggagctatcatggaaacacacaattgttcatcgtctcgaagtagtcgaccagtgtgaggatgttctggtggcccagtgacaccttcttcaataccgcgatctcattccggacctgtatatttcggaagacgtcagtccatactcttgtcttcgtagtcgtagttctaccggcatacacaccatatgctcccgcccggacatgagacgcttgttgatgaccttcgccgcataatagcgaccggtatcgatgtgcacacattccttcacaacagagtacgaaccagcgcccagtgtcttcccggtcttgtatcggcacggttggaccttcggcttctggccgctcgggggttgtgccgccattgcgaataaaaccaagtgcgggatgcgcgacgcgaattgtggggggatggggaagttgtgcgatgcaaagcgtgagtgaaggattgagcgcagtggtaaaggagttcgactcggtgatgcgctatatatgcctatccttatgtacctgcgcaatccaaagtcagccttgccgtaaagtggcgcaggagtccagtgcgaagacctaaggtgagagtgcgcaaaagatactcacagttgggcgacaaagcctgattacagctatatgggcttatggtttcctcggcggtctttgatgttttccgaggggctgcgggggtttgaagtcgaagatggggaatcccgttggcggggcggctgctgaaacgtcagatgaaactatcaaacaactcaactccaacagcgttggcagttggaatagaaaaatgaatgaatagaaagttgaattaaaggccgagataaatatcaacggcgcgattataggacagggcatttctgcccagttggctagttacatttgccccaacaccagcccaatgcaaaacaaagaaaactcatagaaaatggtacattcaaaatcgttccagcacatcctcgacaatgtgctccaatagttgtagcttgtggaatttggctacgctctccaacacttgtagtttcttctcgatctccttccgatcaactgtcgcagtccatgtaccactgcaagaacagtgctccatgaaatcactgatcttaggattattgcacttcgagcacttgatatcctgcgtctgccattcaacaacaaaaccatggacttggccaatgagaaattcttcagttgccagtcggtcgtactcggcatgacagaaagggcatcgccagggctgggcagatttgctggcttctgagctggcatcaggcaaaacatcttcgtcgcgacagaggtcgagatcccgaataaggcagcacgagttgcaggacatttccggcagcttcaagctaccactagggttctcgaatcggccctccttgctgaattctcggacctcgaaaagggcaagaagctcgcgccgcagcaaccgggattccagggttgttgtcttggacaaactcagaacctgcatcagcagtttggtcaactccaaggatgggttgcgtttgtccttgcggccgactagaactcctggtaaaacggggaaggcatagtcggatgcaagctcagggtggagcatctcatcgcgttgtctgcggatcaaccccgagatttgcttcttcaatggctttgagaatcgatcagagagaattgcagtgatctcctcatcgtctgcttcgttggcccgtccgatgggaatctgtgttggccgaggagttgacagatccccgtcttcgagttccggccgtttcaggccgtgcatcagctcgatgtactcgacaatccagtcatggaagatagtctgcatgggcattggcaggaaccggctaagctgccagtgcatcgctgtctcgaggtcctgttcgtcggcctcagtgacctctcgacagcccttgcctccgtagttgtattcatcataccaaacgaggtagtcccagtactccttgatctctagatcgataaagtggaatgaagggttagcgcggattgacttgaggacatactggctgtaggcgtaggcgttgccgacctcggtcttggtcgtttggagaaggaggcgtgtagggctggcaaagatgacgtgggagccaacacgtctgaactctgccatcaatctctggaatgacctccgtgacagtaatcgcacgtagttgtgtagagacctgtcatagagacaggacacagggctttccacccatcgaatcagatgctggaccataatatcggccatgctgttgcctgcacaggcctctgtccaccaatgtttgaccatctctcgaagaacgacaacgccggcagaggcaaatgctttctctgaatagaaaacaccagtatcttcaccgtctccagaaggagcaagtagcgtatcactgccgtccatttcgttgatgatagaagatgtcagaatcgtattgatcgacaaattgcgaacctcgagttcaatgcacactgtggagtaagcacctggtacattgacagatggcatattgaccttgtccaaggcacctaggatgtcatccctttcatagcccgcgtgatcaggacgcgggcctgatgaccaccagagcaccacatttttttgttgcagccgtctagcgtacgagatatcgatgagataccgaggatcctcactttccaggttgcaaagcggaacatcaccgaaccgagcgagcatggtcaagtgctggatccaagaagacaagtataaatagcgcgtgactagacgtcttgcaacgaatgcctgccagccaagtgggggaagttccatatccgaagcttcgggcttcacggacaataatggatactccttcaggatcggaatatcgtgacacaggcggtctttttgttgggattgaatgacaagaacggcaggctgactctcatcatttcgaatctttctgatcagatcaccgacctcaaggtgagccttcctgcgcgtcatcacttgcgtagttttgaaatgaatattatcctggtagtcgaacgcatgctgcgattcatcgcctgatgcagcctgtatcttacgtgtgagaagctcggtgtagattttatcgacgttgggaagaccctggacatccctcgtgcggttgagaacgataatgtgcgcctcatttttggcagtcgagaatatcgcgaagacttgtctatccccagagacaatgtgatacaggtagtggaacactaatgacgagtccatcagatagggctgctcggaagatgtgtgaagtaatgtcgaaaggtcgaaacccttgtccaagccgtcacctaggacaccgcgttgctcttcatcgaaggtacaatggcttcctaacttgagcactgctcgagtgcttagcgggatgtttccctcgtaaacaccctcaacgctagggtgctggaagagaatatccatcttgtcggcttctgctagataattctcttctgacaaagacagcttgaacaagtaaacagagggatgcccgttcggtagggtatggttgaccttctcgacttcgcagtctggaacgtcaatgtccggcaaagagtcccgtttcaagtttaagaaaaattgccgtggaactctgacactgagggcatggatcttttggtcaatcaacacaaacgctcgcacaactcccggaacgcccgtctcgcaaagctgcagaacctgccatgtgctgatgtacagcatttgggcttgattgcggaagaaattactcaaagagtccgaagcaacgttgcttcgttcgccaaacagctgacgacggcgaacccgtgcttgtttttggatcttccatttttgcttctgatacttgagaaatccttcatagttatcagacatcgatggcataactgctggcaagctagcgaaggggtcaagagctgcatttgaagcattttctgggtgctttctcttctgggcgaccttggtgggcgttttggatttttgagtcgagctcgcgattgcttcatctagatcgccagcatactgaacgcgatggtcaagtatatttgcattcgtcgacgaaagtggcgtcttctcggacttgctaaatagatcagtcatcttcttttgcttgaacctgtcatccttcgtgttgatccgacgttgcaaccaatcagggtgggcaacccggggcactggatttcgaagcttctgaagtgcagccggaatggtaatcaacttctggatcacggatcctaaacgctctaagtaatagtcccaatcgataaccgttcgaggatccatatcgccggggtcttcttttagccattttcgcaagaagaatcgcttgatgttctcttcagctgaaaatatagcgacaggaatggctctttcagtgacaggtgtattccgtgggcgtgatgagatgatgtacttgcagttgagacctttgtcctttaccatctgttcacccaagaactctgccaggcgttttgccgtcgtgatggatgtggacttttgggaaccgtactcttccaaggtcttggacatgcttcggttttccgaaatgagatcgatcaactcttcatcggccaatgtcgttccatgttcgtataaaacatctaaccaccggtccgcaactcgagcaacagcggcgtaggtctcggcaagattagagccctctaggaagaatttgaagagctgggtctggaagatcttaatcaactttagctctcctcttcgtttaacttcgaatcccttgagttcagctaaagaaccatcgtgattgaagactgcatatcgtttcttcaggttcttgtcttcctccttcgatgttggtaaaatcattgcccggtacggtccatccacttcgaagaagattgaattttcactgtgagtctcatacttgaaagttttcgggtcgacaagtgcctggtactggtgattggtgtatcttgcatggacgaggtggttgagcatgacacaagggtatgagatacccaatttcttcccattcttcagagtgaaggagaagttatctgggaaccctcccggaagcatacaccaaataccatcagtatccaattccaggggacgaccgatgcgttcgacaagctctcttgccatctgaatgatgtgagcgcctgtcagacaagtgacaccagccatttccatggaataccaccgagagccctttcgcatcacatatccgtagaaactattgagaatgaccttgtgcgcaagctgaagagaatcgtacagaataatcatcttcttcgcttgctcgatctcagcggctgagccgcccgacgactgcaaactatcggctttgtttttccaggatttttgcttgcccttgaaatcatatcgtcggtcacggaaatctctgacagtatcgacatagaatggattttctctttggcaaatgatggcctctcgctccattgtcttgctatcgtgaatcttgtggtaaatcttcttgctgtaatcctgcagccgtttcttgaccactccagcctgctcttcgatgctcaattcaccgaatgacctcattggggagttcgggtaccggcctgggaaacgttcatttgctgtggcacgtcggatcatgttatattcatcacgtttggcaggcaagaattcacctcgccatgcccaaggcatgcgtctatcgcaggtttttccgggtcggttgaagtcgcaggcggcacaattcgactcatcaatcaacgagtctggttgcaatcggttggtgatcatgatgttaggatacatagaggcgacgtctaaatggtaaatgaaaggcacttcgtttcggactggatttttcttgagatcgagcaaacgctccacgatttgcgccctgacctcatcatagttcacaacatcgtccatgctttttttctcttcaacctcgatactgaatttgagggcgtggtcgagatcctcgagaagctcatcaatcgcagtaggatcaacggtaaaatgtgtagggatatcacttcggaagacaccagcttcaatactttcgacatggccgccgacgtaggtctccgactcaaggagatgaccttcataaaaagcttctgggggattcttgtgtttgttgggcaagacaatctcatgctggtaggcttgaaccatgagaagcatctcacacaaagttccagttcccttccgcaacgtttcgtcggcgctaaggggaatgatcgtgcagagcgagaagatgaatgggtggacatatttcatgtatagataataggttgcgacagcatcggaaaccgagtattcagctagggtctgtggcctttcactcgcatacggtgtcataagctctgggtcgagttcatccgggtcgtaaccaagctttgcgacagtcacggctttcaaaccacgacttccctgagggaggtaactgtcacggttgacccaggcgaaacagtccatatgcacacagttgtcggcttggtagatgtcctcgctgtttttccggaagccgatctccatatacatgtcaagtcccagaatactggctcttgtctccacaaatggccaatcgaagaagtcaccgttgtatgtcgcgataacggtaggcttggaaattttgatatgctcgaaaaatcgttcaagaactcctttttcattgggttcattgaagatgatgaaaggtccattgtactctggtttgggagtatattcaaagtcatgaatgtcctcagacacaatctctctgttggtaattaagaacccttgcccatcaatcatgtatgaaatcatcataatctgatccattgtggcgtcgggaaatttcagtggtaacttggtacactcgatatcaaaagcgagaacgacaggatcggcacgttgaagccgatcttccaggcaggtcagcgatatcacgccatgatctgcttccacattgtaccactttccaatccgaatatctgcgatgtgtcagcgacaaggcctcaccgagagtcacggaaaatactgacctttgtcaatgcagacccggacatggtatggcacgtcgtattctcgaatatcaacaataaaatcactcgcttgtaggttgccattaggtcgttgctcattaattatttcgtcgtcaaaaaggtcgatgccagcagtcgcactatctatcaattagttcaatgttaagatcgaaacacgtaacacagaacaaacctggtcatttcaacgtatgcgtccatcgcactctcatttttcctgttcttctctgcaagaggaagaatagtcctcctaacctctaaaaggttgctcacgttggcgaagctgagcttcatgtaggtctttcggtagccgagaaggtgatttgggaggttgagatcttctttctcaagtcgcttgaattttttgaccatgccgtcaaaggttcggcgacaccactcttctacctccatttcgtagcctttcttgactgcgatcaagaaataaggatcatattccacggtagctttgaaacttcctccgtcgtcctgcagaaaataataatccacaccggcacgacctccaggcacttctgaatcctcaatcgatgtgctgtgcatgttgaccaaccagccggctcttgtctcgccagactcgaatcgagggaagccgagagtctcatcgatgctgttggccaaccgaatggcctcgaatttctcatcttgggaggttgcctcggtcgagcgtaaggagttgaattggaccgtttttgagcgtcgaggattcgaggatgcagcactagatctgaacttgtttccatacttgctgggcttccgtggaggcattgcgacgcttcgcccggctggacttgttaaaaagtacctctagggagggaccagagtagaacatggaatgcgcacttggtaaatttcagatcaaacaagagaaggaataaagtataggtaggcacaaaaaaagatctggttctggggctaattgtgcctctaggagggtccagcaatggcttacgatctgctctaatcaaatcaatttcgatggtcccgacgcgttcgcgtaccgcccacgcgcgtccaaagtgttagtcagccttccggaataaccagccactttgggatagtctggattatctatactcccgatattgatgatcttcttcaatagcggacgaagacagctagtggacatctagaagcaagtcactctacacatctatggcggaagactcacgagactccagcactctttcgaaggctggtagcaacacacaaataccaaatgacctggccgattcgcaaaaaccgaaatacaatccgtctcagtcacaaactggaaagctatgggatgccttcggaaaccccgaggaaccggcgaatgcgctcgcccgagcaacatataagcctcggggcaaggaccctaaggatgttccatactccgagatcattggatcattcccggtctccgaaatgaccacccttcacaaaagaccgtgtgcacgagaatccttgttgactggcattggtgtcggattcggagttggtggtctacggggtgtgctcaaaggtatatctacattctttcggtattcggataccggaatcatggggctaatgtgtgcatgcaggacggtactatctatggtctgctggaaactgggctgtcggcatgtttgcgatcagttcattggcctcatatgaatactgccgctggcgacgaaataacgaattgagtggtatggcagaagcgctcgatctcatgaaccaactgaaggccaagaaacaacgtgagaaggatacggcagtggaggaagcggcattgcgcgcgcgtcttgctgaggaggaaaagaagagcaagagttggactaatccctccaactacaaattctggtaatgctggtgaggcatgaaaaggagtcgtggagttcatgaagtgtttcgaaaactgtatattccgatcaatagatcaagatcaagtagtgatcgacgtcatgtcataagtcatctctgtgtatcatagctctctgcaaagttcattccaattaatcatcgttggagtctcccacttgtccgaaagagaaaaaaatgtaaaccgcccatatgcctgcctttcaagaggaaaacgccgaagtaaagatatccaaaatgtgtctgcatattgcgcagctctgattaccccgctagaaattgaatttcactcgcttctggattgcaccttcgttcatgccgcgcaatttatctagctcaacgccatccctcctcctttcgcgtcgtctttcacgagcctcccgggcttcacgattcttccattctgccacttgcttttgccgcttctgtgatctttcccatgcgattgaagcggtgggcttgaagcctataccgttgatctcatatccatcatccgttgggtctgatggattgtggccagttatttccgagtcatgccatacaagtgggtcttcttcagacggagtgtccgcgagaggaggggatagtcgttgcttgcgtttagatggtgacgagggattcaagttcttccgagagaaagtggctgcctttttctttgagggggaattgggcaaagaagtcggatcctgtgttgcgggcagctcgaatcgcagggcttggcggtcgctgggttcgctgctagtgaccggtagggcttcaggcatagtctggagctcgtggctgtcaggctcgcatgctttttgaggcggtagatccaaagatccctgctgtgagatgccagtcaaggtctcagagtccgaaagaaggtcgccacggatggccaactctccgaatcgtccagccactgtagtgcgaggactgtagctttccagctcgtcctcgtcctgaagtggaacctcttggaaactgtcaatagaggtggtcgatgtgggtgatgaagagggactatagcaatctgattcagatggctctcgtttgcgcttgggagaaaaagatgaaggtaagcctgtcggcatcatactgaaaacggacgtagtggggacgtcaccgagcaaccggatggatctcatttgtaaataaatagggtatccaccaccaagttgttctcaggaaatgaagctattcattctgcagagcccggaggtcagggctgagagggggtttggtcttgggcatgcggcattgaatcagactgtggggtacctccgtacaaggatcgccacccgcgcatacaacatacatcaagagattattatgtatctttagtctcgtttgtcctgttctgcaaggaatgaaaatagcttcccttgagagtagaagtcctactggctgaaaacatgatgaacaacttaaaacacttaattgaaaatatcagagcagcgatagtcagagctgctgaggcaaaaaggcctggtaataatttacaaatacctgcaagccgtaccaatcgagtcatgaagacaaaatcaaaacctaacgccatgacgaagactcccaagtcaaacacattgcgcatctaggccttttgcttcttcttggagggctcggcatccgtgtcgtgcttgcgcttcttcttcttgtcggactcgccctcaccacccacggactttctcttctctttcttttccttcttctccttcttttctttcttctctttcttctccttcttctccaccttagcctcagcgacttcggcatcctccatttccgcatcgctctggtcggcatcgacatcgaggtcagccagcacggcatccatggcgtttttctgcaaagtattagtctttaagtgttcatttcttagggtatatagaggtcaacataccatggcaacctcgttcttagtaggggcagcaccggaggagtagaattccaagcgctcctcaacctggctcttcagggcctcaccgaacttggtgttaggcgcctctgagaagttgtcaatgcgggaagcaattgaacacttgttggcgaggaaacgggagattctgcccttgttcttggggccagcgcgggcgatgaaggaagagtggtacagcagaccatacttgggggtgtttcccttggtcttcaaggcacggaaaagagccttctcggcaccaagaatctgaacggtagaggcggggtacttggagaggttggtcaagctaccggcgtgggagatcagacgggcgccgacgatttcaccgatcagggcggcaaggttaggagcgacgacgctcatcttggcaacaaggtaagcgtaaagagacttgcggtacttggcgagcttgacaacgcgctcggcgaaagcaacaacattctccatatcagcctcggagatctcttggcccatactagtcttagcagcatcaataatgctctgggcaacagcctcgtcatcctcaacaagggcggcaatgtcgtgcagacgttcgttggtcagggcttgcttatccttgatgaaaagggcgagctcggcgtagcgctggttgtcagagacaatcttgacgagctcggggaagtgccacgagtaccattcgcgaactctcatggagaaggtgttgatggccttatcgagctgatccagaatggcgatagcctggatgatgtggttgtcgtcacgctggacggagaactttaccttagcgcgggagtaagcgtgaccgagaccgagctgggcagtgtccatgtcaccatcgcgcagctgcttgaggagtttaccagcgtggagacgaataccacgaagcatatcctgaacgacctcgctggtatcgccagtctcacattccacgaatgagaaagcggacttgatgcttcctgccaaagccttgtcggcaagacccaggatcaccttcttcttcttgttcggcttggggaggttcaattcaaggaaagaaactagagtatcggatgcgacaccttcggagatgtcattgatttctccaagagcctgcttgttgttcctagaaattgttagtgggcgataaaaaaatgaaaaccttttcgtttagatagatagagcgtactcgaagggcaagaagctggaaagttcgaccatcttgccgaacctagcaaggtcattgacaccctcctgaacttccttcaaggcattgccaacagaatcaccctggtgggtaaccttgaaaagcgagtaacccatagggccctcgaaaagtaggaaatcggccatcgtgttagcgccaatacaaggtcaatcacaaaataatgataagaacttgtaacaccggccagaaaacctcgcaaagtgcaattcgatggggttgctggtgaggttggcgacggctggaatggacaatttttttttctcgccgctagtgcgaatcctaaggcagcgaaccggaggtatgacggtcggcctcggagcggacgtttacccgtcccgctgatataaccacgtgatcatatcgatgctcgaatgtgggctttttggccgcggacctaacgtggaacaagctctctatcatcccttaatttaatatttttgagttactggacgtgataccctgccattcattacctgggagatgtctgcaactcaactacttaaccccaaggcggagtcgagggtatggaaaatattcccagatggcccctcaatgatatgcccgcacactaacatttcacgcagcggagaggagaggccttgaaggtaaacatcggtgccggtgaaggtcttcaggatgtcctcaagtccaacctgggtccttcgggaactctcaagatgtgagttttctccgaatacacctgacatacaaaggcaacggaactgacaaaactcaggctggttgatggtgcaggcgcagtacgaaacccccgattcctctcgaacgacaccaaacatcccttttctgatacaagcttgctattatagatcaaattaaccaaggatggaaacgttctgttgcgggaaatggttcgtttgcccccagaatcccagcatttcgagcttgcgagctaacattaaacagcaaattcaaaaccccacagctgtaagatgaaattgttttcagagtctgatacgtgttgctgacaaaactgaaaggttatgatcgctcgcgctgcgaccgcacaagatgatatcaccggtgatggaacaacatctgtcgtcctgctagtaggagagcttttgaagcaagccgagcgtcatatctccgagggtctgcacccccgtgtcatcactgatggctacgagattgccaagaccgaggccttgaaagtatgtgttgcagattgaaagtcgaatgtccagatgggtctaacacattacctacagttcctagaaaacttcaagctcgagcgccccattgaccgggagctgttgctttctgtcgcccgtacctccctctcaaccaagcttaacagtgctctcgctgagaagcttacccccgacatcgtcgatgccgtgctcgccatttacaaagcccctgagaagcctgatttgcacatggttgagatcatgacgatgcaacaccggtcgtcatcggatacccagcttattcgcggtcttgccttggaccacggtgccagacaccccgacatgcccaagcgggtggagaacgctttcattctgacattgaacgtcagtctggaatacgagaagtcggaaattaactccggattctactactccaacgccgagcagagagataaactggtggagagtgagcgcaagtttgtggatgcgaagctgcagaagattgtggacctcaagaaggaggtttgtggaaacgaccccaacaagggattcgtcgttatcaaccagaagggtatcgatcccctcagcttggatgttcttgtcaagaacggcattttcgctcttcgacgagcaaagcgcagaaacatggagcgtctgcagctagtctgtggtggaacagctcagaacagtgttgaggatctgtctccggatattcttgggtgggctggtctggtctacgagcatcagcttggtgaggagaagttcacatttgttgaagaggtcaaggatcctaagtcggtgactatcctcattaagggtcctaatggacacaccatcaaccaggttaaggatgccgttcgtgatggtttgcgctctgtctacaacaccattgtcgatggctgcgtcattcccggagctggtgcattccaagttgcatgtgccgtgcacctgcagtctcaagccttcaccaagaccgtcaagggtaaggccaagtggggtgttggtgcattcgctgatgcccttctgatcatccctaaaacccttgctgcgaactcaggccacgatatccaggattcgctggctgctcttcacgacgaggcaactgatggtaacgttgtcggcttgaatctggtcactggagagcccatggatcccgtccaagagggtgtttttgattccttccgtgttctgcgcaactgcatcgcttccagcacaggcatcgcatctaacctcctcttgtgcgatgagctcctgaaggctcggcagatgagcaaatccggtgccggtggccccggtggtcaggaagagtaatgcactttctcatttacgaagtcaggaggttcatgtaaagtttaaaagggttaaagacttgattccctcacggagtcaggggccaagagccaatctattcaaaaatgcacaaacttcacgttgcttctcattgtcgtcgttagatggaaatacgtaatcagcgctatcgtacataaacttggaagctgtctcgttgggagaattagtcttcttccgagctaacgctttggccatccccatcagacacattctcgcggggccaatgtccctcaaagccttcttctctgactgggtcgtccagggagagatgatgtgcttgagcccactcccagacatcggattttcgaatggtgaccatctgacctggtggtgtagtattgtcctccgcagctgtacgagtggatttacgttttttcggggtggcctgaggttcaaataaccccatactcttgagtgcagtgatcacatcctcggtcaacataccagttcccaggccgagttcttcgactgtaatggtctcgcgcaaaggtctcttgcgggagcctttaggggttgagctgggcttctgttggtcggtttcaagggagttgccgctaggtttaccgcggagtaagaatcgggcaatccgttcggcccagaaacggacataacttttgtggcccagctcacttagtggcttctctggtccaccgatgcacccaccatttgagtcccatccgctgagcttgtagctgacccccatcaacaacttcccaagctgcttatgttggtaaggcgggaagatcaaaatacaggcaagattgttcgcgtcccatgagagtttctcttttgaaaagaaaccgagcacaaagtagctgtcggggtcatccgggtcggtgaaggtgaggatgtagtacaggaaggttgcgacgtcgaaaaagactgtcttgtggtcgaggaagagtttcgcaaaaagggacagattctgtccgaaaagtttgtggttttgtccatcaacctcccacactgcaaacccgccatggtcgtagactttcatgcctggtggcgttattcgatgctcgcaggcgcttttgtgttcttcaaagatatcttcatcgcatgagtatcgaaagcaccagcgacagacgtagagtcgatcggcgtccttggcgacgaggtcttcggggtagacggattgattccatggcttgaacaagagatcgcccagtacgacattgttcacgttgcgaccggctggggtctgcaatggcgcagacttcggggtcgccattggattcttatggatatttgagcggcacaacgtgatatctaagttgtcggaatgctaggtttcgggagcgttcaagcgatgtaccgactccaatggaccagccattggtattatcgtggaaatgagacctgtaggtggaaaaaaagagtgggcacgatcgcgcaggcattaggcgaccgttatggaaacatcctctcaataataataaatgtcattcattgcccattgaatccattcaaatgtcccgtagtcggcgcctcagattccaggcgaatatctaatgtcatgtgatcggagcggggatcctccggagagcttcatcatgctctcatgctctctttatcctgttgcctgaacctccctgcttttttagaatttgttgaatttcttggatttccccattccttttgaaaaatccgaacttgaaacctggaagtgttgccacaggcggcagcatatgaatctcgtgatcttttttcccgtttatacactcgccgtctccaaggcctaagaggcatcataattccaacccatttcatatctttatatcaactctttcaactctagtttatcgtttttgtttttgatcctgtaacaccgccacccacctattcgtgttcctgatccgcaaggctcacagtacatcttctctacgatgttgaaacccttccaaatcagaaaccttcgggtatcccaacccgggcagtctgcggattctcgtactcctgcaggagttgtccaaatctctgctacagattacgatgatttggcgtcaaaccatccccgcgcaaggttgacttacatggatgacgatgatgatgacgaaacaatcaccgtaagttcagcacagtgtttatcgatcatcgaaatctcactcttttccttaggttggatccgctttcgagctctctcaacgccttgaggagcccctagacactaacacacagcttgaatccgtcgaactctctccccaagatatccccatgcacatctttgatattcgtcgatcaaactccgtgaccgagttgtggaagcgatttgaagataacgttccaaaacaaggcatggctgatgaaaaggacgagacgcaacctacttctaagactattgttctcgaggagcaacatgaagtcccagctcctcatatcacgatctcgccgtcggtctctagggaccagcctcgatctctcatggaagcattcgaagctgagctagcagacattctcaatgacgctgagtactcgaagagtcgagtacctgaacctgactcgccaccgactgggtcatcaaccaacacagactcagggcgatcccctcatcccgttgagattttggcagcacaggttctagaccacctgatcaacggagccactatggtacaatctgaatggagatcaaaaatacccgagctacagcgacaagtacacaatgctcagaaacaatttgaggctgcacagagaactctgcctcagaatgtgcaagcctcattgcggacactactcgccactgttgaggctcacctaagaaccgcttataataatcttccagatggcggaaggcaaatggcagaagatgccttccaggcaggaaggcctgttgctgagaatgctgctgatggttttcgtatgatggcctccgaactcaacgaagtcggaagaacattatttgccgcatttgaaagcgagtttgggcgcgctacaccaacagcctctgcgtcgaccccggcttctgagatgccaaattctagagcaaccgggccgttctttaactctagttcaagcaatgaatctgcggctccgagcactttgtaccagaactcaggcgcacattcttcaagcacagccagaaacgaaaagtcaacggtagactcaggtcatccgcactcatctaatactgcacaagcaggagtaccccctatccaaagttgtcatggtcaacccgcatcccctcactcaaatcattgggcacctcccgcatggcctgctccgtcctggaatccattccaaacttataacgcacccccgcctccgtgtcctccaccaccggcatcgctgccgaacttcacttactggcctcaaaggccacctgcgcctccgcctcttcctacgttcaattccccgttgaaagctacacagacatcgaacgtcatgtctggagaattgaaaaccgattcagcaactaagtccttgtttattgggaatgttggtttcaaggttaccgataagatgatacaggatgtgtttgctgccaagggattccttgtcgaggtggatctcccattagataccgcatcaaaaacacatgcaggcttcggctacgttcatttcccctcggattatccggcttttgctgcaatggaagcattgcaaggtgctgtcattgatggtcactcgataaaccttgagcctatgtatcgttcccccatcgaaggtgtgcgtccggtgcagatttcacccaatgccagtacaaccacacacgacactcagacagacagcgccccggatgagacgagcgatataaccgatgctccctctgagcgaaacagtaccacatcggggccctttgcctccccgcttgctatcaagctacaaaatagtccatccaagcctggcaaaacggataatcagacggaaccgtccgcactacttgattccccaagtgacgatcctgcatttagcgcacgtttcccctcgcttttacccgagacgagtgcacagcataacgatccattgagtggtcgaggtgtttcctcatattcgcacacggagtctggtttcccacctgtgtctcaatgggaagcccaacttctttcaaatcggcaggaacaccgcggagcagaacctataactggtgttttgcatagtcaatcaccaaacgacctagaacaccctgaggtactctcaactcacggttcacccttgcatcctaccccgaaggcatttgctggatctcaaccagcttctcgtctagaggcagccggcaatccgtcatcgatcgttggtgctagacgaccttccgaccatagtaaatcaatgcaagatcaaatcggtcattcttccggtgccaaggagactgtgcgcccagtgctagatgtcaatgacccccagtatgcggtcaaactgaagcgtcgagttactgagcaccaaacttataaaccaaatcattggaacgctgcggagactggccgtcgtaatcccctcggtcattccgcgagcgtgcgtcgtcctgcagacacatgggctcggctgtctaggcgagaacgaaatggtgtatcttctcacgagcgaatccccggaagcttcccagtggacgatacaacgagggtcgaactctccagcactcatgataccaatgttcctgagtcggatgacgggacaatcgaacaatgtgtctctgctcttgtcgacataggctacggggctggacaggagggcggacggtcgaggatggctgtgtatgcagccatggcaaatggtgtcctcacggatgcgattgatatgattgaagaggaaagacagatctatgaacggcggccttcgcagtgaggcatggaatattggcttgctttttttgtttcagggttatataatgacccagtcattcctttagctacagtttagcttgactggacctattgtggcgtcattcattctcagtagggttgaaatcccactttttgctttaatgacttgctaggccaattatccatgggacttttcgagacctcaacctactatgttgcatgtcccataatgaattagtgtatctaccttttaggtgagcttgacttttttttttttaatatccttcttacgtttgggaaagacaaagtgtctgagttggtagaccgtaggagtggcccgttatatataaaccggtgtacaactcaagaacataacagtgaaatgatagctaacgatgtatttatttggagattaattcatttccggaagaacaaattgctaccaacgcaacagcgctctaaaaggatacaatcagtggtctttatagtaatgtacatagtaaatacagagaatgctaatcggaccgacatcaatgccgataagtttcctggcaatctccgaactcccgatcatccaactcacagcagccaggaccttcagcaatgcagatatggcggcgaaccttcgccacatctgtgggcagacttaatcaaagctcaattaattcccgtccctctcttgttcgatgcgcacagatcctccaagccagcaagaacggtggagtttgcagcttcgaggaccaagaaatcaaagtgaatgggttcattcgatctgtacggaaacagaaacgctttgcattcgcagaaatatctgatgggtcgaccgtggtgccattacaggcaattctaaaacccgcgcaagcagcagagtatgttcgcgtgagctgtggtcctcgacttgtttgtccatgaagactaacccgagctttctttagtctgtcaactggaactgcgatcgaaatatcaggcatatggaaagcttgcccaccgggtaaagagcaaactcatgagctccaaacaagcgatgtcaaaattataggcgcagcggacccagaggtgagaccaagagcatttctacagttgttgctcctcacactaaccacgatacatatggttacagacgtttccaatccaaaagaagtaccacagccccgacttcctgcgccagattccacacctccgcattcgaacgcccttcaattctctcctttcacgcttccgatctgagtgcatattccaacttggcaatgtcttccactctcatccagatggagctttcacacaagttcagcctcctcttataacgtcctcagattgtgaaggtgcaggtgagacgttcacattagcaccacgcggtgccgctacacccaccaccgagaacgagcactttttccgagcgccaaaatacctcactgtatcgtcgcagcttcaccttgaagcttatgcggcagagctaggaaacgtctggacattgacacccgtgttccgggcggagaagagcgatacgccacgccatctcagcgagttctacatgctcgaagccgaggtcaatttcatgtccgatcttgactcgctgacagggttagtggaacacctgctacgcgatctaacgcgtcgtctatataatactcctgtgggccaagagatcctgtcggcaaagcggtctggcgagccaggccaggaaaccgcagaggagacgacaggatctctacggcaaagatggaccgatctaatggatgggccaaaatggcaccgggtcacatacacccaagcagtggaaatgctccagcgtgctgtcgccgaagacggagcatcatttgagcattccccgacatgggatggaggtctacaacttgagcatgaaaagtatatcgtcgaggtgctccatcaagggcgtcctgtctttgtgacagactacccgaaatccgtcaagccgttctacatggccccttcgcaagtcgccgatggcagcaacacaaccggagagacagtggcatgtttcgacctgctcctccccgaggtcagcgaagtcgccggaggctctctgcgcgagcatcgcctgcctgatctcattcagaacatgcgtgagcacggtttgatcaagccccgacagattcccgagtcaggtgatacagctccagatgagtcgctgtatccccatctcactcccgacgaggacctgagccacctccaatggtacgctgacctccgacgctgggggtctgctccccatggaggctttgggctcgggtttgatcgattcctcggatatttgactggtgtttccagcgttcgggatattgtatccttcccacgatacttcggtcgcgctgattgctgagacttatcagaggtatcacccagtgtatgatagatatgtaaaataatgtacatgaaaactaaatagttgaatagagggaaagttggaaacatggaaccgcaagcgacatgagctgatctactgtgcaacttttgactgggcctggatttgctccattgacaatgaatctagtatcaaccggggcccaacgacgctaggaataaagtcgccgattgattcccgaataggaactaagacaggcacttatccgcagacatccgcataatggagcctccgtcgcgctatgtgcccaaatccgactagtgagaatacaagtctcttaccatctgaagctaaaaaaagggcttgtgctaaccggtagtgtccggctcagcttactttgtacattagtctcctttaaccattacgcaattagggcaaaggtcacggtggcaagacatttaccacatgggcgttttattgtcctagagtactccgtaatggaaccaaggaaagacagaagacgaaaacgactgaattccgaccttcatactccgtagatgtcggactatctccgtaagagctaggagcagagcttatttatttacatatgtccccacctttccatgccgatttagcctatcttgtttgctagtcagattttaactttaaatcgtgacttcgcagagctccaggcaaatggatagtcggccgaaaaagaagctggttactgggttatagtgaatattatgacattattggatctagcccctgcccgatcatcctagacagccagtcgaagaagccaaaacaattaaaaatccggaatgctacggatttgcgagagaatattacttccgacaccagtggcctcataccaaacacgggagacatttgtaatgtgatatcaaaaccggatgataccagtctgagcacagagttggatctacgtatgcttactccatattttgacgtgtccagggctaagcatcgaaggaatcaggagtcagacactagaggaactagagtgcgacatatactccgtacaatatacaaacactgcacggacgaaagaaaaatggctgagtttaatttagcgaaggcaaaaataaggcatagatcgtgcattaccaaagcgccaagtgtagacgatcgtttcacgataagagtagctctgcgcaatactccgtagaccgtggcatattgccgtacggagcatagtactccatactcgtatacggaggccatgtacggcagatcttatccctgattttatgcaccggaggtccggaccccaagcaaagccaagcactgtagtctggaaacgaggcgccccacagaccaaatgtaaaaacaatggggcgtggcactagttggggtagtacgtaggttgctgatgattggcaacgtagatgcatatcagtaccgcgattcggaaataggacagcaaggcggatatggcaacggaattaaggacaatcgagtctcggcgtaccccattaggaaaaaaacgtggtcctccgagtggatttggagtattttgactcacgagtcactttatttcggacctcgcttatttatgcctagcatttttggatttataggtttggattgccacttgtccttattattattctgagagccaatgattgtatggctaataataaaaagaccatgatcagattaacgagttacagctatgaatagacgtgtacagccttacaacacagccttgaattaatctatttgactttgataaaatgagccctgattccatgccaattagggggttaggatcagcaggccaaggggtcccaaccttaccagggttaagcataagcagaaagaagttcgggcagtgcgcttgagtagggcatccctgtctgacgtatcacattgcagatagcctacaggagatgtgatttgtggtaataataagtaactagtcaaataatatcccattattttagtatgcacgggtagggtaattgataatccaggatgattacaacctaggtcaaggttacactccaagctaagacaatattacatagttcaaacagatcaaccttcgtattcggttctagcagctccccgaggaaaataatattccgccacatggtcatgtaagacaagcaagttggaaccttggaaatgcctaggtaaagtcaagtaaagttaagtgaaataaaggtacggaagaaacgttaaccataaacctgcagccacaggttccatggttcgcaatgagaaaactggcttttaggcttcgatgacattgtcagccagcctagccactcaaggttggcacccgcttggcattcacaagctcttggccccaagagttaccaaggtgctacttgcccttaatatgtaggcaccagcatttgtcggtgcattgccttttcttagaccgccgtggagtatgatgtgttgaatgttatttataaagttaatattacaaacagaccagaataaaatgaaccccatgcaatgaaacataaccataaccataaattgaattaaattaaaaggaaagaaggaagaaaagccatttcagcatattctctattcatctagacaatggatactttaattatgctagtggagataagctcgtgtgacgtttcacaaaattagttcttggcaacctttaattccagggttgcaacgaatgcatgacaatacaagaaacagttactcgcacgtcatttctagtcgattatagatttgtgtcagttgtatatttgatatctggtctccgactggagagatcaaacactgcagataccttgacttggggtttataacgttagaccggatcactaatcggagattattcatgagcaaaggctgtgtagcggagttacctcttgatatattcaatccgaaggagcccgaggccattaataatagattagcagctaacgaatacagttccagaaggcccacatgaaccacggtcggcgaaacagtcggtttatcccgcaagggtattctatcagctggtgagatatagttagcgagatgtggagctggacccactcaaaaaaaggagtctccgggtaaccggatagacctcaagagcatacgcaatcgatattgtttttctttacggagtacggagtagtgaagtgcatggcagctctcttggattacggagcagaaacccctgaacccagacattggtgtcactatgccctaggtgtggataagggggggcgatgtagacctaataagctggagatgggtttccacctggcaaatgagagacactagactatcccaatgtagcaagacttcgggatcacggctgttaagggtggatccaggcgatcttgggaattcgaaaattcggtcggggcctgagcttctacactaacattgaagtaattgtatggttgcatgctccaggtaagggaatgcctttagtgatctgagttggtatgcttcttttagcgttgaaggaaatagagccgatgttaaggtgaaaatgtaacgattccggctttttctgataatgatcagctgcatcagtctgattgaaacttggaccctgccagttaacctcgatcatttcccagagcctatcattaaccgttaaataattttgactgtggcacaagagcacagcataatcgtacggagtattagtccgctaatccttatatcttgcatattcaatcatacgcaccaaactatatcttccatagcttggtcactcaagccttgtttcttattccattgaacctagagcaaaaaagcggtgcgaccttgcacactccgtatacctggtagacggaagaccgggtcacgaaggtgatgttttagtcacacaggacggcgccatgtgagacatgtaatgcaggcgatataacgtatgtaggaagtacgctgacactatgatcggctcgtgccatgctttctgggaatagagacacatggaccccccagcgttttaaacttcaaatgggctgaagccaaggagaaaatcagctgccaagctggactagcttccccgaaccctattagagtgatccttgtgcaacgggggagtttgttggcgatacgctttcgctggcttgcattattcggcccgtgcgtgacagaatcccgaatagagttatagcgcaagttcaaatatgagaaagatgtttctgacaccttttacgtatgcaatgtaccaatattggatttagaatgtgaggccctacccacctgcgaggctaattaggtacaaggctaaatctgcacggcgaacatgaacggcacggagcgcagactcggaccagttaaccttatcgttgagtcaaggtgtcagcagacatgattcagtggaatcatattttggccgaccgcctggtagttggcggatcatgttagtttaagccattatttattgttcttggtcctacacgaacgttataagtcagatgtgaagcagtgcactttctaatgtagcctgtggctactccgtagtatagccagtcgtaactcatcatgttacgtggcttgctgcctagctcgccgtgcatcattttatgcacgcaaacaatatacgtacaaaataggaccgaccttgagaccgaaacccggagatttcttgatctacaacactccgtatgtatatggagtacggagtacactgcatcggtttagtttatgttttcttttccccgtatcattgctttgatctggactaggattttgtcaagctttgtggtcagcgcagttaaaatccaaacactgcgtcattggacctaatacgagtacgagttacgaggatatgaccactgtggcttaggtttaccatttttagcctatgagatattgaatatctgatataaattaaatgtcccgggtcagattcgctaagatcaaccttgtttggatgtgactcgtatgggatttgcctgccaagggatagggtgctggataaggccacatcggacgtaaccgctcaaactatgtttcgacggggtacataattattaatcaatggctatcctcggtcctattgctaaattccgatcgtcaagtgggcttctattccctggtaggtggaaaattactatgaggactcttctttaagaatggcaattgaattggtgtttcaataacccggttgaatatctaaggtaatatataccgttgactacatactacattgactacgactaccctacaatataagtatgttgtagtccataatcaccaagtcccacaatatagaattgataaagttccccttttgccaataatgaaaatacccaaagtggaggtgtggatgccttataagcgagcataaagttcagcgccggtctcctcgtgttggattaagcttaagagttccgcactaacctttttttgtgaccagagcgccacttttctgacacagaccatttccaatgttttcttttcttgtttcttaccatacggaggattctctgtttattaatgttgatcctattatatttaatctatcaggaatggagccgtgaaggggccaaattaaccttactcgcaagggtttccaaaccccgtaaagccgagccaagagttgcatggcattaactagccaacccggaaaactggttcactccccgtcactgattatattgaatttggttgtagactcacagttatgatccatgacgtgcttagatagctctaacatataattactccgtacaggctacacaatctgaaagcctttgtatagccgtgccacttcagccccatgtcgagaactctcctttccaaggtttcccatgcataaatcgtgtggatttcccagatccattatttccatgtgtaccgaatccaataagaaactaaaataaattaaataattctcttggaatctcggcgtttaacaagttccgttcgatcttttcgcttggatcgcttgacccgctcttcttctctccgcttcccttatttaaccttcttttttatgatttcttcattgtttcttataaagcgttgcgggaacatctcctctttttagttttcctcttttccctcttcttctagctttctctttttctctctttctcgttggtattcactttccgagacaagaacagctaagccattccttcagaaccccggtggagtcatcatagtaggtcgccccccatctctctttgtgccttttagccttggctctctcccttgtccggcattcttatgccttcaagcccacctggcccacaatctctggtctcttcttccattttgggataaagccttgaatcttgaatcggtccaaaaaaaaagaaaaagaatgaaagaatagcctagccgtcttgagctcaaagctcggccttacccacgctggcttccaggcttaccccatactgactcggatcctggttccttttatatttggacctgaaccctattttcgtcctctccacttgcgcctctttccttttcccttagatctaactcattcctctcagacacttttcgtactccatttacccttaaaaatccctttatccttcaacctggcaatcagatcaaatcaaccggggtcgtcggttgactcgagagcttggatggagacgtattacgggcacgttcgcacgcctgcggatgctattattcttttcgaggcttgccgcatcggccttttacctcgcgtgcaacgacgattatcagagaaagagcgacagtccatccgttccggttcggtcttcgtatgggatgagcgagaagcggggatgcggcgatggaccgatgggaagtcatggagcgccagtcgtgtatctggtagcttcttgacttatcgtgaaatggaaggcaaacgcggaggtggcagtgtctctcaaggctctgcctcccgcggaggcaagacgccggagagtcgaggcagtgacgatgagcgcgccgatggaacagatgagggaccggatgggtaccgttacaaaccagatggtttgatgaagcagtctttcagtatcacgacatccaacggtcaacacttgcatctgatcagctattattcacgctcccatccttctgccgccaacttacaacaaccgacttccgatcctgccctgcgtcatgtccgaccccagaaaggtctctatcccgagtcgacagttaatgatcaacaaaatctccctgtcgttacccgtggacctatgccaggcgctgcttacccaataactccgcatcccctcggcgcatacccacgcgtcactcatacacagccatacccccctgcctatgcttggccgcccacccctctggccaccccaccgactgtctcggttcaatatgggcctggtccttcttatctccccccggttggtgccaacggacaccctcattatggcccgccacaccatcagcctccgcatcaacatggtggactcccaccccctccacacgggatgaccagcccctatgatcgaccacatatggaatcaacattacctccagctggaccgccaccacaacaaccaagctacatgaaccggtcgccgcgatcaatacatgagcatgctcacgcccacgctcaagctcaggcccatgctcatgctcaagctcaagctcacgccaacgcacacgctcacgcccatgcccacgagcaacgcaacgcaccggtctacggacatctagttgatcctcgtatggcatcaccacgcgtgccagtccagtccctgacgcagtcaaatggacacgtccacagccctcacctagtgaagcaggagcatcctgccgcgttgtcctctctcaaccccattgccacatcaccgaaatcttccgatcctgcgagtactggaaatgcagttcctggcatcagctcattgatgaatggtgcagcgttggctcctttccccccatcgactgcctctcccggtggccccgccacgagcttgaatggaaaccccgcacagagctctttcgccgacgggccacgggatatccctaatgagaagatcggattcggaggcgaggatacgagagcgctgcgtcagctggaccgcgccttcatcgcatgaatcgctcgatgaaggttgtttgatggattcactcaatgaaacaaaaaaatctatcttaaccccaacccgctcacagggttgatgcccaacttaacctcacactttatcttcatgtctatgtttctttatttgctgcggctccagggagtcttgctgctgttccagtgatatccttttgttttatctttgtatttgtcattattagcatcttgcatgggtcggggcaattcgaattcttgcttttatgtgatcgggtcatggatacgggttcaatggagccttttcatattatgcattgggatcggtctacacggttgggatacggcttttatttctaaatggactatctgtgtcttgtcaatcgacttgctttttccatctataactttgcgttgtgctctccgtatacttagacgtatctgtgtagacacctgagaactggcttggaatccgtcgtactctcattgctttcgcgtcacatacttcatgtatctatgtacggagctctgcatgctgactttcctatggtaagcctgaacaatcatcaactttgacaagctcgagctatgtcgctttagcttcttttgacgtccaaataaccgacgactcctcggactcccatgttacctaggactccacctcaggcgtctgggcaatgggaatgagaaagtgatatccaagaccagtaatagtgtcgtaatcactgatctatatgggacgtcgtaccttgtgatcatagtgtccctcctaaagtgaatacgcaacgttcgttcgacattcctgaccattttacaatcttacaaatggctgcctccttcgcggatcatgctcatctcgaatcatcgaatcaacctatgagaattgaaatccattccttacgctgctagttattaatgcacgtatcagattacgtggtagaagataagtgatcaaccaaacgtgatgatctagctactgccatgaagctctctaaagagcttcatacgaacaaaaccacaaagatctcatcctccagaatctagaagaaacatctctgcacgtggataaagagactgccaacacggcaagctacctgcgagaggagagaaagaaatgccaaagagaagtctacaaactgcatagggaaacagtgaaagcgcccaaatgcatcagctattcgccggcttcaaccaatctcttggtctgggacgatctccatgggaacaaggtaattgtcaaacctcctcagagatctcattggccattagctcaactctatttgagacctagctattcttatcattccccaatgcctacaccgggagagaaattaaatctcattcggtgtgagctataacattggcctcaaaaacaggaacaagaacaccaaggaatgaaatcatttacgaggctttgcccctgagttctccccgggccgggtaggtgcatgatggtcatgcagaggcagctttgccgaatgcccatctctcgcctaggaataccttgtacattaggaagttctgatctgtcgattcgatgataccaatcacctgaaggagtctgcagaacttcaaaacttaattctgcggtcttttatttgcttggattttggcctggctggacctcgtattctgagactgcttcgggaagatatgtgagggttggatcaggctcatcaaaataggcaaggtatattctgatacagacacgtcgatagagccctggttaatatccatagatcacggcagacaaactcggggaagggctccctacattgagtatagccttgcccagttagattgtgttgccttaaatgacgtatccgcgctacgatctccgttgataaactagtgaagtatctgcaggatcccgtggctgcaatcctcggcgtcaccattcaactagaataccttagaagatctactcggcccataacttctgtactccttttacttgattatctggtggtattactcgtagtatagatcggcacccgtgatatgcctggttccagaagtccctagatattcgcttcgtggagggatgtaatttctcacatctaggttcaacggcggtttcaaaatggaagctggttatcttggttgagaagccctgtctgggtttataggaccctcgaattcccactacatgcggtatacggcatcgggaatgacagttggtacgcctgggttcattttgtgatagagaccaagtcaaacgggatgattctggatttgatgcttgttttgggccaccaacgatggatacatcgatccagtcgcttccgatacgagctttactcgaagtcaatgctgtcacaacaattgtgaacgaagttcatgaacctaccattcgggacaaatcacaacacactggcgttgtgcttattttctaggatattaattgaaataggaacgtgttacatccttcaaattatacgaggaaatctcgctcatgaaccagagtaatgcgattgtcaccaaggagaaacaggtaacctagctcgcaagagaattaaccaatataattcctagtctatctggtcgacttcaactacatagtcataaagcaagagcctaagaaggaccgtgaccttatactattccttgtgatacatataacattggtttatgtcaatgcgaaaaaaagaggttcaaaacatattgccatctgttaggatgtcgatatataatgctgtcgttatcattggatagcatctaagctcggtctttagtctcacagctagtacgaaaagctccagaactgtgaaatattctggcccctgtataacttcgaagagtaatctgagtattcgctgcgaaacggtgaaacagtctgtatgaattcaagtacacccaagaatggcacatatactcattatttccagatctccaaaatcgtgaaccttccgagatggcatttttatatttcaccgtagtactccgtagtgtagacactatgtcatgtttcacaaattacctgttagtctgagcttcgtgactcccgctaccaagtggatgcttcctgactttgagagatccatcaaatacggccgagacggtggattatggcacggtcaacatagcgagagaacatgttccgactgcgactaaaattcatgtattattgccgatgggataatagtcttgatgcctctaagcctactctcctatctagtatagtttcgaataccttgagactatacaagatcaccaagagatgtcaacgaatacatatcggatgacataaaaaaaaaaccagtcccgctttttgggctgctaagctgggccgatatacaacctggggttctgggctcatgtcctggatccgaaaacgttgagacgtggagcattcaactctcacgattgaagtaagcacattcctctgggtcataattggctcttaggaagctcgagggatctgggagaaaagaaagaggaacctcatgaataatttcgagattgcctatccacaatccaccagctggatgccgatcacactatagccagcccctgtcgtatgagaaacaaaaaccagcatcgcatgatacatttgaaccctcttactaagtccaggtaactagttagtcaactagttagttagttagttggttaaatacctcattaatgtttgttcagtggctatattcagaggggtgaagtttagcctgctttgtcaggccgcataagagtagtccgagcgtttgctcgatactagccacaaaatgctatgggtctcttatttcgcatgtcgtgcgtcatattatctcaaaagagacatgtttcagatatccatagttttccaataaatcccgaatggcccagagacctcatgatcaacgccgacgaaattccgattattcctatgggcagttggagctgaaagaggccgaaccgaaccgaagctaagcgagtggagcttgaagcgaagtcaattcttttcctataggttatacaagtatgtgcaaggctacaaaaagcttactctgaatggtttcattggagagattggaagaattgaatggagcctgtgtactccgtacggagtacaaccagtagtaggaaggtggaagccgaaaatttttactgatctgactagtgtgctgcgcaaggctcagaaatctgttcaagtgtcgctgattggtatatacagcatcgtcggcccaattgtcgtgcagcggttccggtggtgcctggcggggcttcccttatgcggcgaacaccggttagacatcatctcctcgtgtccactgttggcggcgtgcaagtcttctctcgggggttctccgagcgtgactgggggtaaccggattaggcaatagcctcactccacatctgtacgggggaggtcaaagagcaagaggaagagtcagagtgagaggccgagcgaggggaaaaagtacgaggacaagctagtccagaccttaacttcggcttagttactggattggtctatgccctggaggggggtaatatggctccgacctatgaaccgagcctggaaatagttatgtcctttcgtttgtactccgtttacccccttaggtagctatatggctcatttactcacaccccttgctccttaccaggaacccgaacaacatcagttgaagcagccatgacttctttgtttccggccccactgggcgggaacaaccgttgacccgccttgaaccttggaaacggatatttctttcattgttgaagatagtatatagatgtagatgggagaaggagaaacacaatagtgctctgtagtacggagccagagtggggatgatgcaacatcgaaaaagcaaagtgacttcagggcgttccccatattttcacgctagatcacccgtatacattgcctgactcgttagtgccacataccgtcagcgagccattggctcaggtcgttggtcggccccgtcagatcaatggacttgcatggtcgatctttgagcaaaaaattgaaacgaactaaaaaattgatttgagctactcacataactagcccggccctagtgcatagacggactccatatgaaactccacgttcgaagcgaagacgctgtacggggtatcgggcaaccacacagtagggggtatgaaaatcatcctctctgccgtctcagctgatgcgtcaaaatggttaaatgctaaaaaaaagaaggacgacattggtccgttactaactccaaccgagtgtgtttccttgttagtctcccggcagatccacgggggccttgcgcagtctgtacttttggtgacctcgccacattccacccctttgggctgtgccaggttagtgagcaggatatgatggaaagggtaatcgacgcgaatagtaaaaggaagagaatagggtctgctaatagatcccctacagaacattagctctattctacagacggaatgacggccacggattccgatccttgtcaattccctgcagcggatgtccgtgctggtcgcacccagaagatctggcccactctttaccccagatttgttggcgtagcacagagggagtgagaaacgaaaatagaaggaaatttcaatgtggacggggatgagggatgctgcgacccgagtgatggaaactgtcgccgagaatagaagatctccatcggttttccggtcagcgcgcttctccttcctaaagagaaagggaaggaagggaaggtaaaagaagattcgacagtgtggcttgtacatcagatggttcgtcggaagtaatattaactcatttcttagagtacacatcattctacctgaatgttctacggattcttgtcttggcctaaccctaagtccccccacggatcaagggggaatgtcttatagaatttcatctggagtacatatggaactcgtgacgaatcacccacgttatttcgtaggaacatatgtaacatgtcctatatagcatggatgtaccccgtagactatgcaagacactctgtattatggatccgaggtcgatcccaaggcaacgagtgaaaaaaagaataaaagaaaaagaattaaaaagaattccagaattaaaatccccaaatgaaacgtaacactccatatgatgccctggtcaatttgctcggcttcttcactgcaaatcagggcatcagattcgacatgcttggcagcctccccgcatagcaaagtttataaaggaaataaatacggagtcactgctccgtacaggtgttggagagtcgaattggatattgattttctttaaataaatcacgcaaatgactggaatatacggagtactccgtcctccgtaatggattctgatttataggctaatgcgttcacagctagagactaatgtagcctgggtttccattacgcattagattcacccaagaataccctagcatgtatatattaatgtccttaatatccttctaactaagttactagtttcccctctttgctcagctcatacctggattgccatcgaaagtgtattctctgatcacacgcactgcggtggaccaagcacattttcccgtacgaatttcctccccctccatttatacccgacagcccctctcgtcagcgcgcatcggtgctcttatcggatgccctttcttctatccatgcatacctcattcttcacccaccaggatttgaatggctctgaggtgcaggagaaccaccgatcggatattcccatctcttcattaggcgttcgtggctccgtcatccgcggcagcacgtccagtgccagcaccgggattagcaccgacgatgcctcggtcgattcactggattggaatagcgaacactcgccggaacaagaccagccactgaaggggtattcgcagttcgatgcgcaattgaatgatattatggagttgcccaaggtggaagaagtggaagaacttggcgatgacttgttaaatatcaaacaggcggatgtggagtcgggcgctcccgctgttccacggaaacgtggtcgcccacgcaaacatccactgcctgctcccggaggccaggccaaggtcaccaaaggtcgctccaagacgggttgtataacctgtcggaggaggaagaagaagtgtgatgagacaaagccgtcgtgagttgtcgtgatccactggggtgtcttgtctaacaggggatagttgccaaaattgccagaagaatgcggtcgtctgcgaaggctacccgctcaaggagatctggaagagtgggagacagagagtcgctgatggtaggtgtagattacattttacattctaatcttgactgttcgcttgagacactaacttggttttttccccctgtagctcgatcccagtctctgacagccgtgccgcgcagtttaccccttctcatcgacggtatcgaaacggacgtcgaccgtcgctttttggaccattttgtgtacggcttcagtcgcgtcctgacgctcatcaacgatgattcaaatcccttcaaggagattctcctcccgatggcgacgcaacatagggggctgatgcattcgttgatgtgcttgtccggatcgcatctctcaggtttggatcccgaacccaagctgaaggagcggaaatactttcatttccaccgcgctattcaagatctgaaagataatatcaatgcgtcatcatcagcccagagccccaacgaggaggatcgattgttagtcgaggacccgatcatcgcatctaccatcgccctcagcttgaacacaatctgcgaaggtgaaaccaacggcgaataccgaccgcacatggatgccgcccggtatctgctgttgtcacagcagccacggaacgaaaaattccgccagttcatcgtcgagttcttccagtaccacgacgtctcaaactccctcacctcgcttgaccgccgtcctaatctcttgcaccccgaactgcacatgcccaacttcgtacccggcgtgtcagcggggatgttcctcggcgtattcgatggtctcttcaactacatctcggagatcacccagctccgcgaccgtatccgcgaacgcttcaacgagggctatgagccagccgtggactaccagacgttgagcgaagccgtttccatcgatatggccatccggaattgggagacctcgcacgagcccgataccccgaactggtgcctggcccaactataccgccagtccacctgggtatacctgtaccggacgatccggccctcgcgaccgagcgataaaatcgcgcaggtcgtcaacgacggactcgactatctggaccagctgccgcaagatgcatccgctttcagtatcgtgctgatgccgttgttcctgcttggttgttctgcgttcgtgcccgagcagcgccgacgcatcacgcagggcttcgagaatctcaaatcctattctaacctccgcaacatcgagcctgctttcaaggtcgtggtgcgggtttgggatattatggatacccggatgcaggatagttgggactgggaaaagatcatacgtgatatgaatatggatttcttgattacttgaatatccttttctcccctaccttcttactcttcttccccttacccttctgataccctgttatttcttatttctacgttatttatttatttgtttctcgttgattattacagtcttggaaggggattcttcgtttgtctcataccatggggacgatgatctcgatgttgtaccatgtggcgttttgatttgatcaccgtgagtgatggtgatgcatatctatatgcatctcggtcgggggatattactattatgtttgcatttgtggtttttttctttttcggcttgcgagcgttggtgcgccgcgaagtctccgtgtcaaaggcgtattctctggctgcattgcatggccgacatgggcgccaagccggctttcctcccgattcaaaaaagggccgagtcggtgttatttctgtggtggatgagtgatgtcgagtgggtgactgaatgatctcatgatggagggcgtttttgtgtctggaggaggcctggtctggccctgctatttgatttggtttagctgattgtgtatattcagatctcccttgggtttctcgcgtggcataataggaattgggtcttcatccttgtacagtatcggatttgtctttctttcagatgtattggggaggatcatccagtctagacctggccttgcatcttctactttaattctttgttcttcactggctgttccgggtacatcctgggctataatgcagtcagattaatgctcttacgtatattgcgggtatgaatacgagttaagacttctaaaggctttggcgtcacatttgtgtttttactcttcgtgaatattagttgaataccattaacatattcgagcgcaatatagtcaaggaggtacctataacagctcctcgcctacgtaaggaccacgttgcggggtgacagaccattgcagaccaatcgcattagaaatcggagactaagaatagtccggggtaggtccgaggcaaggagaattaattttctcagacttacatgactgtgcaggtgaattgcaagggtctgatgtcgaattagccgtcccaagagtcgttttttcttttttggcagaatccggggatcatcctgcagtcatcccataccccatccccatccttgtaactccagtccaccatctgcatagcacatccgaacagggtctcttgtgcggggggatggccgctacatgactcgtgcccaatcctgcgacaccggcaaaatacaccatggaaaaagaccagatcatcaccgaattgagcgcaaagcaactcggtctccctgcagatgtgcaagatactgcatacaatctctctctgcgtgcagtaaacccagtatgcatcaaagtccgcaacttatcgctcgaagtcaacaccaccccgccaatatgggagacctcgccatcacagatctggcagcgcttgcggggtcaagggcctccaagaaccagcaaaacagttctggacaatgtgtccgcctccatgccaagcggtagcctaaccgctataatcggaagcagtggctcgggcaagacctctctacttaacttaatggccaaccgaatgagtctctcccgagcaaacacatgcggaacgacgacttttaacgacaaccccaacatcgcgcacatccgcagcgcctacgtcatgcaggaggatgttctaatttcgacgctaacagtccgcgagaccctgcgctactcagcagacctgcgcctcccaccaccaacaactccagctgagcgccacgcaatcgtggaacaggtcatcctggaactaggcctaaaagagtgtgccgacacccgcatcggcacgaccgcccacaagggctgtagtggcggcgagaaaagacgcaccagtatcggcgtgcagcttctagcgaatccctccgtgcttttctgcgatgagcccacaaccggtttggatgctactagtgcgttccagattatcaggactctcaagcgtctcgctctggatgggaggacggtcgttgtctcgattcatgcgccgcgctctgagatttggagtctgtttgataatgttgttctattagccaggggagcggcggtttacagtggttcggtggaagagtccttggcgcactttgaggagtgtggacatgttcttccgccgttcgtcaacccggcggagtttttgatcgacctcgctgccattgataatcggacggaggagcttgaggctgcttcgaacctccgtgttgaacgactgagggatgtgtggcggttgaaacagactgcagcggatacagaggcagagggcaaaagaggagagcaaacaccgaatgccgagatcggtatatttgagactggagctgtgaagcaggtctcatttcgtcgacaattccgcgttctgacgtctcgcactttcaaaactaccattcgtgacccgatgggtgttgctggtagtcttcttgaagccgttggaatggctgttattaatggctggatcttcctgcagctcgacgaaagtcaggcagggattcgctcgcgcgagggcagtctatacaccgctagcagcttaaatggctatctcattctgctgtacgagacctaccggctgactattgatattcgtctgtttgaccgtgaacgaaacgagggcgtggttagtgtgccggctttccttctcagtcgacgagcagctcggttaccattggaggactttccagtgccgttgattttctctctcatcttctacttcatggtgggataccggttggatccgggacagttctttatcttcttcctcctcaccctgctcacgcactacattgccgtaacattcgctgcagtggccattggtgtagcacggagtttccctgcggctagtctggtggcaaacctatccttcacgttgcaatcctttgcgtgtggatactttgtccagtctaaccagatcccggtctacgtgagatggttgaaatggtgtgcgtatacattctacatctttggggctctgtgtgcaaacgagtttattggacccaatggctcggaactgggacagttctatgcctgtccatattccgataatcctctagaccctgcctgcaagcaatataccgggcgctatatcatggaaagtctaggaatgccgtcgcagtggatctggcggcctattgtggtattaatcgcgtttgccgtttgccactatatcttcgccggtctgttgctccaatataaccgcttcgcgatagatgttgcccaggcacgaagaaccgaaggagacccaactagtggaaaatccaagctcgctatacgcccaagagaggaggcgcgcaaagtggcaatatcgcttgacaagtacgcgttggatattcgaaagagacaatacccctgggaaactgcgaaaacactccagattctgagacctattaccgctgagtttcagtcaggcgagctgaacattatcatgggcccatctggaagtggcaaaacatcactgctcaactctatagcccacaggctgcacgggtccgtagggacacaataccgcgtccatggtaacatgctctacaacggcgcggtaccttcagaaagtgtgatccgttcggtgacatcctttgtaacgcaagacgacgacgcactgatgccctcattgaccgttcgagagagtctacgcttcgccgcaggtctacgcctcccaacctggatgtcaagcgaagaaaaagaccgacgcgcagaagagatcctctataaaatgggacttaaggaatgcgccgacaatctcatcggtagcgacctcattaaaggaatcagcggcggcgaaaagcgacgcgtaacaattgcaatccaaatccttacagaccccaaagtcctcctcctcgacgaaccaacctccggcctcgatgccttcacagcaatgtccataatcgagctccttcacagcctcgccgccgaaggccgcaccctaatccttaccctccaccaatcccgctcagacctcttcacccacttctcccaagtcctcctcctagcccgcgggggctaccccgtctacgcaggtcccggaacacaaatgctcgcgcactttgccgagcagggccacgagtgtccacgcacaaccaacccagcagactttgtcctagatctcatcactgtcgatctccaacaagcagaccgtgaactcgtcacacgcgagcgtgtgcagggtctcatttcctgctggcagagtaaccctctcgagttaaggctagaccggcatacgtcgcagattgccacgcctgcggaactgggcagtctcaagcgccaaatgctgccattccgcgtgacatttcccctggtattgcatcgctccgtagtcaacttctggcgccagccgccgctggttatggcgcggtcaatgcagatcccagggatagcgattatcatggcgcttttctttgcgccgctgaagaatgattatgcggctgtgcaatcacgtatggggtttgttcaagagtttgcggcgttgtactttgttggtcagcttactctattgttccccggctctctctgctggatgtcgtttttgtataggcaggctaatatcctaaataggaatgctccaaaatatcgctatttaccccagcgaacgagatgtattctaccgcgaagaagcagacaactgctacacggcatcaacatttatcctcagctacaccgcgatcgaaatccccttcgagatagtctcatcactaatcttcggcgcgttagctgcctttgcagacaacctgcagcgcactgtcacgatgttcctcatcagcgcgttcaactgtttctgcataatcagctgtggcgagtccgtgggaataatgttctgcacgctgttctcgcacgttggcttcgccgtcaatgtgacgtctatcctgctctccatttcgacgatcctcggcggcgtcatgagtcttaatgtcaacaatgtgctgcaggcgctgaaccatctgtcgccgattaagtatgccattgctaatctggcaccgtattccatgcatggccaggtgtttcattgctccgatgcccagaggctcgctaacgggggctgtcctgttgattccggtgagcaggtgcttaagctctataatctggataagaatgggccgatgaatatcatggcgttgggtgtttgtacgatcatatatcgggctgttgcttatgcatttctcaaggctatgaggtcgcataggctcatggaacggtggagggagtggcgggctcagaggaagtctagatagatctggatctcctttttgggtggattttgtctgtttcatacttgagataccctttcacatgtggcttgctttcttttcaaatctatgcgctgcactcgactatatcttgataatgaaagtctgtagaagagaatcagaagatgataaacctatctcatcaacctggacacgtacacatgtctaagatggacatagcttgtattgtgtccctatgtgtaagcaaacttggaaagtgcgagagaaaaggaggagcaacataatactaaagactcaacagcgggtggcctagtggtaacatgcatgtgtaccacgagggaagtgccgaagatcttccactacctggactgttcctgttcgactctggtcgttctcgcctttatctcttttttttctatcctttttatgaagagagataaaccaaaagcctcaaatcacagttgttgcctgaggcattcaagctcatgtagtattgatagcactttcctttctgcctttcctttattcctaggtgcccttttcacaatacactggtaactctgatttatgggccggaatctacgaagaaatgttgcattttgtgttactttgcaaacagacaccccatctcgacaaacgaacccaacaaacgaaccgttccataaagtcaatacttcggttttatgccatgtatataaaccatggatggcctttccatcctattctagtagactttggatctaaaagactataatccagtttgatgttggcaacaatgaaacttgatccagatttacttgatgcctccaaatttgaggtctagacgccttggcttccaaccattacgccaaagccaaaaggccggcgataaaggaactctatgcgattaagtacctttgacaccaaacctagtttgcacaaagataactctaacttgtatgaagctgatactaccaaaggcatggtcacgtggtcatccatacccgccattgagcacgatgtgtacattgcacaacgcaaagagagtacattgactaatatggaaggttgacccggtgtcaactttgacctaccaagatgatgcctaatcaacggtgaagcctgtgactcacagttctacccgagagcacccggtacacccgactaggcaggcagcattgaatccctcgtgaaggccaaatacgaagtagacggttcaatgggaatggagttggcaggggttcacccccaccctgtaacagtggttctagactgcgcatccaagaatcaagccatgccgaggtgaaaaacggcaatcttggcatggggatggaatactaaacgggaaaagagttggagagattaagcataaccggagtccattggcggaaataagcttaataatcggaatcctccaactgccggttagtccccgttggttcccagagatttaaccgaacgttccacggttgacgacgggcggttcaaccggacaaccgatgtcgcccctcaacaggaacagtcctgacagatacggtccgctcaacgtgaatggataactcggcactttgagttatgtacctgccttgagagtttgtgtacctgcctgccatgagttcataccacgtgtacttgtactggattgtacatactacccacggagtacctatgacgaaagtaatataaagcacaccaaaaccgggataaatgacaacgctgtacaacttaaagcgttgttcgagagcgaaaagcgctgatctgagccaaattcatccgacttgattccttggaggaataatatccagcaaatcagatcgaggctccgtcggaaatctccaatcgaaaatctcaacgctacgtggccccgcagtggacacttttaaacgccatccgcccatccgactggcggtgggccctaagatgtggggccagatctacaaatgggcgatttgtgtgttggggttgtcaagggtccctgtctatcactggttctagaacgtgattaattattccttcgcactgagtatgtgttctgtatgtgatcatttggtggattcggggatcttaccggtttgagccttcgctcgtgctctacagcctttttcggggcttttttgcctcccagagaattcttcgtattttgaggattcctatgggttgttctttagggctggttttttcacgtctagtcagatagtttgaaaatgctaaattcgagtagatttctgaagtaaagatcgtatatttcgtgtgtaatcttcaagatctgatgatcatctatctattcacaagtccatctattttctcccccgccatatataactccctgtctatattcaaccattcccattcccattcattccaaggtgggggggtatttcggaaaaccgtaagaaatcatagctcgtgacgagacatcctgccccagcgggaatcaacctgctatagatggggagaagacatgtcgaatcaaccgaacatgttgcataacaaaaaaatcaccaatctcatcatctcaaaagggtatcaccacctggggtgatataaaagaaagaaaaaaatctgccatctagggctagatgtgggtgtgaaaggtatgtataaaagaaaggatgcacagttcaaccggcagaaacaaaagtaaaccagtggacaaatctaggactggccaatgaagagatccagagcagtgtcgatggggcagccgtgggtggcgtggtcatcagtgggctggaggtacgcagcggagcaagcggtgtcaccggccttgcaaatagccgtggggcaagtggaggtctcatcggaaggcacgacggagaagccttggtcggtgaacttgttgctgccggactgcatgtcaatgcaagacatatcccagaagatggtatcgccagcctcggtgtactcgaactggaggacaccgatctgctctggctcgagggccaacttgatagagatgccaccgccgttggggttggtgcgccatgtctcggagtaggagccaccgttgcccgagatggtctgcatgggaccgacgtcgccggccacggaccaggcgtagacgtcctgggacaggttgttggtgatcgtgacaccgccgccatcacggcggacgatgcccgagcggcggaccatctcctggggaagggccgaaacaatggtggagaagagagcggcaaggccgagggtcttggtgaacatcatcttgaaagataggaagatgtatatagactgatgtagaatggagtgatgtggtctggtcgacagacgtaaagaatgaaacgagagtcaatctcgagactgaagagaatgaataaaaaagagagaatgtactggtagtactttgatagtgaatgtgtttggaagaacagaaatccccgggtgaacgaaggggtttatatagcctctgaactgagagaggcatatagacccaggtacagttgaaagaaaacgtgcaaagccacccatacttcgagccatggatcggttcagggaattgtggggcgatccaaaggcaaaaggcgaaaaggcgaaaaaaataaaaagcagaaattcgagaaaaaaagaaagaaaaaacagaaaaaacagagaaaacacaaaaaagagtggaacgaaaatctcgcctcggcttctttcgagtttcgacagagagagcccagaccggtgagcgaagctttgtatacatccaaaagacatccaaattaagtgcgtacaatcagatgatatcagatatatactacatagttataacattattcgacttatcaactgcataaagtctgcattgctaccagttagggcatcaccgccacagtttatatacgaggtaggccatagtctggggcgtgtcgacatagggacttctgcgtgttcatacaacttaccactataaaattggcccactgatcgcctaaaagctacaactcacaacgtggcaatagtgcccacaaccccccaaaccccacacgtcatgggccgtctgaccgcatccgcggttctaacagatggaaagaattggtttgaaggctcgaaccagcaaaacccatggcaaagaacatggtagaagctcgactgcatggctacacagccacttatcgcacttttttcgccaggaacgactggggatttggagctcgttctgtggttgtggtggccactattacaacctttctatcccatttctcggatactagagaaataatcgtacattagaaaaaattcagaatctagaatgatagtctaaccaaattgaggcaaatatcagcaagcaatgagtgtcgatgagaacccagggtgcacactgtacggagtacttcaacatcataatgtggcaagtaggacattaccaagcagacaactatattgcccaatatacaacatacgcagtcttctaaagaatgtctgtcaaccgagccaatcataatatctcctatagattattaccacaattaccaattcgaccggcctggctccattctcgatgccaatgctcgataattcttatacaaactaaatcctactaggtaagtgggagctgactctccacagttcagaccctcttacaagaaaatcctacaacatataaactttatgtgttggagtatgtagtcctggacccctgtgtcaaagaatctaagccaatgatatctttatcaacaccccaccagacgcctctgacgttgatctagtgcccatacaaccgactgtgcctggcgatcgagtctggattcttttggcaaaagcatgttctacatcctacattgtacataatacggactactaactctatgataaagttttcactaaaaggttctgaattagggcttaagtttttgaattaatcaaatccgacctgagttaggcaatgggatgtatgaccatggcatttatcgccatgtgcatagagattatgacttgaagaactctcaataataaaagaaaactaatcctggtatacacaaaggatttctcccatctcccaattattctgtttgttttttttttccgaacttaaccctcgatcactgcccctgtaagccactatagtccgcatcggagttccccgtgggccctcccagtccgcgaggaacaagctggacccctacccccatcaaccccaccaattaacccccctccacttcccttgtttgcagcttacctgcagtctagatccgggaatcaaccggtaagaaacagtgcctggaatgaaaggagggatggaagatcccggatcaaatatctaccaatacggagcgcgcatggccgacagactagccaatgcgccctcgctgccatcctccttcttccggtgacctgccagctccaagttaatctggcgatggatatgcaccagccagtcaacgtagctctgagcctcgttattccggtcctccagcaggagtcgggcgaactcgtattctgctccgtccaggccttgccgggccagttggatcgttacggacttggatccgcgcaccgtcgacaaatactgcagcagattacgcacctgtgcgttcaagtgtgtctcgagcacaggcagggacgaagtgttggggttcaggccctggatggagtcgtggcccggcccgaataggtcttccagtaaattgggtgagacctgcgcgtgcagccaaaggatgactgcctgaccgttgtccacgatgtagacaccaccttcttcgatacgggagaagctggctcgcagggagggcgggatttggagctgtccctgctcgttcgcaaatccatcttccggctgcatgttgtgcacggggataatgcgagggtagaggtacaacgccatttccgtgcagcccattgaccggatcatgcgcatatcatgcacccgccggtctgatgactcggggccggccttgaatgctctcgatttgaccaagctgagcatgtacatcgagaactccttcagattctccggtagaactagctggccgggagggtgcgagccggagaagatcttgcggtatccgctgaaaatatcgactgtcttctctgagatattggctcggatgtccttgaggttcttgtccagggtcttcgaagcggctatgatggtatcagtatacacggtcaacattttctaatagatcgtccagcttaccctctttggcaataaccgagactacggcatcctggtcgacaaacttcatcgtctccaggcctccttcattcactgccgccacaacattgatacatcggacacggcgttgaccgtctgcggaagtgtaaagcaacgcggcctggaagtgcgcatctagcttgggatcaagtttaccgtcgtagctgaagagcacgccgacagccttgtcggcatcgacaccggcaatctccagatcagcgccgagtgtgtgctggacaaagtttccgtggtaggcggacacttgaagtccattggagcatcgaactttcatcagtgtttgatagcccgtctcacgagtgacggcatgagcgatttcatgtcggagcttgaggagatcgcgcggggcatggaaattagggtagaagaaggtctcgcctccggtgagactagagacatgtcctatgcaccatattagttggctctttgtatagggctgaatgacgctttcaacataccaattgttgccacatcgaggtatgtgccaccaggggctgccacgaacaaatccatgcccacaccggcttcagccaacttgcttgccgtcttcttccaggctgggttttccgtggtgaaaagtttccgttccgcatccgttccataaactttaggatcttctctgatagccaagtgtcccgggccgtaggtaggtaagctagccaccgcgcagacgatcttgccacctgtagcctgcagtgcggagagcgccgagttcaatgtcggcagcaaagctgaatcggggtttttgatagaagagaaaattttgggtatccgactgagaagagaagtgatcacagacctaaatatcgttagtgatccgtaggagaccagaactataagatcgcatacttggactcatatgggtccacaaagagaccttcgctcagcggtacaaatggctcatccaaatcggtcatgaccatcatctgcgcttgatccaatgccgcctgcgaacgtgttaatagaagaagggtatcgcagagtgtggaacacatacggacaggttgtagaagtgcacctccttatcatacgtaacaatgccgaccttcgccccaacaggtaattttcgtggtaattcctcgccttcggcgccctctgatgcttcattatcactaccgtacagagcatccttgatacctgcgcaaacacccttgaggaaacctcgatgaaccgactctctgctgacatcaattaagaagagggtttgaaggcccaccggctccttgttccagtattccttcgggaccgtaaactccacggttcccaccagtaattcaggacgttgcatgcgatccacacgtccaccggaagggtccagcggcgcaaagtattcgggaggcgtatcattcgggaacgtgcacatattacagacgaacttgctgccgccagatcggaaggacatgaatgggttgatatatgttcggcatcgtcggcatcgtgggggaccaacatccccgaagtccagcacggggatcggttgttcgccgggatctagaggcgcgagaggctgcaagatcatacccaatggcaagccggtcgaggcaaggaagtcagaggcggaagggatgttattgagcgttaatcgagcgtatttaggagaggagttgccttggtcctgagccacgaacgggatcgctgctggtggggggaggtgttgatccattgtcgggtagacatggttgaaatagtaccgagcgggcaggtcgcgcgatcgcgggatgctaggaatatgctctgggtcaattcgccctgaagtaggcacagaacctgcaccactcgtcataccaggtatgtcggcgacagactgcccagatactaaccccaccgccggggaaactggtcgttcagcatattggttcaagcctgtgtttaggaactgcgattgttgttgttgctgctgtggctgctgcaagcctccttgatccatgccggtattaaattcttgcgcgggggttgctgcacccccgatgtcgtggtgagcatgacggtgcttcttccggtgtgtcctggcccccgtatctgctgcaattcctagcccgctcatctgggaggctaagcctgccataccaggatctcctgctgtccccattgcttgttgtggtgcattgtacgcaatgccgggactcgccaaattcggttgttgtggtgagccgtaggcgggccactgattcggcgctgggttggcgtaaggcgctcctggttgtggagacgcggtgctgggaggatacccagcttgatattgtgcagggggagcctgagccatgtactgcggattggaggggtcttcgccggatccctgacccattgtgttatacattgaagggtcggccatggtggatcatgccgcggaggtgtgaggtgagagaggtcacacaagggtgggattgagaaatggagagataatctcaacaaatcatcacgtatggaacagtattagagaataacgaataacaagagcttatgttgacgatataccgaatagaccacctaaactcactcggatttacgtacttccgaggatattcacgtggggccttatcgttgtactttgtgacttgtatttcctcttcctcttccttaaggtattatagaagacatcctcaaatgaaattgtcatcctttcttaataaaatctaactagtatgacccgctattcgtcactctgcataactccgtgttagcgaccagccggagaccatcccactctttgatggctccgaagccatacatatgtcaacatcgtctccagggctttgtcctcgtctcagcgccttaggcaaagcaattcatccttgtatggcttggccgtttttcgaggtccaatttacgcttatcatattctctccaatcacgtcagatctctaatcctggctccggctcaagctccttaggatacatctttttctggcgtgttcgactcaccgtacttttcccgtgcttgatggctcccctctagtccggtttcctgaaccgacgacccctgctctttacaccgtagatataatacaagacttctgtaagttccggcatttctcttttctttttcccaccttatctttgcccctcaagctccttgcatacatatatatgcattggtcgtatacctactccttatcatggacctgaccgcaaaaccagacccggatcgcaaacatcagacagaaggagtagatacaccagcccctcttcaacctacaatggctactattcacgatgatgatgagctgttgttggcccgcattggctataaacaggtattggcgcccaacacctggtggggatcatagcggggcacaatctgataacaattatcctgaactaggagttacgacgagagttctccaaatggtcgactgtctcatatgccatctctattcttggagtccttggctccgtgccggcgacattcggtgcgccgttgtcagctggcggtccagcaacagctgtatggtgttggttgatcggttcatgcatggctatgtgcattggaagctccgtggcagagttagtatcggcatatcccacagccggagggatgtactttgtcacaaagcaggtcgtgcctcccgatcaggtcccaattttctcctggatccagggctggtgtaacctccttggacagaccgcaggagtctccagtgtggcatacacggtcagtcaaatgttgctggcctgtgtcagtatgaattcggatcttgtagatggcaagtattcgtatgcaccgtaagtcaactagcccgaatcgctacgtttctaagctgatatattcaaggacggcgctggagaccgttctagtatcaatcgcagttctatgtattcttggggtgatttgttcgttgactacgaaatcactacatcgaattatcctatggtttgctcccataaacagtgtgtatcaagagaacttcgtcgtctgacttgtactaatgaattcacagttggggcgactatctgcatatgcattgcgctgcttactcttacccctaatttacagccagcctcttgggtcttcggtcatttcactgatggctcaggatggggctcaaaagtcttttcttttttcctgggctttttatctgttgcatggacaatgaccgactacgatggaacgacacagtatgcgactctgaaattctctattaattcatattctaacctttcatctttattatagtatgtctgaagaaacccatgatgccgccgtgcgaggaccagttgctatccagacagccgtcttggtatccggggcactcgggtggctcctaaccgtctcaatgtgtttttgtttgaccgatttcgagggaattctaacctcccctaccggtcttcccgcagcccagatcttcctcaatgccggtgggaaacgaggtggcacagttatgtgggcatttgccattttggtccaattcttcacaggctgttcagctatgttagcagatacgagaatggcctatgcctttgcgcgagacgatgcgcttccattttcaaagtaggattttcttacctttgcacccgattgaaactccgcactgatacaatataggtacctttccaaggtcaatcctcggactcataccccggtcaatgcagtgtggttcgtggttttcttcagcgtaggcttgaactgcatcgctatcggctccacgcaaacggcaaccgcaatattcaacatcactgcccctgcactagacatctcttacgtgtctgtcattctcgcccaccagctctataaatcgaaggtcaaattcatcgagggcccttttacgctgggcagatggggtacttctattaactatattgctgttgtctgggtcttgttcatcagtacaattcttttcttcccgccacagcttcctgtgacacccgcaaatatgtaaggcgcttgaacccggtttatattcaggtatgaaaaggtatactaacatgactctacctaggaattacgccatctgtgttggcggctttattgccgcttttgctttgatatggtggtgggttgcggctcgagggtaagaaacatctaaaattaacttatacttccagcatcattcaggtggatactgacatggcctcctttatttctgcagaaagtacactggtcctcaaactaatgatatcatacgagaaattcccaccgaggacgatggcgacgattccgaagagtcaggcgagatcactgtttagatgacatattcattccttacgcacaacgacaacttgcgagttcagttttctagattatggattagatatatattatgttcatgtttgtttgaagttttaggcattttagaaatgggtcatgttggtttcgggttaaattgtgtgtcgatgataatgttgtttttgaatataatactacctgtgacattgacttgagcaaaccagtagaagaaaacctgtttgattatgaatatcttgatttcggaagaaagaagtggctatgaatgctttgttgaccatgaagttatacaccggaaaaagatagaaatacatgtcacgtgtagtcttagctgcctgcaacaacagccaggccctcgtagattttccttttgacagcaaggaagctccctattccacgaccaccaggccgagctagtgaagactgtgccgttgcttcgatttcaatcttgcccgttccagatttgcgcacagctacggacttgtcaatgagaagcgttccctcgcctcggaactcggctgtgtgaccagcggattgcatcagcttgcgaagatcagccaatcgcaggtcaccgacatgaagagggcgagccatagacctggttcccgcggccatgctagctgggagagtgtcaagtaaaggatagacttctaccttctcgattattttggtgtctgcttgttccaatgtcggggcgacggcggaagaggctgcttcgtccttcagctgcttcaccttcttgcctgatgtttcggcttccccgatctcagcaggctctggccctctcaactgtgccatgagagcaacgacgccgaggctgcggacgtgttgccaattcaagcgtcgaacgagcgtgttgctcagcttgaccatccaggcatttgtatcaacacttgcatcgatgacttcgccgttcgcaggagtgaagataatggcagccgagtcaaacgcagggtcagaaaccgtggcgccgaccttgactgtcagcagtttctggcattcggctgccaatgctgacgtctcttctttcatgctaccaaccaggatcaatttttgaggttggatcagtggaattaacatctccaagctgcgcttgtcgtgcaagcccatgaagtcgatatatgcaatcctagcgttgatagtgatggtctgggtatggtaaacaaccttcgcaggaccttcgaaggactggccttctacttcgtcctcggactctgcagctacatcggcgtcttcgtcatcagaggcaaggctgagaccatcatcttcaatcttcttgccatcaatgtgaggacgcttccgtccttctgcaccgccagacaacttgcgtccatttgggccggctgcatcatcccatcgtcgtttttggcccagcttagtctcggcgtcggtacgccgttgttgcatatcaatctcttcacgttcttcggctcggagatactcttctggacgaatgaattctccatattcgtctcccttctttcttggtgccacgtaaggaaacatgcgctcgcggcccttcttgccacgaacgtcgtaatcataaacgttctttcgacgaagaaggatgttgatgcccaagtcttcgtcactgacggcaagtttgcttcgagtagcgtgtgcaagtgaggccgaaaagttcagtgcgcgaccttgctgttcaggatccgagtcttcagaagaggtagagctcgatccgtcatctagagcatccgcagcagtttcgagagtttcttggccaagtgtttgagatgtgtcttcaagttggcgtttggtcgcgagatactgctggtatattagatgttccccggtatcgagaggggctcgctgcacatctgtccaagacaattctcgtccaccgctgtggacttgttcgatgtgttcgccgtctgatgctttttctagagccacaccatctcttcgctcctcgtaccactgccaaatcatacttccaatggttgccgaactctgtgatggtttcgattcttgagtcgtcatatccttgcggaaggactccgtcagcaataacagattgttgggtccttcggccacttgtcgaagcgcatcctttgagaagccccagtccattgatgtattggacgcaaggattaccttaggtccaggctctgccaggagcttctcaagacgcttcttgcgctcaatgatcttgagatgtttgaaagtgaatggcccaccccctttgttagagctcttgtcctgtccccccgtcctttgcccgttcgtgacgtctgtgctttccgccgcttcaaattcgcgaacaatgttctcgtccatccactccagcatgcttcgggcgagtcggattgtgttcgtaacctttttgccagccagatacaacccggccccttgaagaacatcctctttgtcgccattcgcggcatcgcgccaagaatgttctagtgcgtaagctagttcaagaacccgcgcacttgtgtctgtagggatgagaactgttccacctttcgcaaggcaacttcggatcatgtcgaggaggagatcgtctcgctttttccgacctcccgaaggtgccagcttatcgcctcctgttgtactacagatcaaggccgtgggtttacgtaactgttcaatgacttctgttccactggcaccagagccaccaaaccacgcagcacccgcgaccacactctcacgagcttggttccaatccattgcatagacaatggattccagcccatgctgaatatgccatatcgttccaccgacggtgtgaccggcattgtaggctgtgagagtgagcccgttcaacggcggggagaaaggcgatgggagaggttggtgcggttgggaatatttgagtggctgaatgagagagaagtatcgagatatatcctccgctgtcggcgattgaagaagtattcgacttgcgctgccagtggcctcggtgtctccgcctgacacagtcgcagatcctgctgacgatgcgcccggctctgagacagaagccttcggtagaaatgtggcagcgagcggagcggaggcatagaggtcttgtaggagggtacgaccgaaagcgatcacaggattcgttgcatagattgggatttgcgtgaagagggggaatgttcggcagcaatggactagagcgccaatgtgggcgggtgtggcgtgtgtcaagagaatgagagaaagcgtaggaatatgcctgattatggtattagcccatctgaattcaaaaaccttggaaggtaacccagatcgcatgctcacttctcaagttccgccaaatcaagggtattaaacttgtcatcccagccaacatccactaggattttgatgcctccatcgagctccaagatagactgttgtgcctttgaagatgacgactgggcgccaaggaggggagtgaacgtgaacatcttgagaatctgccgttactgacggcaaacctagcagcgcgattgttctggaccagggatgcggcgacagatcagtcacgatcaatgaggtaatgcctcgatgtatttggtcaattccaagattgatccattatcccatatcccagggtgtcaaatcgatccgactttcgcgaacaaagacaaaagagataccaggcgacgggcgagcttgtttgttcggtttgcacgtgacgtctagcaatataaagccgaactattgtataggtcaagtccttccctcgacacctttcaagggatttttttcaaacttacatttcacctagccgtggatagtttggtattgtatactggctcctggtgtttatccgagtttcgtgtaatcaagcgttgccttgcgattatgccatattctacaaccgggcttgaacatgcaactatgttggacaatatacatgcttcgctccagactagtatcgtaaaaatgtaatgctcaccagaagaatgatgaaggtcagataaaaatatgaaagaaactaataaatttgaaggaaagaggcataggcatcccaaactccgattctatataaatccgattaaaccacaacacccatagaaacaaacttcactaccaaactatggagagaaggtacacaacaggtttatctaaaggaagaccactgggatgaactgactgactgctctgctgcagatgctggtcttggcctccttttacctcgccctttgctccgtctttttgatctcaagagctttgtgcgcgccgcaggcgtaggaatttccccaatctaatagaatatggtcagcatggctcctcaaaaacctaatcaatggattagggcacttactggatcctgccattgaccgaaaggccggttcctttcagcccaagggggtagcgtagcatcgactttgggtttgatctcatggcccaccaattcctcccctgcccagactctggctcggcgaatagcaatagggtcagggaaatgcctcgccctccgtattgggtcattgaggtatattcttgtctgttctaggaacctatcttgcagattaggcggaatctcaggactaggtgcgtccacctgcggtcttgcacccgcctggtttcctatggttttcttcagtgccaccggcggcctgtctgatattttatctgctgcagctgctcgcatttcgtcccgtttgtcttgttctgctcgagcaaatgacatgactttatccaccgtgatctcagccgctgttttccttcgaaccgcggatggtgatggtattgatggtgactccatccgtattcgtttacttgattttggagcccctattatttcaagttctctttttctcgcctctttctgtgcgtcttccagtgagagctgtgctcggcgctttcgctttgacgcttcgcgatgtccaactccgcctagcctctcaacttgaacagaacattagcataattcactagggtgacagctaaacatattgactcacaatttttttgcttcttcctataataccgttcaatctgctcagggctgaaaagcccatcgtgggatactggggataggttattcgtcgattgatcgctattatcgtcagcggtgttgaccttgctaggctcactggtcttggaagaagcgctgacctcgctgttagagccggacccagacaaggggctatcaggtgattgctctcgagagtctcgagctgagtgaggctcagtctgaacgtcatcgccgtcgccaaagattgaaccgtcttccgagattgtaactagagcctatcagtcagcgtattgtccgaataagtctgtagtatgcagcatgtaatgtcaaagtggttaatcctcttccccagaaacgcgacaaccagtcgtcttgggtatgactgcttctatgtatcgtgccccacagtgtagttgacactcgcacaccttccgaagggtctattgaaaaggcaaacgaacacgagaatgaaattcgagtcaaactaagcacatttgtactcaccacatgaaaccttttcatcatttcgaaaaggcgcaggggctgccggttccgaataagtaccctctggatcttgcgacttcctgggctcggctgtgtgactttcttcgctgccctgtttgccgccccgttcgctttccgggtccggactggcagagcgcgaggcagtcggccattcttccgatcttggtcgattgtagatggacgccacggcatgcggatgcggtcgcgccatgcgatcgtcacgcggtcggactgccatgcttggacgatcataattagggaagtaaaaggccgcattacttgattttcgactggattgctcggaggttcctgtcgcaaagtgccttgtgatgggcactggcggcagagctgggtcaatggccacagccttgagcaaagggccctgggctagggaatcatagatctgctctcggagctctgtatgggtgagagtatattcgaggcacaggtacgcaagttcgtaaagagctgggtattctagcccggtccagttcttgaagtcaccttcttcaaaggtccactgcaattctccgaagtccctcgtaccaccagttctcccggaactggcttttgaggcatgtcgtttggaagggacttttatgtttgcgctgttttcgctttgaatgatcacccaacgaggctgtggtgcagcgcctccaatatagatgggtggtagaggtccgtgatattcgtcctccacaccttctgggacatgaagtttctccatgtacgcccatttcccaatttttgaagctgggcgtttgaatgtgggccgaccgatttccacattaggaaccagagtcttgaccttgcgtcttttggcctgtggttcatagttgtcttcttcactttcttcgtcctcgtcttcgtgatattgttttgttgaagccttcacggtagctgcgctaacactgctctttgtagccttcgccttcttggcggttttggtggctttgatggccttggtcttcgcagcagttgtacgctttgtgccctttgtgccattcttggtcttggcaacctttgagattttcgctgcagccttctttgcatccttctcagccttagctgcagccctctcggcctccttttcagccttcatcttggcgactttcgcggttttgacagcttttgcggccttggaaggcttagccagtagcggctgagcctttggacgagtacccgcagtcgttgatcgtgttgcaaccataatttgagttgggtgatggtcttcaggtttgatttggtttgttagttggagaatgtaaattggtaacgtcgggacgatacctattgtttgttggtgttgttacgataatgatgattgatctgatgacaaaagatttgagtcaagaaaattgtggtcttgttggttaagggaaaatttggatatgttgactctatattaatagaagacagagacgagtcaccattcgtgccaatagacaaagcacgagcagggacgaagaaatctgcagctagttaccagcacaaagaaaaccaaaaatatattttcgagccctcttctttgttgactgcacccagcttgttatcaatacgccgatggccttgacaaagagcgcttcaggtcaatcctgatacgaagttccttttttgcaatcgaaagtaagtttaggtcagattattcagggttgataacagctgtattgcaacacctggacaggattataatttttatcactgttcgttgctgtgttcatttcgacacaaagtttcgagggactgtagaagaccaaaatcagttcgtgaggatggaatcaaaggaagtcaatagaacagaccataaacgtaacccagagaaaccgggcagttcgaaaaagaaaaaaaaagaaagagagaaagaaaccaagagtacttcgagggcgcatgagaaacaatgaacaaggaccgggatcatagcagtatcaaaaacaaaataaacacatcaaagagagcaattctcagaagatcagtcccagaaacaaaacacctcgtttcgggctcataatgggctgatctgatattgctgatcatctcgataaacttgcacccaccatgcttattccagagaggtccggatttttgtatttgaaatccaacgaagtaatatcgacatgtctcccgacaaactgggaaattcggaattgcgaagaggtgggcgagttagggcttgattccaagcggggatacccaaccagccacttccactaggaagcaaagctgaaaggcaagatcgaatctggttcatgtccagatttggcaatggcccgcctcatttcctatggtgaaaatgcctcttaaacaaagcgactcgtatttccccattgctgggcctgacaccagaacgatacaaagagatttgaggatgggtgagtccgtgcaagcatgaaggaaaagcgtaatcagcaacggcggatggaaaaaaattgcgcaggcgtgctagtctgctgtcattgacctatcctgtttcagattatctctgctcgtagccaaaactattattagcgaacgcctatcacgggacaaaggccatctcaaagatcctgtcatatacaccatctgagacaataccctaaatttcggtccctcggatcgtgcaatgtacgaacgagtatgtagaagaaggccgaggagcacgagctagaagtgaatactgctaaaataaaatcataaacagaaagtcctctcatcattcaagtacactaggtatattggcagccccaaagatagtgggatggctgccttgttcggtccttaattatgtcacgatatgggcagactcatcgaaagtaatcccttcaagcgaacttttgcgcaatgaagacccaggcagactgtctattgccagtacctgggttcatcgaaaacatggtagcggtgtccgcgaactccctcgccgcggaacaaggcagggaagcggcggccaacggggaccatctcctctgggatacgcatctcattttcgggttcgggctcgccgatgacgaactttccaacctagatcacgaaacagtcagaaactaagcacgcgtaggagaagaaataaagagagagcatcacttacctggatctccgtatccgtgatggtatcacgactaattctggcgtagccagtgcgatgcagcttcttaaaaagaaggtactcgcaccatctatcccagtcggtagagtcaatatccttcatttggctgcgctcgctcacataggtgttgtagttgccctcgagcggcttggtgacgaggtaacttaataggatcaggggacgtggggaatcacccatcaacttcgacagatactcgctctgcaagcggcggtcctcagggtcttcttcctgtccggagtggaacacaacaatatcaaccatctcgccgtacatgtcgagtgtggcgtggattgcaggtgccagctcacccacaggcgaggggagaaggtggtgcgtagagttgacaatggggaatttagacagcaaggcagagccccaggtgtgcttgtttggaccggggccgaagtcagtgtagtagccaaggtcctcagcgatgaactgagtaacgtccttgttgcccatgatgatacgctgattgtcggattcgaggaaaccaatgacatccagctcaagctcaccgatgacatcgcgcatgcgccgctcagcggaccacatgttgttgtcgaggccgaagtggacagtccagataccagcagtcacaaccttgtcttccttgtgataaggtgtgtagtcattggtcgggaagcggaggtaggcaatagacacggaaagcagttgcagcacagcaagaacgtagatatagtacgatcgctgtctcctgctattggggttgacaggcttgtgaggcttgcgggagcgagtagagttcgaggtcgccgcagagaaaacacccgcaccaatggacagcattgtagtggtcatgagccagtcagtgtgctcacgaaggaatggaccgcctggaacgaaggcataggcgacaacccaaacgtggaagagcaaaagaaccacataaacaaggaagccgatgccgaaagtgctcgcaggagagtgagcaacgctggatacaatcagaaccggggcaacggccatggtatagaacgcaagaatgagggcaccgtagaatccagtccagtggtggtagcaagtaagaagagcagcaccaatggaaccgacaccgtaggcagtccagcttccagcaattctgggatggaaaatgccgtacacaaggccagcccccattgcgaagatcgtcaaagcaccgtgaggagctgcgatcggtccgcgcactgggtatccgtcccagacccatgagatcatggtactggaatcagtcaaaagcgacacaatggtgaacatcagaccgccaaatccaacaccagcaagaatggacgagcccttcttgccacctgctggcaagtaatcaccgccgctcgtgtttgaacctctctgggacctcaaaaccgcgaacaaagcaatgaagattccaattttattccagccaccattctcggcgtgaacaattggccaaagggggttgttggtcttgcatgcaaacttggcaactacagacaaaaccagaccgattccccaagccatgatacgggcctcgagacgaggagcgttgtgccgttcggaaaagaagctggcggtccatgctgcacacgtagtagaaagagcgaatccagtcacaaagaggcggttggcaggatcctggaacttatatccgagaagaccaacgagcgaaatcaggtgaagaaggcggaggttcttcacagctgcatatcgcaaagatgggatgacgtagaacaacggggatgcgcagcaaacaatggcaacctcgtaaccagagatacccatgtgccaaagagggaagtctatcaatatcagacaagtccatatagagaggaatatgtgtcacttacaccagacaaggacaggcagaccagtcacgatggtccagaaaacaaactacagtccattgtcagtaacacaaaagaccaatgatcgaccggtataatttaccccattgtagacatccgcggcggcatcaatgatctcggtccagaagaatccctcgccaaaggtgttgcccaccggctttcccttcctacgtatgtggttaatttccgggatggttgtagttggttatgggattgtacacactctttctccaagacagaatctgcagtcgtttccaattgcctaatgaacacaaacttagacaatgtctttttttttcaaaaccaatatagcctttggcactatacatttgatgcgggcagtgtcattttggaagccacggtacataccctctgctaacacccttaacatccctcaccactagttcgaagcactcaaagtcaagagctgtgacagcatcaaaaccgacatcgaacaggattagggaccattcaaagaaggcatatttggtgtaggctaaaggtttgactgattagcatgcgataaaccccagctgaatgctcacgaagacaagtactcaccaccgggaaccttgtggaccttgtgctgaatgaaatagtaaatcagtggaaccaaagttccaaagaacaaactggccaagattttgcggtacttgacggcgcggcggttgttcgggctgagtgcaaggcaacccagggtccacggcaaggtggccaccaagtacgagatcatgaaaatgtcatgccagtcgtgatcatcggtagatgtaacataggtccaaccaccacatgtcaatgtccggaaaatgcccacgccggcaaccaacttaggtaaggtcgagttcgggcgcgaagtgaggatgtaccacaggaagacaagcgcgaagcgaggaccggaggtaatagcaatgaagacctggaaaaaggaccgctcgggataacggtcaccgatggtcgcagacacggaggggaaccattcaatagggtagccgtagtgttcattctggacgatcttgtggtagtgcaaagcaatgccgacaatcaacgcgctgatgaacgctgcatatgcgaaaaccgtgtgagtccatgcaacccatttgccgttgatctgcaaagatatcaagtcagtggcgtttctagatccgcatcagatggcgcttcagcacttacggcgaccacggcatctccgtccttgtatcggggagccatggcggcacagaggtaaaggcaatctctgcacctatatgattaaaaaaaaaaagctaaaattgagaaagaaaagagcgtcggaaaaagaacgaaaggaagaacggcttcaacaagatgccacgagcgaacggcccctgagagaaatcggatgaaaacaacgcccggatgcctcggtggttctgagcgtcgtttacgctaacccaatgcggctaagcgcaccctggggctgatcggtgttttttcaatgcgggatgccgactatttttttttaacatcttgagtgaacagcaatcatgtccgccgcaacagataaggctcgatttttcctcgagaagtcagtgcctgagctcaaggaatatgagcgcaagaagattttcaccaaggtaagcctgcgaggcggaattcttccattagaataacagctaatgataactaggatgaaatctcctcaatcgttagaaagcgatctgattttgaacacaagctcaacgcgcgcggggcgcagccagtggactttgtgcgctatgctgaatacgaaatgaacctcgatgtgctgcgaaagaagcgggtgaagcgacttggaattcggtcggcagggttcaacggccagcgacgcatcttcttcgttctcgaccgagctacacgcaagttccacggcgatatcaacctctgggtccagtatatcgaatatgctcgcaaacaaaaggcacacaagaagcttctcacgattttcaccgatgctctgcgactacaccctaccagcgccgacttatgggtttatgccgctaagcacgtcctcgatgaccacggagatatgacacaagctcggagttacatgcagcgcggtttacggttctgcaagagcgcgagggcaatttggattcaatatgcaaagctggaactgatttacatcgcaaagctggtcgctcgccaacggattctcggtcttgatgaggagagccagaagcccaaggccatccaagaagcagaaattgacgacactgatgccgacatgattgcgctcccatcactcacagccgaggacatcaacccgagcacaggagtggacggagaagtagaccaggttgcgctgcaaaacctgaactccacgcccgctctgagcggtgctatcccgctcgccatctttgataccgccacgaagcatttcgaccacgatgatcggttcggtcaggagttcttcgacatggcttgggaattcggggatgtgccttgccttcgcaagattttggaacatgtgattgagacgatgcaggccaacaagccttccagcccacggacgcagatttgctacattaagttcccgaccgctggaatcccttccacttcggccgaattcccgcgggcgcttggtacttcgcttgcccgcctcagggagtatcccatgggcaaggatctcgcacaccaagtgatcaactggctccaacccgtccaggcaacaaaggatctggatccttcgttgcagaaggttattgcggttaccatccgcaatgcggagcgcgcggcacaggagtagtatacatatagcatacccaagtattgtacttagcacttaggcgttgatcggatattatcaaaattcagggtccatggcgaacttttccctttactaccatttgcatgatcattatcaatcatcgtatttgcttccccggcgactgcttttcttgtcgctgtgctgtttcttgtctttaatccgaccctcattttgagccctctgcctgtgttttccttttgtcagatgtgctcgatcgcttccatgaaaaaagtgcacgtacaatttttgcacgcgatttctttgctcttgggatgtttccccggggatcacctccttagccgagctctgcaatagctgatagagcttgtcaaagcaggattccacgttgctagactgtttccgctcctcgtccgactggataattagacattgggctctttcggcggcatatcgggaagtgcgtagtggacggtgtatcagacggggaaccaagggcagcaaggcgtccaatgggactttcaaggtggccttggagttgaccctatttccctcatctcccaattagcatcaatccagtactggtattgctgtacaagtggggacactgacttgttcacattttgcccgcccggcccgctggaccgactgaaagagagctcgcagatgttgcgggggatggtcttggaattgagggttttaagccaatccctggctagttgtacatcctgttcggcttgagatgcaaaccttctcaagggtagtgcccgaaggcagggtatacgccattggcaatacatgagagaggcagtccgtggccccggggagaggtggagtgtctacccttggaaaacgaacggctgtttctcgcctggtctagccccgcttagcgctttagcgtacgtaacaaaagcttttattttgactgggatgatgatttagattgattagagtaattggagtagttggagtggttggttggaatggatgatgtagtgatatgtatatgtgatgtagtatagctacattaaagtacatcccattcctatactccatacaaaattcctatggaatatcctccttcttatcagaatctaaatcaattaaaacaagatccattaacttgccctcgtgatactagaatagacatcccaaatacagaagcccaacgcctccggttgctcacctgacctacattttttttccatatttccacttcgcacctgtagaaaccccacctattccctattccttcttcatcgcctattttttctttctttctactcttcccctttcccttctgggtgaggtttgtgaaatacgacccatctttttcccatcgccccaccttagcttgcgattgcgaaaattcctaggaccctcttattcacccatctcgccccgacacttcctctccgtagatgaaaccaccactttctcgaagtctacatgacgcccagtccccccgatgaagcgcttcactttcgcggaaagactctgaccccggaaagccctcgacccctacacatcccagagccatccaatatcccagttttagagaaccaaatggaccccgtcttcaacgatacctccacctatgaacgctcggtgtataaacaggccccgcaaacacacgatggatggttgcacggaggatcaaaagatggtcaggggggaccgagtcagacccaaggtgctggtagttttcatggctcgcagccgaatcgtggggtgcagaatgaaatgattgcttctgcatactattctcctcccaacccagcgtccgggtcggaaaacaccggccatctgggctctggtctttctcctcccgattccacttattcccacactgctccggttgctccggtatcccaaggctttgccactgggagcgaagtagaccctgcccacaaaccggagcagtcaaggatgtcggaccgcctaattgctgaggagcgtgtgggacataaggcgggaggtgtcaatttccagcaactcctcgacaacctttctcgccccaaccctggtgcaactattcccgtcacttcttcggctgggcactcgtctctccaccaagcgcccgctggcgagtccctcaaatcccagggcatccccgcccaccctcaagcccaaagccacgattctgtccaggcccattatatgccaaatggcgaggtggcatatcaccaacttccgtctgcccatgatgctgctgccactgcatcgcctgcctactcagcccaacctagtaatacccaagcccaaacccagcctcagccgattgacacttcttcttctggaggtgcctcggtcaatctacctcctcctattgccactttcccgcaacccccatctacctgtgccgaacctcatggctccttgcaagagccttctgtagcctccaagaaaggccgtgctgaaaagcggtccatcaagcccgctgacgatgattcgccatggggtccagagattcaaaagaaatatgacgagttcctgcacgatgagcggatctatgtgacggaaggtctttgggatcggttccccgtgggctccaggctgtttgttggtcagtattgtttccgcttatgtctactcttcgtcgatctaacattctcatcatgtgcaggaaacctccctaccgaaagagtcaccaagcgagacatgttccatatcttccatgattacggcaaactagctcagatatcgatcaagcaggcgtacggcttcatacagtttctggaggcgagttcttgccatgaggctctcagcaacgaacagggagccgtcgtgcggggcaggaagatacgtgagttactggagccatagctcaacaattcttctctcaaggaaagacctaaccgttctcagatcttgaaatctcaaagcctcagcgatcgacgcggcccgctcaagcatccgaagattcccgtgcaccgccaccacgtcggtcccgatcaccggagttcaaccgtgcccctcctgggcgaactaacgcccgggcccccgtcgatcgatacgaccgatctaagccatatgaaacaaatcgggttccattcagcgatttccgggatgagccctctcaccgcagtcgacgtgacgattatcgcccgccgcgctcaccatcccctcgaccatttcgggggtctagagatgggtatcggtcgcgcgatagaactccagaaagatttgatcgccgcgagcgaaggcgctcccgctctccacgttcttctcgctctccttattccagagatcgacgttaccgcagcatcagcccccggccacgtgggatctatgaaggtgaggcggatttacccgtgcctcgacgagctcagcgagatgtaccagaggtgcagctcctcgtgctggaggaactcgataggttagttgaatcccttgatgtctgtttagacaaagtcgctgacattgcgaagaaacttcgttcttcatgtagagaacgctttccgcaaccgtggattacgagtcgatgtcctggtgcttggtccacggatccctcttggcgccgctgtgcatcgtcagtttattgaaggcgttcttgcggttgtccgcctctctcgtccgaatcaagtctctcgaaagattcctctgcaactatttgatcgaaccgctggattagataacgtccgcttccttggtaagcgcattctgtgttcgcctcttcatcgacgccttgctcatctttctttcccatatagattaccctgagcttgagcctaatatgtctgctgagctcctgagccaccaatcccaagcgatgcagcgaggagcagccccaaccgcatttgcacccaaccctggtttcattatccctccagcacagcccatgtcggttcctcaacctggcttgtctgcgctttcgaatccacccaacattgcgaacctcattagttcactggatggccctagtctttcaactctcttatcggcactccagcgacctccccattcgcaacctgtgtctgctactcagtcgcccttctcctcaccgaacccacctccggccgacctcgccagtctcctgaccaacgcacatcggccccaacccatgcaaactaccgcacagcaaccccttcctcacccacccttcaatctccaacctgtaaatgcacccgtcatcactgatccaaccttactctcgttcttggccaaaggactgggtggacaacagcagcagggccagggacccgtcggtgctcaggtacagaacctgatgcagcacctcgctaaatggaagcaatgatttcacgactctcttattgcctatcattctcattcgaacttaaggttcatcttgtcatcattttcggagcctggcgttcttgcaatccctacttggtggattttagtgctctgcttcggttccttttttttctggctggccgaaaaccagttcttgcagcactaggcgtttcctttgcttttcttttttgctctttgcttttctcatgtgtcacaaatgcagtaagatattaggtagatattagggcaaggcggtacctaggatggagttgatatgtctttttcaatcattggactcttgctcattgtgaatactggtttattcccccccttggacatgatacggatgtttcctgtatacttattttcggttatattattgctggatatctctccatttgacatcaaagcgtgtgctcaggcagaatgagtcaaacttcaatcctccaggtaatcttgtagataagttcacgagttatctacatatagtacgcaagttgagaatcttccgggggctctcaatgcagtctcaacaccaaagccctcccatattcctttatttgttgcggagcagaagacatacaatgcagtctcaacacttctgtttctctcgcgtctccttttacttggctatacagatagatcactgcagaattgtatgcgagctggtcttccgttaccagggaataaaaacccaacatgcaatatatagttacaagtatgtagtctaactcgactgctgccgtaaacagtgatgaaccctcgaccttaaagtatgggttatacggggtataggacggagcaagcaaagcaccccaagcttgcagcttctagcaatgtacctaggtcatcatggtacgtgataagagaggatatgctacatattgtacaaaggttaccgacaaagtccccctggcttcttatttcggattccaacctttctccttcaactccttcaccttagccgcatcctcattttgaatgcgctcgatcgtcttgtcccggttgaactccatcacacgcttttccttgaagtatttcacctagtagacgccaagaatcccgagtcagcaatctgccaatggatagatgtaatgtagagaaagctaggaaacaccaagaatggcagttatgagtagcaaatcaaagatcccatcatacgtacccagctctgtgaacatgccgcctcaaactccgcgacctcgttcgcgcacttctgtcgtgccttcttatcatctttaatagcgtctaggatatcgttcttgtcaaggcaggcgaaaaaatgatcacggccttcccagcagcgtgcgcgactcgttcggtctggggcaatgcggccgccgtcggaggctgcgttcttgtttgaatcaccggaagaccaaggtagccagaccattttggagaaatggttatgtcggagagggagcgggtgagaaattgagctgtcaagttcaaaatagtagagtcttctgtggtttgtagcgagtcaaggtgttggtgacggcagatgcccagatgttggcgggtcaggcctgtgaccgccaagactgttgatcccaagcaggcgatcttcatctccggaccctttctcacttacgcactccacgttctggagcttacatataattttgaggcctctagcactaaatacttatcgtccctggatctcacttggaacaccctcaccgcattgcatgttcccttcccttcgcctccaccgtcttacccgagcctcgagcctcgagcctcaagctcaatccgacctgacacatcgaccttgaaccaagttcgcgagggtgacaagagcccccagtttctatttagttgatgtccgcgcgccgacgtccgccagcggggtcacgcaccgaactccctccgctgaagattgtccgcaagatcctcttgctgcagctcgcttactatgcctgcgccacggtgctcatcctgttcacgacagttgtctatggcgccccattctctctagacctagtctttggctgggactctctgcgcggtgatacgacccttggatggatgttggggttggtgtggatgttgaattgctttattaggtgagttgtccgctgaattccacatcgtgagcagcatttcgatcagcagctaattataatctcctctcggggatgcttagcgtcatgttcctactcgttttcgtatcccgctcaaaattggtcccggatttcgccctgacgatccacttcctccacctcatcgccactactttatacacccactccctcccttcaaacctactctggtgggcgcttcaattcgccagtgcatccatgatgacgttccttggcatgtgggcatgccaaagacgggagctggagcctatcaagtttggtggacataatggcagcgcccaagctggctcgtcgccacaagcatctgccggcgatggtcagcaggagtcgagctttggccgcggccgcggccgagaacgtagcttgcaagaatatgaaatggatgatatgaagcacacgggtgagcatgctgtatgatttcgcattcgctcgccccctcgccccatcgttgatgttccccgttgggcgatgaacgactttttgttgccctgttatatcattttttttttctccttcttgcgcttcggtctatcgcggactctttgatgcattttttccattctgtatacccttgcggcagttgcatctgtatagatggcgtttgttctgagggaattgatttccatattcttttgttcgatacctgtttacattaatatctgctagctttgtattattcttctcagttggatagtctgacgggctatgcctatgaaaaactcgtgtacaatctctacttctcgaaagcgacattgtcttgaaatgctttgaaccgaatcggaaattgttatatattgctcacaccttacagtagaaaccttccgtttgtctcttcgataagcaaatcatactcaggctggaattcggtatagaagttgtgctaaaaattgtcagcgtacatattctcaggtgctttggcatatatgtctattccacttacgggattctgagcagcatcggcggtgaacttggccgcttcatccttgatgatcttctttggaagaccattggctgctgctgcttccgcaagaagctgtgactgacaagcattctctagcatagagtagaggatcgcggcttcatcaacagttcgaccgacagttaggaggctatacatgagtaaggttagatagaactagacgcatatagaaaatgcaatggcgaaaatcgactcacccatggttttgcaagatacatgcaatgttttccttgcccaaggcccttgcaatcgcctttccttcctctgccgacagaacaatgccgccatggtcttcgtaaacacccactctgccaaagaagttgcatgcgtcttcatccagcttgttagcacaaagccaaacccctaatacgactccaagtgtaaaaggaaaagccaccaaccttgtgtaagcatctcgattggctttccaaatgaactccacgtctttccatgaataccatgcgtgtgcgccgcagccacaacatctggacgtgctttgtggatctccgaatgaatcaggaatccagcttcattaacaggcagctgagctccaccgtcgacgacgaatccatcagcatccagaagaacgagatccgaagccttgatagtcgagaaatgtttggcgaacggattcatccagaaatggtccttgaggattgggtctgcaaggcgtcagaatattcttgctcccataaggtatatttcatttaaacaatgtgtctgtatcaaacctacctcgcatcgaaatgtgcccggagacaccctccccataccctagcttgccaaagtaccggaatgcagcagccatgtgctccttcatccacttgcgcttctcggtcagatctgaaaatgtgggaataccgcggagtttcagagtgccatttcggcctccacgagctaggccctggaacgatgcatcgtttgccgctggtggtagtgggggtagttggtcttcattggtcaagcgaacagactgcacttgctgtgttattgttgtagatgtcgacatgatgaaagattgtcttgatttaccgcactaactcggggactgggccttttaatgacgagagttcgaggtccggtactcgggctaacctccgagctcttatctatgggggaccccgctctgtcgttggaaggcgccggcagcaaattggaacagaggcttgtcaacattgaatgcgtctggattatttcggatttgaaatcaagtaaatattggctctagcggcgtatcatgccattgtgataagattatcagattggtcaaggtttcaaagttggttctctgcctctgaatccccgaatttgccagcattgtcaatatacaccggatttcaggccgcgcgaaatagcttcccctttcccttagtgcgcacccttggtcgctctttactcactgagtatgttgtagagctgagcacgcccctgtgtatcgtagccattaagctcgctgagcatcaccatcacctgatcattatataagccggatacttgcatacgcgactatcacatgacatttactatcctcagccgcaggacagcaaagtccactagacgtttggactcccgttaggactagatagtcgcttatcctccggttcttggtgtaatatagcttcgaagacgacataatcaagataagtgagagctccatgcttgaaccgatagcataggtaaattgttcatttgatgtatttcctttagacgatgcgtagatctacagagagctttaggaaatatgattatatatatatctcgaggcggtgctggcctctgggtgataggaaacaaagtcgatatttctgtttgtctagccttttatccagcctagagacgatattgcctggttttcctcggggcttctgaaccacttgcacgcacaatgaagtcgcagcctctgatggtgaccctctcaccactcttacgccctcgcattgcaacatccagcccattagccattgaaggcaaaccaccactggctggtcccaatgcatattttatctcccattggccatccgtccactcttctcttcgcgcgctcacctcctcgccagtgatttgaacaaccaattctccaagggatgttcgcctaaccatgtggatctgcttctgataaagcaccaaataggagcccccaatttgtgccagaaacgatttggtgacttggtgctggccctcttccaggacaccctcatgagactccaagatccacgaaagaccacgccctggcccatctggccctttgcgaaacggaacatacctccacacctcttcataatccgtcatcaccgctccgggtacatctggtcgagccatggtcccagtctccaaaacatctccattgggtagcgggatgaatggacatgggttgctcacgttgaaattatggtgggagtcaatctcatgggtgaacaccacgcgccctgtgttaagttagtcgtttattgtgtgatgcaccatggccaggaaatccgattgagatcatacgcgggtctttgctttcctgaacacattctcctgcgagggcccagtcgattttgccggttcgtttatcgactcgcagatcgacgtaccattcgccaaccattatcaccagtgtgtcggtggtttcgaagggtgtttctgatgcccatcgcattgagattcgtgtcattagaatcaattccaaagctgggacagatgaacttgacatttttgggatgattgctcaggatgcctactctgaagaacgggcgtgagaaaaattgacaggtcaaggatggtacagggtaatctgcatgattcagttggaaatataaatacttcaaaacaaatatgctaacatgtttccgatcaaagtgtttatcacaatctccaacttccaagaaatccgacgccacgctccccaaagtctcgctggcggttgccgttttcgcggactgagataaatgactcacttagttattcatcgaaggtcgaaaaactattcacacatttagtcattataaagatgataaagaaatccttaataaaaatgtgaaataccatcccgtcctgattctatcgccgcttggcaaagtgaaacgcaatgacttggattctgatcgctgctttcatagtagcctttcttgtctaccaactctcagtttccactttgtttagccctcttgcacgaattcccggcccaaagactttcgccttgaccaagttcaaattagcctatgaggactacaaaggaactcgcacgcgaaagatcaatgctctccatcaccagtatggacctgtcgttcgtatcggccccagtgaggtgaccttcaacagcacatcggccgtgcgtgcaatctacggcgctggaagtgggtttgagcgaactggcttctaccacatgtttgaggtttacggtcgaaagaacatgttctcgttcgcgaccacgaagcagcatggagaaaggaagaagctctttgcccacgcctacgccaaatctgcgatgctcaaaggacagaatgcacaaatggtcgagcagaaagtcaaactgtatatggatctgttggaacgagatggggggaaaagcgagatcttttctaccttgcactatttctccctcgacacaatcaccgagtttctttacggatctttcggcaagactgcatgtctcgagggacagagacaagattgcgcactcattggagacatcatcgatattgcccgccgcaagctatcgtggtatgcagttcacttcccccacttcacggaatggctctactccaggaccggagttactggctgcattgcgaaacggttttacccgatgcagatgccaacgacgtacagcggtatcagacttcacgcgctgaaagccactcagaaatatgccagtgcttctgccagcgcgaaagcgagcacatcggccctgatatccagactgtggagccaccaccattcccaaaaaccaaatggactagatgatcttgatattgcatcggaatgtgccgaccatcttttggcaggcatcgacaccaccagcgacacactgatgtttctgatttgggctctttctcgaccagaaaacagaaaattccaagacaaactcattgaggaagtctgcaatattcccgaagactcgctcgattcgaatgccatccccaaggtcgaaaacagcgacaagctttcttacctcgatgcagtcatcaaagagacactacgcctctacgcacctctccccggatcagagccacgctcacttcccacggcaaccataattgatggctacacgattccacctgggacggtggtttctatctccccatacgcgctccatcgtaaccctgacgttttcaaaaatcccatgaaattcaatcccgaccgctggttggatccttgtgagaacttggcagaaatgaagaaatggttctgggcattctccagcggtggaaggatgtgtattggcatgcagtatgttctttgtttctgtggagtcgacttccagtcgtgaccatgaaagatgactaacgagaagcagtctggcaatggcagaaatgactactttggtcgcagccatataccgaaaatacagaaccacaccaatgggggattttgacactgtctcccctggtatcacaggtcgctatgaggtgttctacgatgatacttgtagtcgaatgcgggtatgtttagctaacatatttctctcgaagactcactaattgtggagacaggaacatgaatgtcagattgaattcacgccacattaagcaatttcgggatatttatgtggtcgtctaagtatgtagttgttgtgccatgtgttttgatttgaatgggctcgcatcatattggggcttcacagattagatgatgattgaaccctaaattttattatttgaaattaaaagaattacatactattttctcacagtttctaatctcaaattcgttttcttctgtgatattgcaactactactactagtactatctcaatatctccacctggccgatcttggcaagaaccccacgatgattgtggaaagagtcagcgagacagcatgtctcattgatcggatttgcaggatttgctgatctgttttatttggtcttaagatagcgctaaatttataaagagcaatggctgcccccaattctactcatgtacaacgttttgaatttgttgaacaatcttcaaaatgcgcttcactacttccacattatctcttcttttgcagggcgctattgctttgaatatcggcccagaatatagtcatccgatagaaggtcagtcacgcaagatgacccaaagatcaacttactaaacagacaatagatctcgacgtcgatcttccattctctcagccagtcacatttgcccacctagaatggcaaagatgtctcgcagcatctcacaataatgtatgcagccaaaacatttgtttaccaataattccacagagacctaaccttcgcaaaagcctcttgacatcgccattcttggcttcccctacgacacctcaacatcatatcgtcccggagcaagatttggtcctcgaggcatccgcgcaggatcggcgcgtgagaagaagggccgaagctataacaccgtgtgggaggtggatccatatgaagagggacttgaaattgtgagtgtagtgcattttaaatcgatgaagtttatgaaatgcaatgtcgggatcgctaatccatcattagattgactgtggtgatatacccatcaccccattcgatgccgcgcacgctttcaaacaaatggagcagggttacagacaggttctttaccacccgacgtccgaggaaaactcatgggaacatcctcggatcgtgagtctgggtggagaccactcgattgtcttgcctatcttgcgatcattgaaacatgtgtatggaccgatctccgttattcacttagattcgcacctcgacacttgggatccttatgagggttacactggaatcgcgtccaaccagtcggcaattacacatggaactttcttctggcatgcgagtcgggagggctgtattgccaaggggacgagtgtgcatggaggtctaagaacgaagctttttgtgagttgtgcgtggctcttgtcgggaatgaatactaatcggaattatcaacagagtcctaaggattacgagatcgaccgaaatgttggatttacgattatcgaggcccatgagattgacgatatcggcatgtccgggatcgttaaaaaggttcggagtgttgtcggggatactccgacttatctttccattgatattgacggtgagattgccctttcctctatctaagacacagcagatactaatcctcaactagtcctcgatccgagcattgcccctgcgaccggaactcctgaatcgggcggatggaccactcgtgaattgaagcgattcattaaaggccttgaaggtgtgaatctcgttggtgccgatgtggtggaagtcagcccaccatatgacaccgttgctgagactacttctattgctgctgcggacttgatcgttgatattctggcttccatgtcgaagttgaagacaggtcctaaggtgaaggcgccaagttcaagagatgagctgtgagcagagcttgacatatgtttcaaactttgagatttcaaccatgtatgaatcacgctatatgagactttgctttcagataggcaagaccaacttgcccgattgtttgagcgcatctctccagttaagcacattctcatctaaatccatgatgttccagatttcctgtatgactttccattgccttttgaaattgcccattgagtacctctgaactcgctcccaccattcaacccaaggttgtcgatcgatcgcctcgcatgcagcgataaatgctggccaagacataggagctgcgcgttttccgtcacttgagtatacatctttaaggtcttctgccagcgaaaggttcttccaaattgcccctacttgctgctgaagatccaccgggctggagtcttcaattgctcgataataaaaaattgcgatcgcgctgtgaaatgatagagcctggcaacgtattatctcaagcatcgtcggctgctctagcatgacgtgatggaaagactcggagtctatatcccacgaaaagatttcatcttttaatgccgagcatgcctccagcaagattgttggcacttcagcaccctggtagaaggctaaatactcggccacctgacaggtcctttgtagaagattccccagatatggggtaatcccatacatgtattggatgttggtgtcgtcgtcgtggaagtaaggctgctcaaataatggaccttctgttgtccattgtctatgctctagctcgtgtgctgtcgttcgagccaggaggcttaggaaatggcaaatactgctaacctgccgactggagtcattgggtgaatcggacgcacggcctggtctttccagctgacgacaacccttgagatgaattggaaaatctgaatcttctcccgtcattgtctgatttgttagatttaataagcttttttataacgtggagcgaaagctacctacatcgattgtgaccaaggccagcattgccgtgagatagactgtatatttctcggagtcattgggcgttatgagggcagtcttgagtgcttgtaaagctttggcccgatgctggagaccaagtttgtggtattctcgtgaaccacccatgatgttccggaggtggaatgcagccgatgataatatactgtggaaaagtgaaatcgagacttccgaggaaggcaccggattttggacgagacagaactcagggcagccctcgagggcgaatgggagatatgttgtgcgccaagggttcctcggatggaaaactggttgtaggagctccgcgacatgatttttgtagtgatacataagcattgacgtattgtgatctttgaacagaggtattgaaagctccatgtctggtgatggatatattgtgagtgacatttttctcgagtatggtaatgttggagaattcggtgtatccatcatggctatcactgactcccagtctgaggggaaatctatgaaatggatttctggattaggaatgacattgtcattcgtaattatttcaaaatctccgctggacaagtcaactgtgtccactggactaggagcgatctcagaagtacagtcctgagtctgatgactgttctccaaagaagcgtgaggttcgagatattcaatgccgccatgttcccggctggagaatattgaaaacggccctatactgactgtgcgcgatggtgttgagattgtgtcaagagaggatatcattcggttgatctcggcatccgaaatgctaggggaagtggattgttcttaattatgatatctatcagtgaatgtgcctttgaaacaaggccaagaagagggtcggaactcacctagtctgacctgcctgcgtcgtaggccttgaatatctcgcttcttatctgtaatccagcacagattcacaccgtagccggcgcattccaggcgggatttctggcaaactcgacacccattttcttgacgctcatcacatttgaccttccgagacctgcaggtccagcatctgttcatgtcagcttgaaaggtacgtggaagttcgaatatagttgaaacttgatgtattaccctgtgaatgtcaccgatttctgctttgcttggcgaatacgtttggtttgttttctagaagctgtcacggggccacccattgtatcggtctgactgtcaatatgagcaatgggagtcacctttcgatggtcgtaagggtatcagagagacccgcgttatggcacaacgtgcagttggatggtcaagaccacgcagttctcgatagtggagctagcttgagatacggggtcagtgaggaccaataattgcaggtaatagccgatgatgtgccccttgtgcaaagatatctgctctggaccccaagactgtggggttcaaatatcttgattccatgacataacatattttggggatgaactccgccttatcaggttggcaagccgaggtcttatcaattctttatcagtgtcttatcttatcaccctatcttggataggccttttgaaaagggaaggagccagcgagagcaagtaatcttagaccagttggacatgtagaatggacgtatttttagccacaccaggataatggcttttgcggcctctgccattagttgggttgatagtagttctttagatgtttctttttatagatatcttctcccttcttacggtggaagaaggcaagaaaaggcttaatttggtagacaacatttctatgtataatcttcgattgatatcattggctcaacccattgacagactggcacggaatgcttcagcctatctcagtgcaactccacctgcggtcctgtatagttcccttttccgtgcaatatccaccacagcgccactaacaacgtcaatccacatgtgatcacactggtatagttcatatcttccggggatgttggcagggtataagggaagcagtaaatcacaaaagagacagcaatgtacatgcatgcgacagaattgacaacagggccaattttccccatccaaaatggaccagggcggatgttcttgcgtccagttatcaaatgtggaaatatcgcgaggaagtatgagactgtcgtcagcagcacaaacgaaccgataaaggccgagaaggcagtataggatcccacataaattgctccgatacatgtcagaaacactccgcatgccaaagttgcatacagtgggctatgccatttcgggcttatagccccgatatgtttggaaaatggcgtcgcgttatcgcgacccaggacatagaatgtccttcctgcggtaatatagcatccaatcgttgcaatgaagatgggtacgatcgtgagtgtaagaagccccactgcacctgctcgggaaccggttgcttgcaaatagatatcaccgagaggagagatagaatcggcgttcacaatgagggataggtcggtgacagcatagaatatggaaatcagatagcaaagaccagttgcgaagccgatggtcacttggcaagcaagtgctttggggatattccgtctcgcactagtcgaagtgtcagcgaaagaagcattaccatagaccgatattgcctactcaggaatctcttctgcaatgtgagtgacgcagtcaatggcgccgattgcaaatgccccgttcaacatgcctgcaaggaatgtgaatccgtcagagtaaccagtaatgttgttccagtctgtccagacgaattcattcgatgcatatcctgctccatccctgcttggcataatagcacaaactaagactgagatgacaaaaccgacaataatgaagaacgatccgatcctgctgatgaccgcgagagcccgttggcagaacatcacagtaagacaacatagccaggtgatgatcaaatagcaaacaaaaacatgccagcgctgcggttttacctctggatggtagagcgtatatgaatagacaatcatgcttcctgtcatggaacagttccctgctacggcgaatgtccatgcgaggccattcaaccaccctgcaaaccagccgcacaacctgccataacgaggaccagcggttattgtagcccagtgataaacgcccccagatgccggaatagcagaagcgagctcggcaattgatgcggcaatgaagcaatagaaaaaggaggcagtggcgctatccttcgtgtaagcatcctaggaaaaacttccgtaaacgtgtggggacctacaactcgtatattactccaggtggtccaccattgtagagtgatgcaatctaagatgttttagtagtgcacaatttggagagagtatctggtgcttacaattccgcctcccaggaccgcccaagcattcccggtagtgattccagttgcacaagcactcaggagattaaagctcttcgcaagtacaggcgtgacctgagtctcagtaacctcttttgtcgatccttggagggaagactcgagatcgccagggttttctttggtttcaaactgtgccatggcagtagacatgaattgcaacgcagtatgtaagattgtatatcactcacatctttcgatggaaattgctttggatatttatggcttttctttatctttacagttcccttagtccattacaagaaaggcttcgtcccttcaagatatgtgagaacaggtcgctggctcttacttgaaaaccaagatgcgattgaacccgacgatagtattggctaagagatacttttatcttttgtctcttttagatatattatatcgtatgtcgaatcaacctacggagtacaagctaatttctcttcgctagctcttgccatacgaattcatttctgataagacctatgatttcacagtactgcgtagtggcaacaagctgttatcgagaaaaatttcctatcactatcgcgacccccgtgttgagtggtaacgcatacccattctactcgctggctgttgccggatctggatatgctcgcgggcctgatatttccccaccggaccgacctattatacattatgactgcccggtgaagttcatatattccgacttcacaaatataaagcacgatccatccctcttacccttgggctcctatctaaaaaatctcagacttgcaatattccacaaacatggctcactccctgagtaaccaatctatcatcataacaggggcctctgcaccatttgcagaggcttttcgtgcctgctatggcggtaagtttaattagaaatagagaattatatatcagctaacatctatcaaggtaccaagaacaagactatcgcggtcaacctagatcatctaatatctagcaatttgaccgaagctcaggctcaggtaaacaccgctttcagcgctcttggggaccgaatggaggttcttatcatcgatgccagaacgcagcagccatatgggctagactcgatttgggagattccgttgagtgaatgggatcagggacacacatccatgaactgtcggaggaaaatgctggtgcaggcaaagttgttccttcagcaccaattccaggtcagcaagttgaaggcccatgagaatgaaccagggagcggtttttctgttgtggtcctcggttatcaagatctcttcggtgtttcactcgatcaagttatttctaaactccagagagacgtctcacgacttcacccgggtgcttctttcaacttccttgatcttagcacctcaagagaggcctctgtcgcgtccatcgtcgcggcaacagcgacactggtctcagcgaaacccacctgtggaataatctctctcagcgacattgcgagtgtaaaccccactgaaaagagcaaaagcgacaatttcgttgctgagaatacccagctttgccaaagtctccccttccatcataagcacccaaaggtcaaagttgctttgtcgtttgactttgacgcagtctctgccttcctggggacaggacaccatccagacaacaacttggcagactacagcacaggcatattcgccggtcgagtgggtgccaatcggctactgcgcatgttacaaaaacaccaagtagccgacaaagtcacttggttcatccccgggcacacgatggaaacctttgaagcgactgtcaaggagattgttaagtccggtgccgagataggacttcatggttattcccacgaaggtgcctaccaaatgacaccaagtcaagagcgagatgtgctagtgaagtgcatggaactggcccagcggctaaccggcaaaagagtgcaaggctatcgcgcgcccatgtaccagctgcgcgaaacaacaatcgagcttctgagggagtttgaatttctatatgactcctccctgagtcaccatgactcacagccatattttacacctagcgatccgccaattaaaccagtggatttctcccagccggccagtacgtggttgcgccccacgccactttctgagacgaatgcccgccccgtcggccacccacttgtggaaattccgaccggctggaataatgaagatatgatggcgttacagtacttcccgcatctcgacaataccaatgggcaggttgatgcacgggtggttgagcagagatggaaggacatgtttctgtggctgtgggagaatgcagacgttgatgggggcgatggaagctttgtcttccctatcttgatgcatcccgataccagtggcatgtcccatgtgatagggatggttgatcgttttgtagggtggctccggggatggggggacgcagttcagttttgcacttttgagagtatcacacggcagtggttggaagagcagcaaaaggccaaatgaaaccgtaggatattgatttatagaaaatgaatatgtttgtttgtctaggtgattagaggaggaatcagattactccgtatatctgtctttgatcgaggtatattggattcagttactgggtagatcattatatatctatagctgctttcacaccctagagactcctgggataagcaattataatctaagttcccaatatgtaagattgctctaactatatcgaacgaaggctagctctacgtctgttttaaaagagcttctacccttgagaatgtttattaggtataggttctcgcagaaaactctacattggcggaatctcatggcgaatctttaaatcacatcctttttgatacccagttagctcgtttggttcttcaagaaaacatcccttgtgtgctagcatatagcctccccaatttataagatctttcccgagcctatagtctgtcggtcttaatcttgactggacaaccgacgagggactggtaaatctttggactattacttcatagttgacaaaagacttatcagtcactactatggccttatgatcttcttgccaacattattcgagaaactcatggttctcaatcctcgacgtagatacttgccaggcccctatttagtcctttgacacgccattattcattgtcactggcaacttgtttccttccagactcgacccattcttgccaatggtctctaaaacctttcctgatcggtgaacgaggggtgcgcttcagcaaaacccacgggaaagagcctccgtgtgttgtcttgaagaaggagcccttgggataaaagcagtagcttccacctaagaatttcctcttgtcaacaatacacctctactgctcgcatcatttgtgctgccgctttcttctgcttcttctttttttttgataaagaaaacaagatctccccaatggcagatgcccagccgccgcggaagccctgtgttagtgttgatcaccactgccatacctttctttcctgcatccctcccaatcctcaatgcaatgatacttctaccatgaccatcatattccatatatagactgtcgggatacgtactaatatatgacagggcttctgccacgtttgcaacttccctgggcacacagaggagaattgcaaccgcctgagggcattggggtcactgaacagaatgtccctcttcccactccccgtaagacctatatacctgcttctggggaagtttatattgattcaagatgtgattgctacagaaaaagcgcaagtcgcaccgcatctttcgaggcgggaaggccaagaagggcatgtcatgttgtttccatgatatcttacccaaaattaactctcacctcactctcacttaatctctcgcttcatctcatctatttctcgctccattcttctttatgttgctgtctttcactgcttcattgctccgttgccctgttgctccgttgttccgtttctccgttgctgttgtgccgcacagaggaatggctaacgtatgaacagccaagactgctgcagagggtacgtgttcccaaacaattctacggaataagccaacaaaatgctgacgtaccttgtgtgtttagcagccacttccaaagcagcgctccttcggcagccaccacaaccatcggtaagccaaatgccgctatactcgtgttttaccgtagaactaagtcctgtcttgatgtattgaagtgtgttgctactcttcgtttgttgctactctgcgtcgtgttgctgttttgattcctatttatttttcttgctacgccgaactgtcactgttatcgagtggttgtgctaacagttaattagtggccaccccctccaacaaggaggagaagaaacaggagtgagaagtcttgccggtcctttttggtttttagtttttcctttttgttacctgtctctgtttcttatgagtccgggctgtggcttaaatgcaatcaagaccggcgtgaccacttttaaccactcatctgccgtagagagtaaaaacacgtctcaaattcatgctcccatatcattggctttgatctgagctatcataaatttccatatgcctgcttaaaagcacgttatgcccaatttcgaactttctgaacaactttctttctgctaagccaggtatttcactctcttattctggattctgaccctatacactctacctatgtggctcagcctagttgagttgccgatatagtccgtgaactctaaatatacatagctagcaaccttaaaaatcccgtgggcttcgtctggatgttagctaatcagccaacttcacctgggcacctccaggctaggtaatcttagaagctctagagagggactaaggacctcaattttgaagcgtaactaggagaattcatcaactgtagggtagtggttcggatccatgattacacatgtacacgtatgcatacataggtaaaccttgggagaacgttcgcatgacacctacaccgtccaccattttctctttccacattttcctcatttttactccttcaaaacacctcaatatggccgagacacaagatcggcctcgtgcgttttcttgttcaacaagccagagatcttgagcctgacttgctttctcttgaagacttccagaggcttggagttcaagcattccaagtatccctggccccggaatatggcgaaggtcttcaatttgacccgtgcttctttcgaccagaccccgataaactgtgtgagaaatatccaatctacatttaccacttggaaggtgatccacgggatatacaattcaccaccttaaatgattacatacaggatgccctaactgagcattcccctgaatatgctcctataattgcgagaatggaatacgaggaggattttgatgttccaccagagcgtgatccatacatgcatgcccaggatgtagaggaggccattgagtctcacatcaaggctggaagatccggaccgcatgaatggttctcacttgtaaacttcagaaagaaagatcaagaacgttggaagtaagtagacagtcaaatattggattatagcatgggactaacaattcctagcccaaaccaaagagaagaccaccctcgtgtctacgagggatttgaagatccaaaaccgtggcgtgtggtcaatcattaccgatacatcagtcgtcctcttaagccgcattcaattatgtcgtgtctcgctcaaatttggcctgatggaaatcagagcctcactacccacgagttgagagccatcgttaacatgatgcttcttcgagtgaatcataaaccgtttcgcagatgccatatccatccagtaggtgatttcccatgttttacatgataatgtctaagaccaatatagattttggttctctcttatatgggtggtcatcacggcagaatcattcaggcttcgtatgatggaaagggactgattctacaatattcgcatctatggagctttgcggatatcaaaacggcaccggtggaattgttcgttcgataccgtttaagcaagccagttggtgctattcgcacgttgtcccttgaatagctacatgtttaaatccctttattatgatagagcagttcatgaagcagttgctgaagtagtgtttggagcagttcttggagcagttgttgacgtgataaaagtgacttaattttgttagtggtttatatacaaattgtaggtatctaccgtcttgctagagagtaagctgaatcccggtgtgacagagtctagcgacgtaatctttgacacccgaataatataagtgttcgatatcttcaaaataatagatgctactacaaatacttatcgatatctatcaatcaatagtggaaattagattaagttgttgtggttgaaatataaaattgtactctatcgcataggtagctccctcggttgtggtggtggttccggggaatgtatcaggtgactaatcaatgtcacctgatccgttatcggccatgtgggcttcctatctccaggccaatatccctctctcctccaatgaccaagtcgtctgatgtcaaaacattgagagccgcattgaagacatattaattccaaactctacattcccctgactggctggattaaaagatcttctcaagttacttcattgctcttctcttctatgcagccccattgagatagacattggacttgtctagacccatcatggtggaaggagatccgtcatacatagactatgaggccttcttagacccagacttctccccatcttcattcgccaatacattggtgacaagcacaaacaatgcaacatataccccgttggatttatcaacaccattgtcacgggtgctcttcgatcttcaggagatcgacacacacatccatgcattgacaaccagatcagcactaccattgctttcacacacccaaagccaaacggctgccgctgataatatcttgaaagaatctgggacgcagattgcttctgtgactcaagggtacgagcgcctccaaaaggaggttgtacaaaaatgggaagcagctgacaaagctcgtgttgctgctgaaaactcgcatgaaactgttcgcctagcaagggcagtagcgcgctgcttaactctgggtagacagctggagagccaggtttctgaaattacaggccgagggccgaccccatcatcaggaccggatggagcaacatcacctggaaaagatggcttccgcgcactggagcgagcagcgtacacaattctgaatctgcgcgaaatgttctcagccacgacacagggcgatgaaggctatggtttagatcgggtgaaagccattcgcactctacgtggagaatttgtaattcccgcggagaacatggtcaagtcaagagcacaacagaccatcagtcgattttctttgtcttccaaatcggcaagcgccaatagccagtcatcaatgccatctggctataagcaagctcgtgatgcccgagcacgactggccaccgctgccataactctatatcttctttcgcctctaccaaaaggcgcaagcactgcagccgactacaagccagaactcttattgtcaacattacaagggttcatgcacacagcgatcatgacatccgtgaatgccctcgcccgggctctcacccagctcccaatcatgaaccaaacacttgccgacacctctgcacgatgccaagatatagttgccttggagagcattctcaaaaacatccgcccaccaccacaccctctcttggcctccactgccacatccgacgaaccagctcccgagtcccaaacagcggcctcgaacaaatataatctcctgcagcctcttctccaggctctggacaccacatcacttccttcctactactggcgctccctcgcctcttctctcgcgccacgtgtccaggacatcgtcaaccgaggcggtgtttcttcccgtacattacgatccaaccgtgaccgactaagagtcgagatcaaagagtgtgtgctccgtgcgtcgcaggtgtctgctaccagcctgctggccgagaagggtcgaccaggaaccgacacggtagtggttggaaattgggagcgagaagctgccgtgatggtgagctccattgttggttctctgggacggtaatatgtggctactgcaagcatggtgtacatgttaccgactcaagattcggtaccagatagatgatgtcaatcgcatggattgactacagctttaatgagaaatatagttgtatggcattatctatctaaagtgggatattacacccgaatctgttgtgctctgatatttagatgtgaactagagatccggggttgattcttccgtctcatagaatgagaacagtcggcgaggatttggaataccacataaagcacttagtcactcgacaagagaaactagaggtcttgaacatgataggtatcagggccagcgatggtttctgaatatggaacacgttctgcagccattcttctgggaggacattgagactagcacaagtgctaatggctcttggtatatcgatgagtcgtctctgtgctttctaacatgaaggagagtcatcagtaggctcttcatgttcgtcgacgacgatgtacatgatatcagtgtggatttgaagaattgtcttgctactgttggtcattataggaaggtcggcgatgaatgacgtaacgataataagaaaatacaaactaatagccaagctaagggaggcgttcgtaccttcccagagggacaggacgttccacggaaccgatcgcgtggcgacggataacaattgcatggtatgttttcggtgtttcggcgtatcctcggcatccatgtcgccgtgctcttgccagacaacaattgtcgttgtgtgggtcaatgttgccacgggtgcggattgtctttttgaagatcttccgggtcctctacagtacgtcccgaaactggtgcaaccactatactcttcgattgacttccctgccccttatgccaagatgcactagtctacatttggagttcttctggtagttgcgtgtgtatttcaccgtacgtatgttacatagtaatttcgggcatgtatttgattgaaatttcaatatatccgatacctctatgcccctcctccgaggcagctttccttgggaggcgcacttaacaatctatcacaagtggtctaaccaaatatagctcaaaccctagccccttccgagcatgagcttatctatgatatgattcacagtggcgaactatctataactaagatggcacaggccgctagttataataagagtactatctcgagaatctcttctaatataagaatgtttagtagcgttaaggtacctctaaataaggaccgtgcattgatcttatatggtacgaaaacgaatccaggattccccaaaaggttgttttcaagttcaacgccttaaacaagcctttaagaatgcaaatggcctaggatgaactcaacattctcaagagtctaccgccacatcctaatataataccattcgatcgcgttgttcttaaagaccaggagtcccgggtgattgggttcacaacgaagtacatccctggaggaactctcgccaattcaaagatcccttttcgattcgagtggctacaacagcttactcaagtcgtggattttctcaacctagaactagggatcatgcaccaagatatcgctccccgaaatctgctgatcgatccttgcacacataagatcgtcctcttcgacttcgaccgggctgcatccgggaaaaaacggctatacgaaggtcgagatgatgttactagtgtcgtcttcacactctacgagcttgtcacgaacgatacatccttctcgggtatcatccactcggatcgacatataggcatggtgcaaagtatctcggaatggattgttaatcgcgaacttgactctgacgtatcgaggtttcgtaacttcttgagcgaatgggtagcaacacgaagatttgacggggatatggaaaggtatctcaatgcaccacaccgatttacatggccggacctaccaacagcgcccgactacaatgtaccattcgagatgggcacaacctgggatggaaagccaaactagatgactggccatcggtctagattcaccgcaatgaagatggggcagtactgctttcgctgggagaggccaccacagagccgctcgttgatcgaggctgagaatagtgtatagtggatcagaatactagactgcgaaatgaaggaatccatatttataatactttcaaatgattggtgtactcctgatgcatgttgagtagtccaaataacacaggattacctttattccgaggctagtctatatacaacctaatacgtctggcattaggggtagaaaacgaatataagagtaacaggtgctaaaaataatttccggacgccgctatcagctggtctttccttttgtctattcagcacgcatgagagcattttaacggtagcatcacgggtgaaaataaacagcctgccaggcgggattaagggagatctggattcgccatagaattgtatattctcgcacatgtcagtgaccgatggctcacttggttattttaaccgattgtaagatggtggggctctttcttctgttagacagcatcacgctttctattttcgggaatttgcgccattctgcagcgtctcaggctatggatgctgctacagtggatagcgagaacatcttcctccccaacgactgtctttctgttctcggggcccacccactcccaaggccttagcgtgaatcctctaactagacctcactaagtcgagggccactataaaatactctttacctagtctatggccatcaatttttaccgcccaacattcaaagaacggcatataatataacagggagagatataataccatacacaattcattatacagcggcccctaacttagtatggcctaatgagagatcgacgctaaagccttacccaagaacagaaaggcagttattaggaaggaagcagatttcgctagtaactataggctgttctctaatcaaagcacataatatatctagaccagataaatattttcgttgccagtcacttccttacgtcgatttaccctaaggccgatgtcacgaacgaaccgccgggcggcacctactttcacgccgtgcttaacaaagaaacctgggtcttaatccttataaatctgcataaggtcgagacaattttcgagggtcacatcgtgtgctttgttgatgttctccctgaaagtctcgttgcttacccgcgattgctgccattcagtatattcgtccacagcgacatccagcaggccgtcaaccatgattgattcagtacagccaggcccggtaagtatggcgtcattagtaggagggtgtatcgattgctgagataatcctgctaggaggacagtgatattgattggaggatatatagaacccattgtagagttctccgcagctttctttttcttatccagtcgctggttctcctcagcatagagctgctcgcgaacactgtcagggacaccagcgtaggtctcaagaaccccaccttactccacatatttgacgagggccttcaaatggtatatcttcaatctatagtgcctttttccctctggatcttaccagcagtattatccttcgtggcgacatggcggcccgggacatcgcatgacacgatacacatcgcgccagagcgggagggaagtgacaggtcgccagattgtcgaggcactcctcagctctattgtttgccttttggcatttccatggaaaattctagttcccttggatcgccaatacagttacgagacgaggcaccgtattttaataatagtaaatcacggtatcgagactggtacaggaatattgatattcctgggctattcccattacgttctagtgtctcttggcggtggggctagagaatcacctgaagagtgtaggcggttgcaccagtttcgggacgtactgtacgcaaatgatgattcgactttgactttagcatattggccgatccctgcgttacagttgccacttataaggtgttcaccacagtagttgccccatgcctttgagaggtgttttggtgcctaggggcacatctaggatgtgtcagaagagactgatgtacaggaggtggtaagctttggggaaatggaaaggagtgaagatagtgtgatgaggggaaggataaaaatggggatgtaggagaatatattgtaggaaaagagtgagtctgagccgaagatcagaagagaaagagaaaggaacataattggggaaaaggcggaagaccccattctcctgtcattgcgtagatatggatatgcttatttgagcctcaaacgtttgaatgtgaacggtcttcggaaacaaactaatagaagctctcactatacacttgactccacgtaaacaaagcatcaatgccacattttcagactttacttttccactggcaatagttgctacataacgatcatctccttctatactcaatcctagaatgatgccagctctctcgtgtcttaactattagattctaccataactgtaaatacctgaacgttgacgtcgcaccatgggcgacagacccttggaagtaacaagcacctcggcacataagagcaaccaaccaggcgcgaagccaagacgcgaacaattagcgtacctgactaggagcaaaaaaaccgctaggtacattcggacaaccatcttagtaccaggttattgggaccagatcgtcagatcgtcagatcgtcagctcgtacagaacccaaagcaaaaacctccgagcatcggaaataatccccatacaatgtacatatgtactctgtatatacacattaaatatgatttgccgcagataagcgagtaatatacatctgcaagtgcgttgtacaagtacccgagcgctggatgttctagagtcagatgactcccacgcagtgtaccactaggcagttctgaaatggctgaaagctggtaactatgtgtactgcatgttgactcaatgccctagatgcagaggggacagatgcatgtcagttgctaggaggtgagggtggttggtccaattagcttgtgggaatggcatgggtatggattaaagaggtaagtgcgctttgtccgtcccgtccggtctgaaattcacatgtgagttgaactttcagcctcctgttagtacttattgtatgtactatgtgtgtattgattgatgtctaggggtggtaaggttgattgatgttttagatgatatgttagtatctatcttactactccgcagatgctgctatcatatgagacgagactatattatagtaatatttttttaatccatataaggcggctcctacgtggcccccaggtacgcatcccgataagatcaggtacagtttacatggatggacctggtatgggatgcatggcctgtgattggactgattagtaaatgatcgatgaccagtcagattagacggctggaaaggcaaacggatcaccccaggggcaataaaacaggtggcagcatgcggagtccaaagtactgccacataataaaatcccgatctctggaaggcgtggaagatgtggaagtttcagccgtagccctggagatctcacaagtcaaagacgtcagcatatgtatccactgacccggatgggccccggcactataatcaggtttatcgataagccctgcggcttggtacctggctctacttggccgtgcgcctccctgccaaccctgcagatgtacctacaggtacccgggtctaggatttccccctcttctcgtacatccctaggtaggctatttgtagcgacgatctatccatgcgttctgagaccccggtatatccataggggcagacaccatatgtgcgttgcatgttttatttctccgtacttcacatgggacttttcccgtggctttcccgtgggagataacgtcaactaaactgtcgatcatttagactagcggcaggagccccatcctcacctatttcacttatagcacctgctgacatccccgaatcatattccacaaactataatacgtaatgtaccgtccttgctcaagggaaccatgtctctagggaagaggagtgtatatcgcctcttttccacccgccaatcgtgttcgctggatcataaccgaacttccatggggccgatctggggccaatgcggtaccgtacatgagtcagaacttttagatctacaatacgaagtatacccaagggaataagcacatcatccagatcggccgtggcatcagatctcgatctatttcccaggatatttgatcccaaggctaaataaagccaggcgaatagagtacattaaggtacatgagaaccaaggaatcaaggatctaaggatgttgtacaacattaacttccaagcctgggaattgccgtttgcagactcgagggaagtggggggaaagtttagtagcgacgcaggcacgatgggccaacgggcttagtcccagggggtgaaagtttcagatggggagttgcctgaatgcggtttcaacggagctgccggatcccccaggtgacgagctcttttttattattattttggtcttggttctagggcatttccggagaaataagtacatatcgaaagcgggatgttctagaatgtatagaatgtatagaatgcatattatagaatgtgtacaatatggaaatgagatctatctcttatcaacaccccccgcagtctacatgtataaatctaaaattatcatgggctcggaccaatgtgagatcctccatagaagggctcgagcaaaggatactgtatgaaaacttcgtatcgggaccattcggaactctttcccctaccgcgtaaccatctctctggtaagagtatgacgaggtgcgatacatccacgcgatgtaagggggattggggtggtggatgtggttgagaggaggggaatggggagtatatcgaggttaaccctaaaaactccaccaagagtctcgacctttttttttctccccaagaaccaaacttgtcgatgcttggcagtgtctatttccagggtctggaaaagatggttaacgtcaaggaccagtcctcgagggtttaacgtccctctataatagactcctatatcgaccgggggggggcaggattaggtctagacttggatctccaggtcaatcgagtccacgtagctccaggtagctccagatccaagtagtccaagtccctaatgaatcatggaggtgcctggtgccttttggataaaatggagacacgcggatatctggtgaaacacctaatgattcgcatcggtagccccggaaggtctttgagttcctgttcgagttcctgtctctttgctctctgctcttttctttttttgcccctcgcttcctgataagcctcttcttctctcatcgtcaccattttttgttttcttttctataacctccctcgatagtatatatatcctgcatatatactgcaccttggtctttttctctcttctttttcttttacccggctggtcggttctctttttcgtttttctttttttctctcttggaaatatttcagagatgatcgcgatcagctaataaccttcccttttctcttatttcttacattcttgaccttctccccgcccttgcgtttgggatcctagtacacattctatttccgcccctctttctcttctttctctctcagagtaagcgcactttcaaatcgtacgtgttggaactgatccgagtctcttcgggtctctcgtttttttccctctctttttttgtccactcgagtagtgtccaggttactgagtttgcgcaaatgttcacagtcaatccggccagactccgcgtcttgattcaccccgacttctccgtagcgctgcggtttttccgactcggtatagtgacatatagaacttcaactggttttggggtgattattccgatcggattgtcggctttgcgatcactggtggtcaggaacattcgcagttggctctccgaagacctgacatcactcccgcctcccaccctcttacgtcgctatggcttcctttctccctgtcaacaactcggcccctgaagaccacgcgatggacggagcagctacacctcgtgcgatctcaaatagcgtgccggtcacaccggacgtttcttcgacggagcagttcccggacggagtttcacaccgcagccgcggtagcgacacttcatcccgcacaaccttaacccacgctcgaacaccgtcaacgtctgacgaaccaatgcacgattccgagggagaacaggacgattccgatcatgatcaaaatccggggagtaacggacccccctcgaaaaagaagaaaggccaacggtttttctgcacctctttccctccttgcaatctgagcttcacccggagcgaacatttggcccgccatattcgaaaacacaccggtgaacgtcccttccagtgccactgctctcggcggttttcccgactcgacaacctccgccagcacgctcaaacggtccatgtcaatgaggaaatccccggagattcgctagcggccacgggcacacggttccagcgtcaggtccggacagatcgagtgcggccaccaggccgggcgcgggcaggcacagcgggcagtattggtggtcatacccggggtcatagcaggaacttgtcaagttcgagtattgcatccaccgcttcgacattcagccaacctccggaacttcggcggcgcccccctcctttgatcatggccaacgaccccgcagctcgatcccgactggcgatggattcgatgggagaacctccgagcacacccccaggccaaatccgtggcgttcctggtccctcgacagctggatcaccgtacaccccctccaatatgtttgctgttactgggggaagtccccaatttgcgtcgcccatgtctggcacagcccatgggttctgggaaggcaagacggccgcccgtcgtctttcagtcccaacgagcagcaaccctttccttggacagcatggcaatgcgtatcccccggcataccacacacccgccggcgcaccttatccgaatgccgctggcgtatttgcaagtcctactagcacgcattactctgcatctcgtgatgagggcaccttgagcgcggctgaggcggagatgcggagaagaacgtggcacccttcttcctacacagggtttccacgtcctgcgactagtggcctgaaccaataccatacgcccgacaatgtcccggcctcattcggcgtgaacggttcgagcgagcatccgccccgactccccggaattgaaagtttcgacaaagtagttcaacggccgataacccctcccactcggaaaaccagcccaatgcagctggatggccaccatcgtccacctaatcacggttttggatctggattcaattacacacagccagcccaccgtccaccgccccccatctccggccccggtcaccgacgaggccatgtatcctgggatatgtctttgcatcataacttaaccggactggatatccgagaccgacgtccatccactgcgtccgctactcaatggagtcaacagacgctcgcggaactccaaaatgtctcttcccggccatcgtcatcttaccagcctgcattcggcccaatggctgagagaagccctgaagagtatcggggacatcgcccaagcctttcaactgggagccgcacgcgaacttcccccgaggattccagtagcagtgagggtgtccataccccatccaccgcatcgcttgaatatcatcccgcgattgtgcacagcagcggatatatcgaatctcatgattcctcactgccttccgatcaccctccaccggtaggaactccttttcgagcggacggctatcgccccggttactaacgccgacatagatatgtggccgccagtcctcccacgcggacggctacgaatcccataacgaccgggagcctaggcccgacgtcttctcggactctcctgcccgacactcgggcatgggtcgcctagaggctcttgtggccgttgccacaagtgagaacaaaggagcagccaagctatttctgtaaattgtctggacacagccctcctattctataccatactacaccattctacatatgaaagtcatcgtcgcttcctgcaactagctggagagcgatcatcattatgtatacttggcatttcccttcccgtctatctcgaactcccaaccactctttccgctccctctacttccaacattcagcccaatggcctttctaggctcttccgattctttcttgtttctctatatatttcggggattctcatacatgcttatgagaagcccttgatgaactgacgactttgacgacgactgatacacgaccgggaaacatagcccatctttcttttacttgtgttcgggagtcttatgtttgtgtttatgatctcttttttttcggacggttctggagggcaatctttttttcagaagttcttggtcctgagctgcatgtcctggcgttcgcatgggaagttttgtatggatggagtcgtgtgcatcatttggttaccctttcatttttggtgtctgcgctgtggctgagtgttgttgcatttcactctctttctacgcggactcttcatctctcccatctctcccatctcgagcccctcccattctctatctccttatctcgccttctcgttttcgttttgtgtcttactatattctttttggggcggatcgtgcctgatgctctaacggactacaattatgaaggtttttgacatcggttacgaactaaatatgactgcaatgcatatgcctttctcctgatcacatgtgcaaatatatttttcgacaaatgtaaaatatcatgcaaacatagaccaatgggcttgcgaacggagcattcaggagcccgagtaaggatgtggagtacaagatcgacccgaaccacctattactagtatagcatactatggatcatccgtacataggcccagaagttttgctctgcgacaatagccagccatatgtggatagtaggaagaatcccagaaccggatagcaatgaggcagcgatgacttgcaggtgacgtcgacgggaagtttagctttccggggctgggccttccaaggttgagttcgtccccacttgtaaccctgcgcgcttctatgaacgccgttggaaacgttattgtagacattcaagagggattggggattggaattattactgaaacaagatccaattgccaatggatatatcaattgcaaaacagcatctgggaaggagaaaaaggaaggagagaagaggagaataagagaaaatacaaggcagaggcaagggtctagcacgaggactgggaacaagacgtcatagtcgattctgtgttaagaactacctataaaaccagggatactccgatccgttagccacagtatctacttcaattacacgctttactccgtacatcttctactcccaacactacactacagcatcatgtcgaagaaccgggttcccatgtatctgggcctcgctgcggcgggtgcaggcggatactacttgtactctgccggcggcgatccttcagcagcaaagcaccaaatgaagagtaagtgttctgtctgataaattcctcggttaatattgaactgcctcggaacattaagctgactctctctctcgctatagttgacgctgagaaggcacgcgagaagctcccaagtacaaataacgccgagaagactggcaaggatttcggcaaggaagccggtgccaatatcgacgatgctgtaagccatgtcctgtccttggtgctatacctgcactgcagataatgtgtcatataatactaaccatccaaatttagatcgccaaagcccgcgctgagggcaaacgtatcccagagttcgcccaggagagcaaagataagcttgatgagctccgcgacgaagcaaagaacaagttcaatgccaatcgggagaagctcaacagcggtgttgatcagattgatcgtgaggtcgagcaaaaagccgctgaagccaaggggaccgtctctggctggctaggtggaaagaaataagctcctttcgcccttgagcgacaattttatgtcattattttatcacgacgctggtcgtttcgccaatatcacgaagaattccatgtctatgcaacatatgcttgtttgatgtcgatgtagtttggagatcgtgtatgccatgttttcaacgcacctggtctgcccagggcgcaacatgaaattgaatgtagctgttcaattatttcccgatagtaaagactgatttggaatttattctctgccatacattagcatcagatatcccacgcgttcggagaaatgtagaggcgctgagcttggacacagtgacattccaatgccggagtactattaccgtagtgacgagaatgccttggccatggagctgatatctttcatacacaatattttcaggaattcattatattaagactttctctcttccttttgaaacgagtcttatattccatgcttgaattgaagattttatagttcgcgctcacgcgtttctatttagcctaaaccggctagcgtgtattttcaacgcgccctcgaacgcgtctcccctttgtaccttctcggacatctcctcccacttcccactttccacttgtacactttccaacttcttgctcgctctaatatctcggtatctcttaccttgtctattataatacacttgtatccatcgcccttgcttcatttattcttcctcgacaggcaaaaatttttcaaagcagtcgcgatgccgcgcacttcccggtcaagctgcgttgcccagccagccattcaagccttcgctcggacaaccaaagccggcatcactccgcaactgcctgcaaagaagatagcatcccttccggtctcgccttccaaaaaacgcaaactgcaggaactcgaaaacttcgacaatggaagcagacaggcaccaattgaggaggaaggcacgccctcgaaaactttgcgactcaatgaattatccgtttcctcaccacgcagcggacattatgtctcgcccaagaaggcctcgcctgcgaagaccccaagtcggaccccgagtcgacgggctgcccctgtcaagaacgtgtcctcgacacccgcgaccccttcaaagcaacgaaccctgaactttgagaaggttattcctgtgaaggcggaacccctagcgattgagcggcccgcatttttcaacgacattctcaaccttcactcctcatttgtgcaagctttctccattcacatggcacacaatggcgcaaatacccctgcggacctccgagaatttcttcccagcgtgacccgcctgtggaataagcgcaaggtacagatcaaagacttgcagcgtcttgtgtgggtctgggagcagagttcgaaagcgaaacacatttcatatcgcctggcaaattatggactcggtaaaatatgcatggagcgtaccgtgcaggccaacgtgcagcccccagctttgcaagactctttcgaagaaaccttggacttgttgtgggaaaaggccccggaggcccttcgggatgccaatgaggaggaccaagctactttgttcatcgagtctctcggtctttctacaatccacgaatccctcaccccttttacggttttccagaaaggccagcaacgactccaggatctaaagggcggtctgctccgtttgaaggccgagagaatgcgctcagagtcagcagagacgactcccctggagcggacggcaacaataagccgccgccagagcctgctagatcgcattaagaacaaggagctacgccagtccaagcttccccctccgcctcccaagaacgagctcctacgacgtgcagccgccgatcgggcggaggagatagctgggattctggccatgttgcgtcccgttgggtatgtgggcaatggtatcaaagccatgcttgcagcccaacgtaaacccttcaaactcgacgtgatggtcgagcatgtccgtgactcagtccgcaacgagattcctcgtgaggaggtagagatgtgtcttgagattctgtcggatgcaaaggtggctggtgactggatcagtgtggttactgttggccagatgaagtcggtcgtgttgaagtcttgcaaggatgtatctgccaaagacattggggcgagagccgcccagctgaaggctgactgggagaagtctgcatcttgtgtgcagactcctttcttgtgatttatgatttttctttttggtgtgttcttttgtctttcattgttggatacctcgcatccgcggagctggtctgctcgcggtcttgcatcagcgctcgataccctgtactttaccatatgtctcttagcatgaaactaccttaggtagtactttagcaactaggtcctcggacgcccaatcataatcccactaccacaagaaaagtcaaccctcgccatgtctaatgtttgttaattttttttccccttgttacttacatgtacaactagctagcaagacgaaaacgatgtaaatagcataaactttctacgtacggattaaccaccaaaattacccacttaacgcgcgacgcgtgcacggaccacacgaattcaagcgcgtcgaattggactcgtccaaactaccctgataccagcatttgcgttgtcctttgctgcatttctttttacatcaaccgacaccatgtcttcccgacctgacttgaaggtatggattgagctatctaatattctccaaacccaccaatacagcattcactaactcaaaccctgaatcgacgcaggtcgacgacgaagttggctttattggcttctaccgtggcctccctgcacccgataataatgaaacaatccgcgtatttgaccgaggcgactggtattctgcacacggcgccgatgccgaattcatcgcacgcaccgtctacaaaacaacctccgtgctgcgcaacctaggccgcagcgaaacaggcggccttccctcggtcacaatgagcgtcacagtcttccgaaacttcctccgcgaagctctcttccgactaaacaagcgcgttgagattttcgcctccgccggctcgggcaagagcaactggaagctggcgaagcaagccagtcctggcaacctgcaagacgtggaagaagagctcggtagcgtgggcgcgctgtcaatggactctgcgcctattattctcgccgtgaagatctccgctcgggcagcggaggcccggaatgtcggcgtgtgctttgctgatgcgagcgtgcgcgagctgggcgtgagtgaattcctcgataacgatatctactccaatttcgagtctttggtcatccagctcggtgtgaaagagtgtcttgtgaccatggatacggctcgcaaggacgtcgagctggcgaagatccgggctatcgcagatagttgtggtattgcgatctccgagaggcctgctgccgatttcggtgttaaggatatcgagcaggatcttacgagattgttgagggatgagcgttctgccagtacactgcctcagacggagctgaaactagctatgggatctgcgtcggcgctgatcaagtaccttaatgtcttgactgatcctacgaacttcggccagtaccaactctaccagcatgatctgtcgcagtatatgaagcttgatgcctcggcgctgcgggcgctgaatcttatgcctggtccgcgggacggggctaagactatgagcttgttcggtttgctgaatcactgcaagacgcccgtggggagtcgcttgttagcccaatggttgaagcagcctctgatggatctgggtgcgattgagcaacggcagcagttggtggaggcatttgttgttaacactgaactgcgtcagactatgcaggaggaacatttgcgttccattccggatctttaccggttggctaaacgcttccagcggaagcaggctaacttggaagatgttgtccgagcataccaggttgccattcgtctgcctggattcgtaagcgcgctgagtgatgtgatagacgagcagtaccagacccctctagagacggaatacacctctaagctccgtggttattccgacagcttggccatgctggaggagatggttgaaacaacagtggatcttgctgctctggaaaatcatgaattcattatcaagcccgagttcgatgacagcttgcgagtcatcaggaagaagctggataagctacgacacgacatgaatatggaacaccaccgagtttccaaggatttgcatcaagacatggagaaaaagctcttcatggaaaatcaccgtgtgcacggttggtgcttccgtctcactcgaaatgaggcgggctgtattcgcaataagaaagagtaccaagagtgttcgacccagaagaacggcgtatactttaccacgtccaacatgcagtcccttcgccgagagcatgatcaactgtcctcgaactacaaccgaactcagactggtctggttaacgaggtcgtcaatgttgccgcttcgtattgcccggtgttggagcaagtcgctggtgtactcgcacacctagatgtcatcgtgagctttgcccatgcttcgatgcatgcaccttcgggatacgttcgcccaaagatgcacccccggggaactggaaacaccgttctgaaggaagctcgtcatccttgtatggagatgcaggacgatatctccttcattacgaatgatgtttccttgattcgtgatgaatcgtctttcctcatcatcaccggtcccaacatgggcggcaaatctacatacatccgacagattggtgtgattgcacttatggcacagatcggctgcttcgtcccttgtacagaggccgagctgaccattttcgactgcattcttgctcgagttggtgcgagcgactcgcagctcaagggtgtatcgacgttcatggcggaaatgcttgaaacgtccaacatcctcaagtctgccacctcggagtccctgattatcatcgacgaacttggccgtggaactagcacatacgacggcttcggcttggcctgggctatttcggaacatattgtcaccgagatccggtgctttggcctgttcgcaactcatttccacgagctcactgccttggcagaccgttatcctaaagccgtcaagaacctgcatgtcgtggcattcattggaaacggcaatgaaggcgagagtgaagctgaaaccgaagagaagaaaaagcgccaagtcactcttctctaccgcgtggagccaggaatctgtgaccagtcctttggtattcatgtggccgagctcgtgcgcttcccggataaggttgtcaacatggctcgtcagaaggctgaggagcttgaagatttcacttctgcgacaactgaaaatgggcaggcacaacttcctgcgccctcgcttgacaaatactcgcaggaagaggtggaggagggcaacacgctcctcaaggaaatgctgctgaaatggaaggcggcaactgagggcaaagagatgacggcggagcagaagcgacaggtcatgcgtgatctggctcaggccgatgaaaaattacaagcaaatcaggtgttccaaagtatcaaggctctatgaggatgtgagctattcatgggatttggcgttgatggaaggaatgggtttgaaaggcattgttgtatactcatcttttacatgttaagataacctagcattctactttatactctaatctcttctagattcttcttatagttctcttataaagtagccaaaaggttgtaacgacggagtacggagtatactccgttaatatagaggccagtcacgtgtaggtcggtctagatgatcaacgcgggattgtgacgaagccactttattacaaaatccaaatgatcgttctttttattgtctccaattcgttcatttgaggtttcaactttcaacaaaccctttaagcctggacttgtgctgtcgctgtgtctctaaaccaccctcgatcgatcgcctcatccagctatgcgcgcaacctcaacgcggacgtcctgaaccatttcgattcatgcaccccttttccgttctcactcttgggatcttcgtcgcgggctatattaccgctaggtgggaccttgttacccgtctatacgaattggccatcttcgcctgggatcacggtgtcgtggtatgtcttccatcggccatcggtcctttgctccgcttgcgactttatcggcttggtgccagcgcacgttatattttcaatgtcgctaatttgctatttagacacgaactgcgaaggggtttttgtttctctccgtcttctttttcctcctcgtcctgccgatcaaccatctcgcgtctaaagagggccaattggtgagccagaactaccacagctgtgggcagcgatcgaaagataaagcgcttgatgctggcttatgaggatttgctaacaggagatatatagcatccgcgccacgtgaatctcggcgtctccgcgcgcgaacaattgcgtcgtcgaggttcattctgagaaaggtggaggatgacaatatgctcatgggtgatggactgttgcgggtattttggccatacgacctcccacgatcctcgtccccgggcgtgattgtcggatggcgaaactcggagcttgatttgtttgtgctcacggtgctggaagatgtcgaggtaggtggttgcaattgccttgtctgctcgttcgatataagctgatcatgctcgggatgaatagtctaaaaatgttgacaatgctctacgggcggggattctctttcgaaacagccctcaccctattgtgcgcatcttcactctatgtggacgctctcaaatgcatgtcctcggctcgaccaactctcgcgagcctccgacttctttcaacccttcccacctggatgtgactacaatattgtccccgaaagctcctcgcatcttctgcccaccagaggcaaacctgtctgtccaggtcatcatgtaccaccgcccgcacccaacacgcatggaatatatgtcgctcgatccgatttcactagccttgggcgataaagcgacgaagacagaaatatgggggccatcgtcagatacgatcgaatcagaggaagagggtgacaaggttgggcccaagttgttggttgagaagctcaagcttcatacggtcgtcaagcacattccatcacagaaggagcaagccctcccgctcattatcaaccaagtcaattgtgcgtatgagatggggcagctcatgcacagaaatagccatttgattggaattcgggcgaagagaagtatgagcgtcggagaacgtgtcgtggaatcggcgacaactttatgggggtttattgtcctttgcattgcacatgttttctggcaatggctttggcccgtcgtcacccgcatcttcgtgatcgggcttgtatgccaccggtctgttgcggaaattgtcttgcgggttcttgagtggcgtgctcggcctgatgccgctgctctcaaggatatctcagcaacagcccagcaggttgatataagattgcagcagttctgctactggccgattcaatatgtcaagcttcggcaaaggaaggataactgggagagtgtcacgaccagtcatccagactatattcggttctataacagtctgtggcttgttgccaatgatgtgatcatcgggattgcgttggggtcctacattattgacaacgcgaactgggttgcttcgcaaatcaacactgttttgaccggctggacggtggaggggttacagcgcactatctcgtggctaatggattggccagccggcttgaaactcaacaacgagctggcggcgttcctcggtgacttgtttctatgggtcattgagaactgggcagcttgcattgccaaccttcagccttacctccctgctgtcatctacattgttggatgttcaagttttgcaggagctagcatgccaatcgctcttttctccgaccttctttcgatcctgacggtccacatttactctttctacattgcctctgcccgtatatttaactggcaactcaccattatcatttcccttttccatcttttccgtggaaagaaacgcaacgtcctccgcaacagaattgactcatgtgactacgacctcgaccaactcctccttggcactatcctcttcaccgtcctgttcttcttactgcctacagttgtggtgttctaccttacctttgcctcggcccgtatgttaattatttcaatgaaggcagcgcttgacacctgcctcgcgttcttgaaccatttcccgctcttcgcgttgatgctccgcgtgaaagactcgcgacggctaccaggaggtatccgatttgagcttcggaatgaaccagacaagaacacagcagacagggacttgtctgcgctggtttcttacatccacctcgaggtatgttacatatccaaccaaaacatcgcctcagaaaagctgacatattttttagtctattcccctccccctacgtgcaatgttcgaccaatacttccagctgggccaccggctccggaaacactacctcgcacctcgcgtcatcttctgccttataaccggccgatttgtgccacctatccatcgccgcaacctctatagcatgcagtacagcatgctacctgcccgtcgtgctggtatggtagaggtgtggacattgctcacacagccgaagaaaggcagtggtggcagcagtggctctggatctatgggtgcaggcattggatccttgagtaacccaatagcgaaagttccagcaaatttcgggcagagtgatcttcggagacggggtcatcgctgatacaaactccctcttgtacataatgccgataatgcttttatactaagataattctctaatattgccttgctagaataacatagaatggataaagacactcctggggcataatagagatatatattagatagaacggtctccaaaagaccacaccgttgaacttttgttcacgaactgtaatggccagtgagttgtatgtctagcaccagcctaaagataactgcgtacataattctagagcaactttaatacgaaatcacatcactgaaaacagaacctccacatcattttactacctttccacacgtttatgtagatgccgcctctgaatcagtatgtctctccgaccaagacaggaacattgtgaccacacgagctctagtttttgacgcgtaacatacctatcttacgggaaacagcttaccgtgggctacggaaggaggtcatctattgggagatccagctcatttcgtccttccgagaatggctttgtaacacaaatgggcagagcagctataacttgactatagacagacgggagctttgccattcatcccaaaccagtaagcattctttcctcaataggtatattgacaacgctaatactttgacgacaaacagcggatacagtcgcaggaggttttgacttccctctgaatgctcaagataccagccctagtaatttcatcgcaaacgccgccacaatagtgggcggagaagatcacccggagtcgatggctttactgtcgtcagcttccaatggcgtcaaggggacatgggtcggtgtggattaccggattgggccagtagtgatagaaacaacaggccatccaaactgtgaggactgcgcacctgggtaattgaatatactagttccatcacaacaaccggcaggtacggcatgtggggaaataacggtctgggggccttgagggtgtgattgaactgaggctctcaagttggtgtaacatgagacgaacataagcggatagaaatatcagagaagtcactgtaattatcagcttattctcggtctggtctgattttctcccccaacccccttcattcgaagctaggtggtctgtacaggtgtggggatcattgctagtctctgtgccacttcggccattccagcgctccgccagacccggtataccgcgtagtcaccacgttcgtctttaggcccacaaagattgaagatgttctgtattgcctcatctgtgatttggtttccatccgttgagaaaaaaagtacaccactctcagtgaggaaatcaggccggtcgagaatgacaaaaaaggtacgagatggtacggcatggctacctcactcccgggatataactttgcattcgatcctgcgggaaagtccggccgtcttggtgaaccgatcctatagctacctccggtcgagatttcatgagatcccggtgcgatgctaggataacacctagggattgagatgctgagaagaactcaaaggtgattgtctttcagcgaggaattttattgatgatcgcagcagtagaggcctgcgcaataggcataagtcctagcccgagttgttgatgaggaaaagcgatatgaataatgtaccgaggggctggttctggtactgttgttgtaggatgcgatgtaatgacgacagacccctcggaaggtgattgtaaattgaaatccccatgacgtagtgaattgacttttctatgtagcaactcgatgacctccggcggtggaggctgatatgctaaggatgggtctccctcatcttcgtccaaaccataatcgaactcataatccccaatattgcagtgactcagcctagctaacgacgatattgtccgcaagttgtgacgcattgttcggcactttcgcaccacgagttcttctctttctgaatagacaacacatccatcggggattgttgaaggatcaaagctaaatggggagaaccactcaatccgggaacggagatcaactttcgctctaagcggaaaacccgattgaaatttacccacggcggacctgattcggcttcataatccggttggccgctagcacggaagctataggatgtaatcactaagagaaacccttgcaaaagtcggtcctcgttgggtgccactttggcaataccagtaaaaaagcccttctcccgggaaattattctttcggtgaagaatctcgcgtctttgatgctccacgcaggtgaatacatcaggctgaggaccgtagatctcaaatgatagttggggatagtcatggatcctcgaagagagatatcgacaaagagcggtatattcatgctcggcgtccaagtctaggtggacagtactgtaaacctggatggcgatttctggaataggatctaccaaggcttcagggttggtcgcccttttcgccatcaaaatcgcaggttggtttgcatggtctcggtaccgttgcgcattccatttcgaaagcggagccctccaccagtctttgatcctagctatcgcgctgtttcttctgtgggatgagaggggacttccaaggttggaaggctaaggcgctgaatagcaacgcacgctcccatcccgatgtcagtcacgtgagccacaagcgagcggtagttaacttgtatgtaataacatttgcaggcatccaagggaggtcgcgtcttttatacaatgtaggttgatggcgtagtgaggcgctaaatccaaaaaggcaaaactaactcgaacaggcaattaacaggtccgccgtttacatggaagatgcatggtatcgctgaaaagaacaaatggcgccagagccaggctgcttttacgatcatccgcgaatcagggcgattcatacagggatttagatgttcctcttcaagatttcttgaggaactctgcatccgtttcactgctgccgctctttcgggcatcatcgaccatggcgtcaatgccccgttccttgagaactttctataagcattacacacctctgtcagacatcttgaatatatagagacacatagaggacatatcacaaggcaggacttacattcaaacaccccttgtagttcttaaataatgcttcgcaatcattggatgaagtgttgccacgcagatattctgttctaggattagctgctgctgtcatcgaggccttttattgaaggaaaatagtagcatactctcactataccacttgaggaagcaagtgtcatatttcctggtatatatattagcttttggttaacactttgaagctaggtatgttcactatagctcactctttgatatcgttacattcgggggcgatagaagccgccatattggacgtaataggagatagtttatcagatgatatccggcagaccttatacttttcttgctatgtcgaactgagtatattgagtattttagaggaatgagaggaaaagaatgcggtgacaactcgaagatcggcggaagtccatacaaatatcgccactctgggaaggcggtcagggcgggcctaccatttctccattgacatttttttcgggaccttgaatcttcatgtcactactgtttcgcgtttcttttcctcattcttcctttcgctagatttagtgaactggagctctgcaagtcatcatggactctgcagaatttgcaccgttccgggagaagttaacctccgctctggtgcaggtgacgcgaactgtcggacagctctcatcggaagacctgaacttccatcgcacctccagcgcagaattttctgagtcgctagatgaacagagcgcgcgcatcattgcgctaacctccgccgttatcaaagctgccaccgcgggaaccgatgtgactggaccaacccttcacgatgaagattccgtcgaggacaattggcgtggcgtggtggatgtgattgactcgcttttggaaaaggccgatgcctgcttggatgaattcactggtgtgattaagaagctcagcccttcccaggaagaacgtgcaccgatcaagaaagcgcccaacttcccgactatttacgattatggcccctctaagatccccaagccgcaattgctcttcgatcgcaaaccggataactctgatatgaacccctttaagcctcttctcaagtctaagcctcatgcgattgtaccgttggagaaatgcttgaagacgaagaagatagaaggtgtaattggttatcctcacccttatgaggcggagattcttgcttcagagtacccgaagccggtctatcaggtctcccctccggttgagtatctgccttttgagagtaccacggctactttcgtcgatactttggatggagtgaaggaaatgctgaaggagctcaagaaagcgaaggagatcgctattgatttggagcatcacgatgtacactcttaccacggtcttgtctctttgatgcaaatcagcactcgggacaaggattgggttgtggataccttgcgaccttggagagaagagctgcagatgctgaacgaggtttttgcggacccaaagatcttgaaggtcctccacggttccaccatggatatcatctggctgcaacgtgacttaggcctatatgtggttgggatgttcgatactttccacgctgcatctgcattgggcttcccaaaacgaagcttgaagttcctgctgagcaagttcgtcaacttcgaagctgataagcggtatcagacggctgattggcgggctcgtccacttccaccggccatgttcgactatgcacgatcagacacgcattatcttctttacgtctacgaccgcctacgaaatgacctgatcgacaactccacggaagaggcgagccacattgattacgttaacgagcggtctaaacatgaagccttgcaacgctatgaacgtcctatttacgatgccgtcaatggatatggccccggaggctggttcgatatgttgtggcgcaactggagccacctttccaaggagcaattcgccgtcttcaaggctgtccaccaatggcgcgatgaagtagcgcgcacggaggacgagggttggcagtgtgttttccccaagcacatgctcttcaagcttgccataactatgccggttgatttggggactctattccgaaccctgtcacctatgactccgattacgaaggaacggtcacacgatcttttggatgttatcaagcaagccaaggttgccggtattgatggtccagaatggcgcgacgtggcaccccctaaacacctcgcaagggtcctagaggctgccatcccggaagctgtcgatttccccattgctgaacgctatgaaacgtctcaattttggggcaacgtcttggaagccagggaatcacccactcccccagaatatgcgcttgccgccggtgctgaggctatgcgcctttctctccccctgccacccatgccgacgaccgtctccgaaacccgtgaccacctcggcaccgcaaaacccgctccccttaagcccacacccgctccccaggagccagaggagaagaagtacttcactgtcaaagacctcggcggtccccgcaaacgaaaggtcactccaatcaacaacccagagcaagccctctccatcgcagccgacctcgacgacacaagcaacgaccccgactccacgcaaaagaaaagcaaaaagtcgcgcagggagaagaaggccaagaaatcgagatccgaccccaagcccgagggcgaggctcccttcgactatggcaacgccgacgccgtcctcaacgcgccgtcttctgccacagtcgcgcaccctcgcaaaaaggcttacaacccgtacatcaaagcgttggaagccccctcaggcgcgcggaagatcaagcgggaaacccccggtaagtctcttacgttccgcgaatagacggttagtccgtcaaaaaaaaaagcatttacgaatggggttctggttgggttttctttcctgttgtttattgtttagattattgttagttagcatagcgatacccgtcagttggagactctgggattactgtatgtacatgtatagaatatcaggttcttctcggcaaagagatagtgtgctattcttgtaaaattaatgtttattctatttttgctttttcaaatatttctcgatcaacagtaattccgcttgaaacaccatctgtctttgatctagatccacgcgatagttagtaaaaggagactatgtttcactaagcccaagcccacaagttttctgggtctaagtctaggttggactccgtatggggtagaagtcaaagactccgcattgaccattccccgctataaaaagcaaatatgaaaagaaacatcaataaatgcaaagttaaatgaatcgcaaacgccaacccgggagcataagtacataggtgcgtactttgtctggtttcccgggactttttttcaacgggcctaaagaggcataatgggtgcgacgatcgtatccggtttgatgggttcggagagtaagataggtgaactcgacataattatatgcgcagtaatccaatccgtactccgaacagcatagcagaggatgacatgcacacacccactgccgatccctactatatcgccgatgataacagctgatggtcatggattccggcataagcggaaggattcctatccgagcgcgaattagcggaagcccggatcgctcaagcgggccatggatgtctaccctgtttttttgtagtacttatacacagatggattttatatgcaaacactagccatggatggaagtatgtggtgatacatatcaggggttggcaagtgatctacagagacttggcgcgtttcataacaggatgggatgcatattggcccgtgtgaatgatcggccggatgaggatgatattctcgagggagccaaaagccatgaagtcatgtagagccatgttcggtaatcttaaaatgcatgtctactttgtacatctgcatgtgtattatgtgtagtatgcatactacatcccacatgcatgtattgataaggggaagttcgcggagagaatcaaactctctctctgtctccccccactcactccactttttccgttcaattacccctgagaaagaagcatagaccaggaatgcactgtcgaccttgaatttataacgtccgtgtcgagggattttgggggaaaaaaacctcaaggtggattcagtgcacccccgcatagtttgctttctaatgctgatatcaatttaaatcaatcagcccagttccgcatatcattcgatattcattggataacaagaaaaaggcaacttggaaccttgaagactcaaagtttggtttcttcccaggggttgtcccagtccactggtactgcaaccccaacccactggttcaatccgggactacatctatgataggagaatatcgcagagaatatcaagaatcaaataaaaagtaaaacatctacaagcatgtcggatgtagccgagactccgctatggtctgagacaacccgtaggcataccacggatgtatattgtacatcgtatgtacctaagtggtatgactcttggaagaatgaggccatagtcaactaagtactgaatgtgtacagaagtaccgaatacgtgagaagattgattacgcgtaattaattgataaggccatactccgtacttggtatgggctcaacctgaaaccaggttgctgtgtcgagtagtttgcgagtattgtatccatattcatatattaggattcaattctaatctacggacaatatatatagacatcagcattcaaggaccaagtaacattcccgagacatccacatggaggtctcgtgggcttagcctgaacggttcaagtcttttacaatatagacgcaggtaccggttagcgcaacccccctgcagacatgaaaccgtgtcaccttcctgtaatacatttttattgggttgtgttatgtatgtccttgatgttattccttttctcgacccgttaagaaatataaacagagagatctgacgtcaggatgttctatgattgacaagtaaaacaagtcaaagtacggcttgaagttagcgcgcatgggccaaatcctgaagacaaggatgttgatcgagatcttcctaacagtccagggccataatctccagaaaggagggtgttcctaatagtggcgaagtgcattgggccaggggtaaaaaaaaaggctgtcccccttgcataacaagatacgtctcattcccaaatttgtttttttttatagaagagagagaatatggcagtaaaatgaaatagaaattaatacgaaataataacacaaaagataaagcagaaaaatacaaaaaaaccagttccccagaaccgccctaacagcagactaacgaaataaataatctcccctctttactttacttgaccctcaaccctcccccccctccttcttcttcaccttgatgattcttttctttcttcattgattcaccacagtaccgtggtaaatcggtctcgaaaaccccatatcctcggtacgggtgtctcctcttttacggccccattctctatcctcaagtccctacgccagggtcatcgcagtacatagtcaactctgacgatcgtcacccccccctaataccacaatgtccgttgcgacgatgctacaacccgcatccagacagtcacgggcatcctcgtcctcgtcctcctcgtttcaacccgtggcacggcataacacaatgtcgtcgcacgatactcggtcgctccgccaatccaagcggatgtcggtcacggctctgtacctttccatgtccgccaaagatcgagacttggagatttccgatgacttggcacgaggtacgaattctggcttatccctaatggtcgcgctaatcctccgacagcacagaagcacctgcgcgatttgaagtcgaggatctcctcgcaatcgaagaagaatttcgtgttggaaaaagatgtgcgatatctggactcgcgaatcgcattgctcattcagaatcgaatggccctggaagaggtaaggatcctattttcgtggcaatcgacacacatccgctaacctgtctttcggtccagcaaaatgaagtcgccagccacctcgacgatacggcagacccgcaggaagggttcttcccgaacgatgaacgaacccagaagtacggcaaccttcttttcctccttcaatcagaaccccgtcacatcgcccacctctgtcgactcgtttccatggctgagatcgattctctcctccagaccgtcatgttcaccatctacggaaaccagtacgaaagtcgcgaagagcatcttctgcttactatgttccagtccgtcctcacctaccaattcgataacacaccagagtactcgtctttgttgcgccaaaacaccccggtttcacggatgatgaccacatacacgcgccgtgggcccggccagagttatttgaagcaggtgctagcagaccagatcaactctctgattgaattgcgggacgtggatctggagatcaatcccttgaaggtttacgaaaccatggttaagcagatcgaagaggaaactggctctcttccagattacctggcccggtctgtgactgccgaggatgctgctgaaaatgcgcaggtgcaggccatcatcgccccacgtttgaagatgttgacggatatcgcaaacggattcatcacaaccatcattgactcggtagacgaggctccgtacggtattagatggatctgtaagcagattcgcagtctgtcccgcagaaagtaccccgatgcacaggatcaaaccatctgcactcttatcggtggtttcttcttcctgcgcttcatcaacccggcaatcgttactcctcgctcttacatgctgattgatgctacgcccacggacaggccgcgccgtaccctgacgctaatcgctaagatgattcagaatctggcgaacaaaccttcctacgccaaggaaccttacatggccagcctacagcccttcattcagcaaaataaagaacgtgtcaacaaattcttgcttgatctgtgtgaagtacaggatttctatgagagtcttgaaatggacaactatgtggccttgtcgaaacgggatcttgagctccagatcactctcaatgagatgtacgtcatgcacggtctcctagagaagcacagtacatcgctagcccaagaccaatactcgcacctgtctctgctgctccaagaattgggtggagctccccctcaagttccccgcaaggagaaccgcaccatcaccgtgcctttgtttagtaaatgggagaccgctctcgatgatttgacagccgctctcgatatcacccaagaagaagtgttcttcatggaggccaagtcaacctttgtccaaatcatgcgatccctgccacagaacaccttagttgcacgccgacctctacgcctcgaccgcattgccgaggctgcagcaaccttgaaaaatgatgccgtaatggtgcgcaagggcatccgaaccatggaactcctcagccaactgcaagacatgggcgtgattgaccgctctgacgagtttagtttgcttcgtgacgaagtggagcaggagctggtgcatctaggctcactcaaggaaaaggttctggaagagacgcggaaactcgaggaagttttcgcgactattcgcgaccacaatgcttacttggtgggccagctggtaacatacaagtcttacctccacaacgtgcgtagtcagtccgaaggcaagaaccgtggcggcaagacgccaaagaaccaggaacttggcccgtacaagttcacccatcagcagttggagaaggagggtgtcatccgacgcagcaatgtgccagaaaaccgacgagcgaacatttacttcatgttcaagagtcccttgccagggaccttcgtcattagtctgcactataagggtgagtccttggatttaatcttcgaggaaaacggaacatcattgctaacgcattatttaggacgagcccgtggattactggaacttgatctcaagctggacgatctcctggagatgcagaaggataaccttgaggacctcgatttggagtatgtccaattcaacgtcaccaaggtgcttacactcttaaacaaacgatttgcacgaaagaagggctggtaagggcgctatacaccccaggctccccagagtccccctttgatgaatgatgagctcgagcggaggtcggacagctccccctatttggtcttccatatttacttcgcctgctcagccacctgatgaccgaccgtgccctaggcgcttaatcttgcgatgaagatggacaaatatgtcatgcctctccatcccaaataatagatcggatgactgctctatgcaccgactgaaatctgcccatctatgcagttcgggcgaatgccctttgtgcgtgtcgccgacacgcatatactcttaatggagaatgatcaaggccctctccccgctggtacgggggatgtcgatgatcctgtgatttgtgtcctttcccctatcttttcctattatgcttgccattcctatgtctctcatcctttcaatgtctatacccagcgcatagttgttaccatttgtttttttcccggtttcattgggggcccgagccctataatcccccggcatgtccttctgttttgtgtttcaatcaccgcccaggcctgtccggtctcatgcgctgtgtataataatgcctatttgtgatgctgtttgttgaattgttttcaattgaatacccgtatgttatgttgtgaatggtttatttccccacagaatgcctaggcagattacaattcatttcgggactggctactgtgatatatctgtcttctttcgtaaggtctaatatgtcaaatgctggtgtccactgatagttatagagtggattgattcgtcactcgacacctcgacaccgccacgtctgcccctcgcctgcttgccccctttttctcgagtggaatcttcttttcaagtatgcgagctgtctgaatatcaaatttaataaaagaatagtacaaatttggagtcgggaacagacaggaagtgctatatattctatatatgctaggaagtacatacaatagtcgatcctttatacccaaatgacaacccaataactcaactagtagtcgacttgcaaaatgacgatagtattggcccctgtaaatccctgggaacttctttggcaaggtggttttattgttgttcaataattagaaataacattggtccctagggatcccccaggcttttttttatcataaaagtggccacttacgctaatcccctccctccgcctcccgctctttttccagaacaacaaccctcctcttcccttcgaccatatacctcccatcaatcacaatggcggccacagaatcccagttgcctacggatcctaagtacgaccactacgacttccccaccaccgctccggaaacgcagcctggtcaccccggccacacctcccccgagcaggatgcaaaggtgcaacagctccgcgctgagctcgaaaagctcggctacaccgaacgcttggatacgctgaccctcctgcgattcctgcgtgcccgcaagtttgatgtcgaggccgccaaaaacatgtacgttccttgattctcaaagggcatggatgtttgttttttggagtagttggcagaaagctttctattccggaatttcttagctttcggctttttgtcgaggcctaattgtctaacttgatatctcaggttcactgcaagcgagaagtggcgcaaggagttcggcaccgatgatctggctcgcgacttcaactacaccgagaaggaggaggtcttcaagttctaccctcaatactaccacaagacggacaaggttggttttctgtagcttatacgtattcagatgcaatactgacatagtcccaaacaggatggccgccccgtctacatcgagaagctgggcaagatcgacctgaaccagatgtacaagatcaccaccgccgaccgcatgctgcagaacctggtgtgtgaatacgagaagctggccgacccgcgtctgcccgcttgctcacgcaaggccggcaagctgctcgagacctgctgcaccgtcatggacctgaagggcgtgggcatcaccagtgtgccgtccgtctacgggtacgtcaagcaggcctcagacatctcgcagaaccactaccccgagcgtctgggcaagctttacctgatcaacgcgccgtggggcttcagcagcgttttcagcgccgtcaagggcttccttgaccccgttaccgttagcaagatccacgtcctcggcagcggataccagaaggagcttctgtcccaggtgccccctgagaacttgcccgttgagttcggcggcacttgcaagtgtgagggtggctgtgagctctccgatatgggcccctggaaggagcctgagtgggctcgtacccccaagtgggccctgcctaaggaggagccccctcacgctggtgagcttcttattgaggacgaccctgcacttgcgaagaaggatgtcgagggccaggaggctgctcagactagcgcctaagcttgctgagcacgtttccttgtcttcttcgttggagatccaacaagccgattgacaatctccttttatatggcgactgaaaacagacacccagatggggatgctggaggtttattttcaactccgatcaacctgaaaatctcaaaaaaaaaattatctggcggttcgacaacccccaatacaaccccaattccacaaggcaaaccggaatttctctcttctggtagtttcaacacctctttcccgatccatccacagcatgtggacccttaccctacattcgctttttgcgtgtgctttttttgttccgatctagatatcatggagagcttgcttttgtttttgcttttgcctatcaagataagcagcgtgtggctgccactgctctcagtatagaagggacaggacgcgatgaaatttaaaagcgagttggtgtgaagatggtgtttatcttggttgtttctttgttggtagtgtatacacgaatgagcacatattgaaatggtagctgtcatgtgtaggacactatttggtttttgttatgcttatgcttatgatatacgatgtagtagcagtagcagtagcagtagcagtaggagaagtagaaaaccaacaatatttgcctttggtatagagatcgtagacagagtttagtctgaacatgaaagacgatatgtaggattttgactcaatggagccatcaagaagaaaagacatggtatcatgatccctaggacaagcccaggccccccaaacgcccccaacaaattgcaagcataaaaagaaaaaaacgaagaagagaacgctaatcaaccaaccccaaagtcctcaaggcaatcacttattcatattctccacaacgtcagcagcacggccagctctctcagccttgcccaccgtcgttgccaacgcattaccctccacaccggcctccgtatcagcattgccctcgccctgcaagcggagcaacatccgcagagcatcctcatagacactcgcaatatccccactcttccaccgctcctgctccgcctccgtcccgagcgcagcctgcaacgtccacgccgggtcgtactttgcacgggcctgggcccctgtcctcaccgacccagtgccgttcgggatagaatcaatatccataccatccggctcttggccgggtattgtgttctcgttttcattattcgattggggctgcagattcgtagattcgcccatttccgtatcgttatcggcatctttccccccatttccaatcttgtcttcgttttcatattcctcttcctcctcttcaatcatcttcttcaaatgcgcggcatattgtttcgccgcacgtctcggcgcatcccgcctctgctgcgcgactgtcgtgtttagagattccagctgcgcgtacagcgatgtcacacgcgacgcaagttctgtatcgtatgcttcgtactcgatttgttcagtcggcgcggtgaatgctgccgggaaagggaactgtggtgaggtggagtctatgccgttgatgctgattgaggttgaggctgattcgaaggtttggtttatgtactatttgaagttagagtctagagatacgtggatttacatgttgttctggtctcacttcgtcgattagctcccggacgcgttcgcgcatcggatctggggtgtcattatccgttgcagaaggggggaagtagaggtcgagtttgcggcgcgatagggcgactgtattggcgtagaggtaggtgaagtctgctggagattgaagctcgacttttcgatagtgtggtgctgccatggtgggctcttgtggttgttgatgtttttctctgttccgatttgtaggagaaatggccttggcattccaaggttcatccccgcaaacgatgtcatcgatgttgcaccaacttactctccaaggttgactttttttgctctattgtttcttgttttctgctatttatttctttcgttaagataatttacagataatctacacttcttcctcctcatcttatatccttccttctactctgatacgaccccttgagataatgcaagtgcagcatactcagtgatattctacactacagggctcgaggagccattgggacacatcaccactatcctagacattcctttacataccctcacaccgaatatggagaggtcgacttccatttccctcgtggataacaccgtcccacagcaacccaccggtgaaggacctccaccgggcacatcaactcatcaccacaaaagcctgacgaagcacttgagccgtgcatccgtccacagccagctcgcaaaacggaaatatgcaaaatggcaaccggatagacttggcattaagcccgacacgaacgactcgcttagccgagaatcgtcccaggtgcgcggagactcgatatcagcaagctccaccggagaagccagcgggaccggagatattgagacagctgacattgccccgtcgcgagtctcgactaataatgggagcggcaacggcagtggccaggcgaccggaataggagaccaatccaacggccatgaggacaccaaatcccgctcagagatggacgttctctacgagaaccagcggggctggttcgcttttggtatcccacattactcgcacagctcactgttgaactttgatcccagcccctggatgactcgggaccgcagagtcagtcctgttaatatcacaaatgcccagctgcctgatccgagctgggagtggacgtggaagacatggtatgtcgacatgtctggtgataccgatgagcaagggtggcagtactctttttcgtttgcctcgtcttcgtggcatggcacgcagctgtggttccattcgtttgttcgaaggagacggtgggtgagactacggactaaggcccatccacggcgaaatcgtgatcgctcggacttcgagaaagcccacatgcttaatgaggactattttaccattcattcgtccaaggccagaagtcgggagcaaagcaccgcaggactgtcccgggtggacactggattcttgactcatgctagcgcgacggtcgatgaggagtcagatgtcgatgagattgcggatatacctagtttgatgcatgctttgaaattagcctccattgatcgagagaggattgatgcactgaagaaatttattgaagttggaggcgacgagctctattatctgaacgacaaggtgagctgggtgatttcctctaatctatatgttgagaccgggctaactctattttggcatatcagataccagatataatgtccatgttcttattccagacctcacgctggcaatttgtaacatatctttctgatgtcattcgcgggctctccaaaactcccactgattctgataaagacgccgatgcagtccaacgcaagaaagacaatctcgcccgtgccgcagaatcctgcaagcatcacattaccgggccggatttctttaaagatgatcatggggagtcaggaacggaattgttagacttgactccggtggccaggcatgatacactaatggctaagcgaccggtcttgaaggagcgtgtgaggtcgatgaaacggattttcaagggcattcccaaggccgctgagattggccatgaaggacacatttattaatgtattaaaagctctctgtatagaccaaataaatgttgttattgggagaatcacatagcgaagtatagcagctcacccggcagagccaacctccggccaccgcctacccgttcggcggctagcaattttcggggcaaaaaggtccatcgaaaaacacctcagcaacgcgcccaattctactctcctttccattcatgtctccggtgccattagagcatcgtcccttatgctcttgcgtggccgcccgtgtctaaggaggcgtctttctgccgtcttggacactgtcgcgactggcccgtatgagcctcttctgtttctatatcctcgctgggctgcgcctgctttgcaacgccgacagatatcttccctgaagtcgattgatactccagcgaggataggacatacttccagtggcccaattcgcgcagcagtccgcccttctccttcgctttctcggcactcgcgccaatggatctcctctgtgtcttccgcccggtctcccgacgagtcaaatctgcacccgtcccctgcggtggttggagagaattctaatatacgcaagggcaaagaaactggctccgatgatctgaatgaaagtggtggaggtcggctctccgcaggtcagaaacaatctgtcaattcccttgcagatgccgaacacgccacttctcgagaaccgctacggggcttcgcgttgacaagagcgaagagaatacagcaaggtcgactgcataacaaacccctgaacgccaaaccttcgtctcccacacagagacagctttttttacgaaatacatcaattcgagatcggaagaagttgcggtttcgcgaatatatgaagaaaaaatatcaatctcgttcagcaaaactcttcgacaatgcttggtttgatacaaaggagattctggaccaagtgtaccgcgatatccggaaaaatccccagaagagtttgaacaagaaggagatacttgtaccagaggagacccttgctctgttttctggtgtaacccgttataccctgaaagagaatatttggtacattccgctccacaatggatgtcgtgtgcacatcctacctgcaagtcagagcaagggattactccgtcgagtagttttgagtgccaccgaccatatcatggcgctggtggaagggcattttacccgtgcacagagcttacaagctatgggagatccactggttgatattcacaaaccaccggttccaatgtgcatttctcggggcgcgatgcagcgttcgaagctgcctgtaccgttggttcgtggaaattggcatttcggtcaaacatcggatagcagctcgaatttggacgagatcctgctacctcgtccggttatcgccaccgtgaaggagtttaacgagcacatcgaggatgtcacatctgcgagacaaccaacgctcgatgagaaggccatgtctctatcaaagcttccgcacctggtccgggttaaacgacatcttgaggcgctattcatggaaggaacatactccaattatatctcgactgcggctttaaataatgcactagaattcctttgtcggcatgagttccttcaaactgcccgatccttgttttcatgcacagagcatgtggctaccactgatacatataacatcttgttgcgagctgctgcgcggcgtcaggatgtggctgtctttcgtcacttcctacgaatgatgcctcgattacacatgcgcccaaactcagaaacatggctcgcattgctcagcgccctagttgaccctagcgaaaaagcccaactcattgaacatatggttcagcgtggccacatgtccaacctttccaccatccacagcgcgctccaggagacaatccaagattcgcttctagtgcatttggacagtgggcaagatataggctcattcattggcctcatgaccaatacatggggtgctaattggttcagcccttccattattggccagatgttcagtgtgctcgctcgattgaagaagttcgattccatagaccggctcatggaaatctgcatcgacaacaaactcaccgttgacagttatccactcggccatatcgtgcaagcgctgggcgcgaatatccacgtcgctttgcagtataccctgcggttcttcgagcacccttcgttcgaggtaacctcacaaaattgggaggatttgtttttggctgccttcaggcaccgccagtacaacatctgtctagttctatggcgatattcttgcatgaaaagaaccgtgacctacaagatgaaacaggctgtcttaacttccttatgtcgcaatgcatcctttggtaaacccacgagactcaacaaagatttatggagttccgatgccggcaaggtcattatcggtatcgaccaaaaccatgaaagctacaggctcccagactctattcttgacgatataccttccgagttccgtcacaatcctattctctacctcatcggatggaagcccaggggtgaacagcgtgatctccaaattcgccttgccaatgccctcattaagcgtgacatgattcttggtgcaactcgctatgtcccccagcatccttccccgatcatgctggatgcagcgtccatcttagatcaggaatggcgtggtgtcccgcggcctctgacttggaagatgcaaaacgccattcaagttcccatcgtccgcaaagacaaagaccgagagcaagacaaaaacgaagaccaataatctcccaatcatcctcccctttgcatcctcattcttcgatccttctaccttttttgacgctagcgtgttgcatgaatatcccttctggcgggcttgttttggctggtgtttgttttctgtacgctagtctgcctactttcccgtcaccttgtatcgtatacttgtacattatttggaaatatagaatcatagagcttcaatgtccagaataacgccatctgagtatatattcattcaatcgtgagcgagtacattccctctttcaaatataaaacccctcaaaatctaagcaatgcatcgagatcattcataaaactattataggcagaaatagggtcttcaggaactctctcttcctccggtgaagcaaggcccccattgagaatttcagcttcgcgagccagcgcgttctcccacccaatccttgtctctgcaggcatcggagacagagaccgagactgggaccgagaagcaggtatgctgatccccttcacctccacacaatccgtatataaaagatcagactcaaagctcccgggagaatccagcactgacgaatacacatcccgccttctctcattttgtgcagtttggcagtgtgtaatgcctcctccaattccaggcgaatgtggggaagtggaagtagaagtagaagtagaagtagaagtgagggaaggtagtagccggcgcatctcggagtagaacgaatacatcgagctccaagggggtatatcgtgatcggtttcttctggcagatagctgttgagctggagttgaggttcgtgtttattacaagctttctggctgttgtggttgcggttggacaattgttgccgagtaagtctttccaacagttttgtaagtcttgctagtatctatatttttcttccttttaacatacctgtcaattgaatctcgcgggatgcaggcttgaccttctttgcggcagtgggtgcactgtttatatggtggggagatgtcacatcgctttttccgggtgtggcaggccacgcaggctatcttgccaggtcgacgaccttgcttatttgcttttgtaatccccgatgggccttggagtcgaattgtgcttaaatccattggagcttgaatatgaggattctaaaatatagacgtaggtgggctatatatggagaacgggtgctccacacttttatgatgatccagacttaccccaaaagccggcacaaccgtgttggacgttccaaattggggaaatccagaattggggaatggccaatttggggaaatcgacctcgggagaaattggggaaatctagaattggggaaatttccaattgtggcccatatcgtggcgattgacttcaagagttcaatgttacagcagcattcctaatatacaatttcgtgttatatcattccgtatgtgattctaatttcttctcatgacttattatgtatgagtcgtaaggtcaataactactactccgtactttggactatatcattctacgctaccttgctggatccacatagaataggagtacagacacatgtaaatggccagaaagatcgacacaggtcttagattgtttgcacaatcgcatttgaatcgcagttttcagccacggcgccgggagtgcccgtaaaggatagacaaccctggagatcatgactgatctaaaacggaatgctacacctgggaatgttcctcgtataccatgtatagattgagtcttgttcataacccaagagcatactgttggaacagtatattccgggctcggtgcatactacctactccgtagacacggcatgccgagaagcggtgcggggacattggcttttgcctcctttccgttttatcaacgtcatctatgatcttctaataataaactcatgatgattgcatattctgctacgtagtgcaaattaccctagagccacctctccaatctcaccgcatatgcttctccaagcacttcaagatttgaaacatttttgtacccaaagcgacctcgaaatgatttcagagcactttgaatagctctatcggtgctagctcactttcctctaactccaatatagtggatctgtcaagtgtgatgattcaagctatcaagctaggaagaacctgctcctctatggagtgcctttatttccggtgtatatatgtcagaccatcaacacgtcttttggacaacggaatggatatcaaccagtcggtgggccatggatccccgaattttgggtgagtcgagctgtcattggtccaaagctgcctccttgtgacgtccaatggttcaatactaatcccttgtaccatgtcgagatgataatatgcttcttgatcacggagccgatcctaatcgtcgatgtaatattgaattccacgccactctcctacgctgttgaacacgcttctttgccactcgtgagtctgctactcaatcgtggcggcgacattacagaagggcaggttttgcaccacgcagtttctcgcaactccgatgcagtggagctcccgaagctcctattactcgatcaacggtatcatgtatcaatgccatcggccttcttgggacatgaatttcttagtgggggaaactgttctgcacaaggcagtatttctttgcagattcgatgtcatccattcccttcctagggagggagtgaaccctaacttcaaagatgtcagaaactgaaccgtcatacaatgtgctgatgaaaatatttggaagaggatcccaggatgggcacaatactagttgaggcaaaggtcgacataggggacagcatggaaatacaagtacatatgtaggtattgcatccctcttacatgacatatcttcaatcaaaccatattagctattcggcacactgtttaggcaatttgtctttctatacaatataagttccacaaggacgccagctctcgtgagttatatatattctggtcatttcccattatcatgacatatcatgccagcacagcttgacagagcaacgagttaagttcaaaacgctgcttacaaccaaaaatcaaaccaatgaccccatgtttgcatgagaatgcccttcacacctatcagggagaccgggtactggtggtggaagaccatagggatcaacaagtgccgtccgaatcgcacccacaccttctttaaggtagagcacaagccggtaggccgagttgccgttcaagtaatatcggtggagctgtttgctacgcaggaagcccagccgctcgtacagtttgatcgcaccagtattggtgatttcggtttcgaggacgatctgcccaaacacatacaagtcagccacaataccctcgagaccaccctatttgcggaccaatagccacctccactgtgtagacctacctcatctgcatcccgctcgatcatagcatcgatagccatgcgcactagcttggttgcaattccccggccacggtactcttcgcgcacggccagcatggcgatataacctctcagcgggccgtcgcggtgtggctctagcttcgataccacgaccccgaccatctcgtccttatcgtccatcgcgaggaaacacaggtcaccccattggtataagaagtagcggtagacgtagatgctgtaaggttcagacagatctttggagatcagctggcgcattgcggcgacatactccttttcgcgcgaattttcatatcgcacgtagcgaagatcgggagcattgctcatcacagcgatgtcattgaagtgggctgatggttggagttgacggaggggacgggggtgggatgtgtccgagaggaaagttactcgcagccatgtgatgccgatccgcccgttcgcggacttatgcgcttccgtgtttttgtatccccttccttttcttcctgctttctttttcttcgaatttgtttgtcttgttcttgatattgatttccaaggcaaatcgcacccggtcctctccttctactccctccctcgcggttggttgctatgctccgtcgccgcacgggcaaggacggggtcccgccctctaacaaagatagcggtacagaaaccaaggaagaacagcttcgtgcggagtctgttgatccaaaagccacccagctagttatcaagccccggagtaaacgtcgcaatgggttcatctttatgttgggcgggatcttcggcatcttcatcgccttgtttttcgcaaaccagcatgaggtcataagcctggattcgctcatggacctaaatctcgattcatggattgatgctatcccacagggaattgtgagtgacgtgaaggaattctcggtacgtgcttttttcaagggctcttacctctacatctagttaccagttgactgacttccaaccgggttatagcaacatgaacgcgataccgtcagctatgattcgtttgccgttgggctacaacttcgcgccatgggcgtagaagccaaacaccctatcgtgatgatccctggagttatctcgaccggcttagagagctggggcacgggggaaacttcgcgacaatactttcgccgacgattatggggcagctggagcatgatgagagcgttagttatggataaagctgagtggaagaatcatgtcatgctcgatcgggaaacaggccttgacccgcctggcattaagctccgtgcggcgcaaggattcgatgccacggatttctttatcacagggtattggatatggaataaaatcttggagaacctggctaccattggctatgacccgactaatgcgtttacggctgcatacgactggcgactttcatatcccaaccttgaagttcgtgataaatatttcactcgactcaagtcctacatcgagaccgcagtgcacatacagggcgagaaggttacattggcatcgcacagcatgggatcacaggtggtgctgtatttcttcaagtgggtagagagcgaggaccacggaaagggcggcaaagactgggttaacaaacatattgactcgtgggtcaatatcagtggttgcatgctgggtgccgtcaagggattgactgccgttctgtccggagaaatgcgggatacagcgcagttgaacgcctttgctgtgtatggtttggagaagttcctatcgaaagaggaacgcgcggagatctttcgcgcgatgcccggtatctctagcatgctaccaaaaggcggcgaggctatatggggaaactcaacttgggcaccggatgaccaaccaggccagcccctgagctttggcaacctgatccatttccaggagaccaactcatctgtgacaaaacgtaatctcaccacgccagagagtcttcagtatctcctggaccagagcgaggattggtatcggaaccaggttctgggtagctactcgcacggcgtggcacatacaaaacgcgaggttgaagccaacgagaaggacccgcgcacatggctcaacccgctagagtcgcgcctgcccctcgccccagacatgaagatatactgcttttatggcgtggggaaacccacggagcgcagctacttctaccaggaagagaccgacccactggtcaaactcaaggtcagcatggacaccaccatcaccaacaacgagggcattgaccacggtgttttaatgggcgagggcgatggcactgtgaacctgcttagcacgggctacatgtgcgccaaaggctggcgcatgaagcgttataacccagccggcacagagatcaaggtattcgagatgcctcacgagcctgatcgcttctcgccccgcggtggtcccaacactggtacgtaattctttgcttccttacctacctgacctttccccacgatatgtaacaggcgactaatttcatataggggaccacgtggatatcctaggccgtgcctcactcaacgaccttcttctccgtgtcgctggcggcaaaggcgatttaatcgaagagactttcttctccaaaatccgcgagtatgcggatcgtgtacaaatctttgacgacgaatagatcaaatggggtcccttacgactgttctgaatatttgactcgcgttttgatacacttgatacacccacatatgtacctccttttagacatttgggattttttttttctcttctagacggatggggttttgcttacgatgcagcattcttgtacatttctttatgacaaaccccttatatgaacattttatattcctttccatggcaaaccctatttgttcaattatttaatactagaatacccaaacaaaccatgtcgacaagtccaaacatacgtaaatctaccctctcgtatcacggataagcccggatacggtttctttcctagccctaaaaatagggacttatgcaaggccattagctgctacttgtagcaactgatcccgtgtgatcgacagagttattggcccgcatgagaagcaagggcataacgtcccgttcttatcacactggcggggttgccggttctcctcacctcgaacctgaaagaattcggaagctaagttggaggatgctgtatacacatactacactagttcctacaagatgcgtttacaataatagaacccagaaatgtaaataatgtacaatgattcattcatacgctagtgattaaaaataatgctagcaatagttacccaacaggatctcaccgcgcccagaagtaatgataagaggtatgcacacgacccaatccgggtcgtgtagagggtgtcacggaaagcgtagatgtaataggttgtcggatcaggttcatcctcgatagccaaaggcaaagagaatgggtgaagctcgagagcaggtggcctccgtcaaaagtaccaagccctagctgccatgaaactcgagctctgaaaacaagaccccagctttcagtattccccttctttcctttcctcggatctctccgtgtcgaatccacacgggaagaatccacacaatatcgacgccgatcaatcacctgccaggcggcgtggacacagagggaagatcgagacgatcttttcaaaaacccccatgtgccgatgcaaaatgtcgtaaaacagccaattccagaaccccttctagtgcacatcaagtgtgcagcaaaagtgccgaaacttttcatctctccaaaaaaaaaccagtttcttaagttcccaggcgcctatgatgagcgagcgacacgaagtaaaaatatttgttcatctgaacgagccgaaagcaaaaaaaaaggtggctcgcccatttcataaagtcgtagcgaaagacatgggtcagaaaaatagaggggatcgcccgagggcgtccgagaatgtgtacaagggaaggttgacagcggtggcggtgcgagaaattggcgaatgcgggcaggtgaacatggcccggtcccttccgccaccagtattaatattatagacggagttgccagcccaaaaggtggggtagcgaggcatgtacagccagaaggtgaagagtaccttcagctcggggcggaagtaccgcgcgaaccggaggttttattaaaaccttaaggtgttgaagattgctcgatgcagataatgttcccaaacattgtcgtcaaacataacgccgattcaaaagtagtagatgcaagaatggactgcgccgagtgtcatgtgcaagtggagctcaaggattagcgcccggcctcaatatcgtgatttgaggtgagtgtttcgctttcccagttgtaatgatcgtccacggggctcaaagaacccgatgaaacagacgatgaagagcccacggtccactcgtcgctgtccaagttgaggtcgccatccaggctggcaagatcatacccggactcgcgggaagagtcaccgacctcaacatagtcgtagtcccagcggaacatcttatcggcctgaactcgaggcaggaatcgagtcttggcatagtagaaggcaaccgtggcaagcagaccaccgcagaccagatcaactgcatagtgatgcgaaagatacatggtagcccaccacatccacagggtgtatgtgacccagaggggcttcaaccgcgggaagacgtggctcatgaagagtgctgccagtgtggaatcggcagcatgcagcgaagggaatgcaccaaaaacaacaggggactgcttgaagcccgaagtgtagagatcgatacccagcagcttgtcaatgcgagcaagaccagccggatttccctgcatcgagtaatcggctggggccaaaccgtacagattttcataccagggtggcgaacaggggaaagccagctgaatgaagacagcggtcatgctaatgtatccgagagtccgggcgtacagaggggtagttcccggggggccgaagaagaaaaggatgagtgaaacgacgaatggcgctccgtaatggcagagtccgtaaggaatccatgccaaaatgtcaagcaccacattttggtgggcagatagaatgttactgatgttggcaccgtacaggatgttttccatggctggcaacactcggacccaaattgcgggccgccaatcgcttggaacgaatctagagaaacatgttagcgatgttgaattcccagcacattgctgctcacgccacagggccatggcaagcgcatatgctgcaggaaacacgagagaaagcaaaacttactggcaaccatagaagaagataagccacccagcaacgggaaggaaaggcaagaagaattgccgggtgattggcatcaggagggagcacaagagtccagtggcgatcgcagtctttccaagtggaccaggagattggatgattgtcaaggagaaaatgccgataatgaggagcaacaagtattggaagtcatacaaggtccatcggtgtgcttgtaaggatctgagggtgtcggcgggcgagaaggaggtttgcaacctcgatatggacgaggcgggcgaaaggcggcttcggagtttggaccggagcttgcgacgcatgcgatgtggtaccaggagctggaatgaacgccatggcacttggatttgaagctttccaaagtgatgctgtgtgcgatctttccatgacggataggaggcgctcatgttcgcggcgactctcctccaggagggtccggatcacttttggaaaaggggtggttgagacttcaaggaatgccgcgggacgagacagagggaagtcgcgtaacggaaggaggtttatcgttgggaagagagactccagaaaaggtgagttgggcgcgaataggaaggcgaaggatcgaggggcgtgagtcccagggaaactcaggaggtcacgttgacaagggttgggatgcaaggaggaaacgcaaccgagagaacccaggataaacagcactcgagaagaccaaggagaccactttagaccctgaagcggagatattaaagaattaaagaggaaagatgggagagaaggaagggaaagaaaagaactggatctcacgaagccttgtattggtattaccagcagctaagttttgtgtaattttaaatacatgtgtatagtgctactttccctctttcgtaggtctatggcgtcactatttggtttgggttttatttttttcaggtacgcaacctggaagtcggtctttctagcttgtcctattgcaatgctgaccggagctctcggcagtattcaataatacagtggacatccggtctgagggtttaactcggaagccacggaagccacggagatcacaattctgggcatatctcggactttgtaatgccaatggtccgatgttagtatgttcatgcagagactccgagactcccgagaacgtcatttatggcttccttatgttgtatatttatatcgtatatcgcatagttatatagatatagagaacatctccatatatcaacctcaatgacctaattctacttaattaacttcaatcgtggtatgtggtttgtaaattaccgagacgaaaatttcgcaaattttccatataagatccatcgccgagctctgattggctgttgctcccttgcccccatcgttgaggcccggtattgaaatccatccgacctctttaatttcgcttatgcacaacttgtaacatcttaccagttcaaccgtcgtcctggtgatcgaaccagctcgcctcatacgaaggcaatcggcccaacgcccaacgcctactttgtagatgctactccgtatacattataggcattagcattggcattggcattggcattgaggaaactcagccccggttatgcggttgagccacacacgatcagcactcaacagtcctaatttgactgacactattactctgtgctccgtagtgcggttttacatgggcccagcgtttagatgaggacgtgccttttctcaggggataccaacctcctgatttaaacagcaaccagtgaacttcgtactccgtacaaccacctctgctgtagaaagagattacactataaaagacgggacagctgattgaatatactttccacccctcgactccgcgtttcagtatcgcgcgcccgcagccaattaccccttgacttcataatctagcgtcaaagctccctggggattttacaataggcagtcgctattccggactccgtactccgtacaatgctccgtatcccgaggcttattattacaatatcttacttgactattgtattcatctttccatcgaatatgacagcgcacgttcgtattcgtatctggaggcggctgcctagagtgcccaggtggacggtcaggcttagaagtgatgtaaggctgatgtgtagagctgcgccacagatatgaagtcaacttgcagtatccccaacctaaggttttgttcgccttgctactaggccttatcgggatttggctgcaggtcaagaatgtaagatatgtgatcttacttgtaactcacagcttcgttgtcaaagatatgcaaatgccagagactcgatttgcgtgcaaaagcccttggcattacacaggattacatgtcacatttaatagctctgggattacgcccgtgcttatttgatacgaccgtttctgcgtcgtcgatcctaccaggctatcatactacgtccccgcaaacccgatgcggtcggtgggggaaaatgactacatacgccgtacatttgcgttttacctcatttcttacgacaaaataaataaattataaagagagagtttacattctcgtagccgtgtgctgtgccaagtataggctaccctgtaatatgtcaaggttgtacatgcgccgagctaattatacctcttttccgaggtcggctaagcgcttctctcgtcattcattgcatatgctgcggccacggagatgaaaaggataataatagaggcttgtgcattctgttcggcgcttagcttgagagtctgctgcctatataattattcgatatatatagtatccaccaccccacgcatcagactacaccgccgagcatacttctacaaatcttcaaagttcacagcataccttctcatttattgcgttcaatatgtcatccacagtttcaatttatgtcgccatcagcgccagcgagggcgtttacaaacactggggtgttttcatcgatgcaccccgagaagaagacaaaatgttcctccaggtggcaggttctgatggtcgattccgctatgagttggaaacaacagacgttcgacaatcggaaagactggtggagttgctttttctatatgatgtggacgtcaccgaaattaactccatccagacagtcgctagtcaagccaccgttcacaatgagattcggggctggaattgccaagactacgtacttgatcttcttgaggcactagaaaaagaagggatggtgaacggcaaggacgcaggctacaagaagcagaaaggtttacttcatgggaagcaggaagggctggcataggacgtgttctcctttctgatttgtgataatttgtgccctgttatccttattagatcagtctcttcagtcaaccatggcaaggcgcttgggaggtctgtggaaaggtaccaatgagtgtcaaaatgatgaatgccttgtccaaaggcatcaccatagcaaaagagctcagtggcctgagctttctggaactcaacatagcagcaacatgtgaagctcattaactctattctgatagttgatgacccctgtggtacgtcggtttttactctaatattaggacagacaatatcatggtgtaacaagatccctgtattaatttccgctaaattgttgctagaaatatgactgggagaaaaatagcaattgagtgactgaatcaatgtcctcattcaattttagttccgcagtttgcaaatcaagatgaaaaccctaacgccagccgatgtatcgttgtaaaccgagaaaaagaaagccgcccagcgccaacaccgtggaatagtaatgagtcttcgacgaccgctcagtcatgtctgtggtcttcatgactatcagccagcatctggaagcccttcaccagccccattgcagaaccagcggcgataccgccgactagtaccatttgtatacctccaatgacacccttgcggatatttcgacgaccgcgccagccactgacaaagcatgtctttacatagccgaagataaacagtgcaatgaccatggtagcaatggaccagcgcagggcgatgaaggcttcatggggtccgacgaaaaagtatggtatgagaggaataaatccaccgataaagtatcccatggcaattgtaaaggcgcaaacgatagcccgagagcccgagggctcgggcagagtgtggtggaagttcatgagaaaggatggaagcatgggagagtgagaaagatgatttttgagttgtgcaaccagttcagatggcaactcgtagggctcaaaaatgtcggagatggtgtcagatacagacgcgggatccgtcaaagtctgcgtctccgtttctttcaatgtagctttgtatgactccctaggaagatgtcagctgtcaaacctccaatagtttccctagtatattttcataggaggtaggctttgaggattcaggcagacttactcctcgcttttagcacctagatacccaccgagtcccatcgatatcgctcctgcgatgagctctgcgagtccaccgaaaacaacgattttggtatcgcccaacgcagagagtccagccgttagggcgaaaggcacagtcatgccgtcggaaagaccgatgatggcatcggacacggtgcgaccgtcgagaatacgagacgaccttcgctccgggtcattgtgacggtgtgtgttgttccctgcctcgatatccggtcgaagttgagcacgagggtccttttcatcttccgaagaagctctgcgatcgggaaggggcatataactcgacatggcgccgaatagggaactgattaacacggtgaggtcggagggattgaggactgaaatgaaaccttgcagtatcccttgaagaagacctgggaatgtttgtttaagtgaaagcgagggatacagcgcgattagagaaccagccagttagagcacgcgatgcaatcatgaggcttgccatgcttgcaacctcatatattgccagagaagtgatcagctcccaccgttgaccacagcctatcgagtgacacaggaagacaacgtgcttggcgttcccctcatggccagggcacgtgcaacgctgattcgaggaggttcggctttggagtggggccatgtgggaccgtgaaagggactcccgctgcttaacttggggtgtgggaccaatcaaaaactaccatttctaatccagacccctttcgtccatggactccgcacgggctcacgtgtgaatataaactatacccattgccagccctaagaggttacggtcggatattgcgagacattctgaggttagtggcaatatcgcttagacttcgcagtctggaagagttttcaccgcacgtgggctactgggcatggaatatcatctcaatctaaataaaacagggttgaaatgaagtccgatgatgttattcttgaatccacgaggaacattgatatccagctgagcatgactttcacctctgagccctctgactctgtggcaggtgatagtgtacgtagatgtagaagacataaggtagttgtaagcatatttcctttcttcacttcttcacttttcttttgcttcttcgcacgcttcacgaaggagctcacagtctcgcgttgaacaaaagcaaagatgattttctactggggcttcattattctcatggctttggccagtcttacatccactcatccaactgggaatactcaggtgtggggccagctgcgagagaacgtgagtggatcgcacagcatataaccccaaaggaccacatggcttacaagagcacttccagatcaagcatgttatctatctgactcttgaaaaccactcatttgacaacatcgctggctattgggacttccatccagaaattgacaatttgcgcaatctcaccttctgcaatgactacaccaaccccaattggacagtctatggggagccactagcaatctgcgctgaaccggatgcaaccgaggtgccgctcaaagacccggaccacaacttcggcggagtcacctacgaaatcttccgccagtggaacccgaccaaacaggatgtccctaaaatggcaggttttatcgagcgccaatcggagaagtacaatgctacccctggagattcggcattcgtgatcaaggccttgaaccggaagaagacagccactctggtggagctggcaagcaattttgccttttttgattcatatgtgggttcttcagtctacacttggctacgatatgtattattgcagaaaactgactgtcgactctaccttgcagttcgccgagcacccgggtcctactaaccctaatcgacaattcgcaacctcgggctcatcctgtggttttgtcgataacaccgatcagtccgctgggttctggaacaatgtgactgggactacttgtgcggtctcgatctttgaatcgctcagcaagaaaaatatcagctggaagaatgtgagaaaagtcttgttcctttgtactgacaactggctaaacatttctatgtagtactacgagaccgacattgtcgatggattcatgtataaagtcagtactttttgtactccaattgccagatcagttactaacgataatatcaagtgggtgcaagacaatgcaatggaccgtctcgtccatgcgacagagctgtatcatgatctagaagccggcactttgcctgaattctcctacctaaacccggagtgctgtacagttgactcaatgcaccctaccagcagtatggcagcaggggagcagatggtcaagcacttatatgatgccctgcgtcgctctaagtactgggacaatgcgttggttccgttatcctcatgttgagtgcggtaatactaaccctgaaatatagtgttttgatcatcaattttgatgagcacggtggattcgctgaccatgtccccacgccagtcaatgtgcctcaacccgaagacggcatcatcttcaatggcacgtcatcaaaccacaattttacgtatgactttacacgtctaggagtccggtatgcattctcatcccaatttcagctttaccgtatgaatattcggcttaccttctcatcatagtgtccctgccttcataatctcaccttgggtgcccgccaaccttctcatccacgatcaaggcaccatgtatgccgacgattcggcctacacccacagctcaatcctacattttttgcaggagttgtgggggcttgagggcttaaacaacagagttcagtgggccaagacattcgagacggcttttaccaacaagcggcgagacgatacgcccaagacgttggttaaaccgacctggtatggtggtagtgggcagccagaaccggaaccgttcttctttttgaaccaggatgagagctactatgcacgtcgcaaggcccaggctaaggcataatggatgaaagtggagagttgctatattgatagtgcaactacggtggaataccgagcaaatccttgagatttcgggctcgatgcgggaatctctcgttttatgatatcaggtagtctaatggagtggaacgatacctacccagtacacttattcacagggtcatgataatgcaatccagtcgattgacaccgactcaacgcttaaattgtcaacatgtagtacactgaacaacttaaaccagaggcgatctcaaagcaaagtcgagttgagagccccgtattgatttaggaagcataatctggagtatatggcgcatagtgatcgcaaatttgaatggaaagatcgtatatcaggactggcattgaccgagacgatagaaagcccagaactactatcactagtactataccagcatcgacatgtctctacaatttagatgacatacataagcggcggggcaccaagagggtggatccactctgatcttcgatcgggtaactttttgtggaaaggtggccgtttcagccttgaaagtggtcatattagggcatcaattaaataacttcttagattctcggtgtagatccacgagcggataagtgttcattgcgaaacctcattgcgaaacttggtgcagaatgaagcagtccggtgaaccagaaacataaccaagaaaatcatgcaggtccaacatatcacttgcgtttctcagcaaccttctgctccgatgaagacgagccagccatatcccacagtcggcttttgtaagcggggaaggaagtgtggttccacatgttgaataggacactatggggaaaatatcgggtcagtcgtcacgcacaagcaagggcgggaaaaataacacagcaagacgaaacgcacctctgggtctggtccttgtaggcctcatctttgacctcccttacttgcaccttcatgccgtccttggtgaaagctatattcttgcgctccatcttttcgcgcgtatttttgcctacatcctgcatgatgctgtagacgacaaatccgaccgcggcgatgatgccaacaaagacgaggagcaggatgaggggaatgatattgcgggcgcccatggtggggtttttttatcggtggtaccggagggtagtccagggaatttttggaagaaaaacgaggcgataggtggaattaaaagatgagagcgggcgggggaaaaaacaataggctagtatatgccaagaacgggtttcttgtcgaaaatagttgcagccttgggtctttttctgggcactgttgctgcctggagtggatctggatgtttgttgcacaagaatgctatttgaattccagcgggacaaggctcaatatgagagtcagggggttgagaccttgcaaggttgtttcaacggttggagtacacaatgacgtctggtttgaggggaaatggcacgcgtcgtggctgtgtcagattgcgtggctttcccgttagccacttcagttatttttatcgggaggctccggcccggtcccgggggcatttttgaggttaattttaggctggcatctctaactagatgcactccgtgcggagtacatacacttggacttagtctactttgatgggacgggtttgtacttgtcactagtatgaagatcacctctatcccgacatgaactaaagcaccccactacctaaaacaggatgatcgatctcgatctcatttgcgtcatcatgatagaactccaaactcaacgtaactaagcggtgaattctctatctggggaagctcatttcttcgagaaatctgtctggatgaaggtcgggacatttctctacaaattctagttcatacacctagcagcttagctaaatccgacacgatggccgacatccctttcattccgatcttccccatctgcttccaatgcggcactgatcagaacccatgtcactgtaaagtggttggcccgacactcggtaagttcggttccttatgcagtgtgaatggctgaaaaatgaacccatgcctgacgaaatggacagggtttttcactaccgttgtgtcagcggtaagtaaatatagtatcttctcgagcaataacataaagactctcttgcttgaatccaggctcatgacaacccttttctaggtcttctgctatccactatcgatcttttgtggctgcggcttcactcaaactggaaaggagtatgtcccgctgtcctgctacttcttgatatctagactaacaaatagtagtatgctgggataccctgtcaagttaaatcagaagatcagtaatgccattccattctgatattgcgagctaggcgcttgagatatacttgagggcctttttattgtaccttaaccttaacctttaatcattatctctcttttttccccatgcgtttaataaagcaaagtacttccgcccatctttcaagaaattgtaatttcttcgtagagtcgcaggggataaatgctcgagagcttctggtgacattgcgtttggatattaaaacctaaactagcatatactgtaagaaagagaacccaatgcgccaaattgaacacccgtctttctccatgacatgtattcccaagactacttaggtggaagtcttgttaggagcaggcagataacccgcagagtattcttcggcttcatcatagtcttgcaaatccagtcttttcaaggctccctcttccaacagatccgccacactagtcagagccaaaagctgggatccaaacccaggctgctcaaaccaaggcgaaatgggccccaaaaggacatcaaattccttggtcacctggtagacatggtagttgtacgggaagctgctgttggttggcgcgaacagattggatggtggcagggatcgctcgatatatggagctccaagaggtgccaagaactttccaaattcagacccgaatctatcaagcttctggcccacgcggagtgtaaaattgccaagaatagacgcattcgtggatgtttgggcaaatccatcgctgtctggatagatccagtaagccgtggggtcggaagcgttcacggtccatttctccaggaactcaattgggcagagctcgccgaagcgggcgtatgtcttgagctcattggagagagggaaatatctggggaggactttcggaccaagtcgtgggtcaccacaaacagcagtagagttcacgtgggtcactcctttacaggggtcggggtaacatctttttgggtaatccggctcctaagaagtatgagcatttgaaacttatatggcctggtaccataaaaggggtcttgggaccactgaccttgtttgtagcgtgcctgttaggagtgatgaaagaagaagcttgtgctagagcaaccgaaagaagcacggatatagttgagagatgcatcatgaattatcctgataatttctctctgtgggttcaccgaagaaaggaaacagagccattaatatactagaacggccaacggagcattgaccttccaatctcgcgatctacagcgctatccaaattctgcgcctaagctatgcaagcagatgggtctgtcctacagtttttctcccgggggttagccacgcgccttttcgagctcgcttcattccaatcggcggcatttttccccttgctactccaccctattcttacccgatttgtaggtcgtactctgtactctgtacaacatacaaggtcgaatggaatagcctacaatgtggtgaaggtttcgcactctccatgcctcgcaactcatccgacccggaaagatcacagatattctcagagtaccgcagagtacataatttattgacaatatgagatcggaatgccagatccaatcgcttatttgagagcaaaattcaattatgctgagagttttactctatggaccattcaaagagccctagaaatatgtggcgtttgaaaaagccagctgtgttagctcttaatccacaaaaatgcagatgcgcatagcttcctatttaggaaaatgagaagcaactgtacccgtacggaagcactccatacctgcaggcgcattaatttgctcaatactcttcccaacatctagcaagaattattgtgcacgttatcattacaattcatttgattgttattcccctgtcagctagcattggttcggtttatttcacttggttatttctatttgatttcaaaccgggcgaataaggagctaaaggaaaaagtaatataagacaatcaatagttcgtgatctacgtgcatgagcatgaatctattcggccatgagattcgagatccacaccttggcttgcaaaagacgattatttccttcacaggctgaaatctgagatcgaggactccgtacaaagtagaacttagccaataactgcatcatacagagtggatccaacagtagtcgcgtgaccaggtacaattcagggacagaacactcctaatcgttaggagagatggggaattatctatcatcaaccttgcataggcaactggatgtgtcgaattgacgcatcagtgaccatattggttagcattaagctgcaagcagatgtccaaacttgtacgagtagtactccgtaaaggctgaatctatttagccaaaggattagacccgctacagggccacttattttctcccctgatgtaggcaggtgggctgcgttaattaaagatcggaaagatcatagaactatcgatcgagactactccgcacaaaatacagttattcctatgctaagcgatattgcttggtagtacctacaaaacccccttccatttcattacaacaatcgacatcttccctcgtcccttgtttgggcttgccggagcccagtctttgaatgtaccaacctcctcaaagttgttcttctcaaataccttcatgctccctatgttcccaacaaaaaagctgcctctaagaagatgaaggttcatccgagggatagcccagtcttgaatgacagttctaacagcaacactcatgattcctcggctgtgttgagtaggagaaagatagtctgttaatattattagcaattgacctcgagtctcactaaggtgcccatacatacatcctataccccagacgatatccttgtgccccacaggcaaatcattattctgatcctgtgccagcacaaactccgagctattgggttgcagctcatagaaagcataccgcatcagtgaaatgtctccgatcaagacatcttgaagcggagcgccggtcgcagggtctctttctgttactttgcggatacaaatgaaagggcatttatcaaaaaactccagctcctctggggaatttgaaccgtcgccctgctgactttgcgtttcgaattctctttgcagagtagacaggacaccctcgttttctgctactttcgtcttgacccagtctatgccgtgctcaggcagaaaagggtagggtggcccctgtagccaggagtacacccgtgaatcattgaggatttcggtcattgcagcagatgcctcctcgatctggtattcacggtgtggagtgatgatgatgtttgtacatggtgctgggagttggagatagggctctttagtgagcggattaaagtggacaaccattttgccaaaagccaacctaagtgcaaggcttccaagtggaacaactgcacgctttatgtatgattgtatttcaactgcacaaggctcgaagtcttcgtgagtcactcggcaaatgagagctaaccaattgtggcaacactacagttagcttgatattacccctatatataattttttcctccaacttcttggctaattactgactattgattctttgccgttcataaagtccgagttcgaaggcagcttattcagaccttctatcctcggacctgacaatgagaacatcccgcaggaactgcatattaggaatccgaatacaagcagcccagaatagaacccggcgatgcaagtatcgctagctagctggaatcttgaggcagctaaagtatacaatatctggatgcatttgtatgtggatcatgtcaatttgacagtccgctgagaaggcaagaaaaacgcttcgttatgttctattatacaaggaccccaccaagtgccaccaccatctcgaaatggcattaaccttccggggtatatgaatgttaatttaccggcactcgactggtcaattgctccagacgtcctgccaaagctcgatgtttgcgcatgacctcctcccattcataggccatatcttcggtatcttcctccccgcctagctcggtcaaaatcatgccaaagtcaccgcctagccgaccaagacttgcggcacagtaaagaagctgggtgagaagactttcccttgaactccgatcgcggacgttggggagatatgagcgcattgtatccgtgagcaattgcacgagatgcattgggaaagtagccaaagctggggggagacgttgcaagggatcatctgagtgtgctggctttgacttggccttggagtgaccgtctgcacctcgtaaacctgagatggcaaactcggattcggattgctcggagttaaaaatatttttgtataacgagacaattgcaaagctctgctcacggaagatctcaatgtatctttttaagtagcggtcggtctgctgaccaccggaccacgagttcgtgtctgatttgtccttgccagcgagtctccgttgggtttcttggtctgcgagctcgcgaaggggatccagggcttcaagcgtcgataccaaatgcgctagtctacagaccaggaagatagcaccaagagcgccttctcctgtcccgactgccccatcactctgaatcatatctagatccggggccactcgccgcagccaacccacagttcggataccagctgctagccgtaggttctgggttcggagccccgtaatcagattactggtcatgtccttcatagcatcctccgcctgggatgcaacgtcttgaatcaatggtgattcggggtataatgtttgtagtcgcttgatatgtgcatgcaggtcaagtgcagaggagtaggttgtagaggagacaccggtaccggagttgactgaggccgcggagacggctttggacagcagacttggtagttccaagatatctgacaatcgatcgacgttgcgagagagctgcatcgctttcttccgtcgttctagggcggcattgtctgtgattttactgtatttggtggagaacccaacggcctcctcgtcgagtttggggatagcatcgcgtagctgttgcgcctcacgggtcaactgtgggacagatgtacatagtgtggacaaattatcggcagaggtgacaaatgcccggtgcgaacggttcgatagggcttgaagggacagaagggtcgagtgggaggattgggcgagcgatgggggttctgtggtctggagagcttcgagcgacaaggttgagaggcgagtgagatatttgtctgtagttacatcgtgcgatttggttgcatctagatgtggagcgagtagctccagcaaatcggccatggcgagttgatgctattcgtaagatgcgtaaaagaggagcgctgaacggtccacggatcacccgcccgttggcccgtgcgggtcagttgtatccccgactggaatgaactttttctttgctttttcgatcctctctctctctgttttagatagacagatagttaggtcatcgttgttctcttctttccttctctttttccatcgttgtccttgtggctgcaaataggatacttctactagcccctcccccgcattcgaaacccattacgttccccatgacccttccaccatggggaagccacgggtaagtctctatttctgagtgattgacatatgtcttggcttaaactgacagtttcctacgtacagatgatcattttagtgcgccatgcacagtcagaaggcaacaaaaaccgcgatattcatcaaactattccagaccaccgtgtgaagctcactgctgaaggatatcgacaagccgatgatgcaggccatcgactacgtgaccttctccaacccgacgatacacttcacttctttacttccccatatcggcggacaagagagactaccgagggaattattgaatccctaacctctgatacacccgctccttcacctttccggaaagacacaatcaaggtttatgaagaacctcggctgcgggaacaagattttggtaatttccagccatgttccacggagatggagcgcatgtggatggagcgggcagattacggtcatttcttctaccggattcccaatggtgaatccgcagcagatgcctatgatcgagttagtgggtttaacgagtccctctggcgccagtttggcgaggatgactttgccagtgtctgtgttcttgttacgcacggcctcatggcacgagtatttctcatgaagtggtatcattggagtgtggaatattttgaggaccttcgcaacatcaatcattgcgagttcctagtattgaccctcaatcccgaaaacgggaaatacacactacagaacaagcttcgtacctggtcagatcttcgaaaagaccgagatcgtgaaaatgcatcgaaaggtcaggtccctgcgcccatcccacctctcggtcacacagataataccccaactcggcgcaagtggggaggctgccccgacggctgtaatcacggcatgactacagagggaagacaatcgttgcgagtgaatctattgaattccagctatgcccaaccaaagcatgccgatgaccatgtaggcggctttggctccaaacttcacaagtctatatccatcgacgaggtggtatcgttctcagaagacaatttcgcccaggatgataccagtcgaaaccccagcgttcatcgcgtctccaatccgcagcatacacttcgcgacaatgacaacagagacaccacaaagcagtacgattcaggctccgaagcccgaccaaacgtgaattcattgcctccaaaacgtccaaacttgcacggactgaaccgaaatagccaagaccatacacccacatcatctgcatcatcatcggcgcacctaaagtatgcccttctccaccttggcggccgtgacggtggaggctccatgagcggagcgaacagcctcgccccatccgatgatgaaagtgacgatcatgctcaccgtcgcgttgtaccaacttctcccggcatcgccactggcaatttgtcccatatgaaccagcaaaatttcgaattcccgtccaacgagcagactcaacagcgtggtccctctcaggagttcgaagatgacggcgatgacgaaatgagcggcaatgccaccgagaaatcgaagaaacctcgtctgcaccatccccatcaataccatcactattatcaccaccatgtttcttcttccaccgaccaacccgagcaccgcatggccaatatcctcggcgacggagacgagtcatccaactcggaatcacaggcgcgaagaccagaaagttcttcatcggattcctcaactcatatccacatcgaggaattatcattagaagagcagcaaaagcaaaatcaaagtatagaagggagcgtttactaaatctgttccagttgctttcgtcgatgccttggctgcacttctccttatttcctgtctctttcttttctacatctacgcttacgacccgtgacgactgtctggattaccctctagtacaactgcatttgacctacatcttacttcagaatgatggcccttttcggcgttaaatcaatattaaattccgtcataaaagtatatattacgagacctgactcagaattcattaaatgtcccaaaagagcctaagaggttgccaaatctagcagtggttatagagtagtggaggctcaccgttcaaacagaaggtacgagggggaaatccatacgagtccgagaacaaaacaccaaagtttggtagtcctgacaaagacaatattttgccgctaattagtgaaacatctaaggaactgagcattgacagccatagccacggacgcccgtagccaggtcaacgcatgaccaatggaagcgggacggccccagctcgctggcagtgccgaatggcaaagagcagaaaaattcagctatactacagttgtcaaatcgcgggaactcactagactctcaaaatgacatcagacaggagatgtatcaagggtaccgaaatcccaagaccaatcgtatgccatctgtgtcacaagcgaggggagagagaggtgggtgggaatgatgggatacatcatgcagcttagaaggctcggaaaaaatccttgaattgttgatctcattgattggagaagaacggctcggtagagcaagataaaaacaaatcgaaggaatcgaaagaagaaaaaaaaaaaaaaaaaggaatgaaaattgaaaatttgagttgagaagtgaagaaacacgattaacgtcggggcactgcacgtagcgtggcgaatgggaataatgtaccgaaatgaaatggaagtgaaaaagaagaaaaaagcactctataggtaatcaccgcgagacacaaatgccaagcataaaacaaaaggaccaaggatatgaaccgaagtcgtgggtaataaacaaagaagtcagattttggggattcgtgatagtcgtgactgcggccccggcaacctttggagggaaaaatgaaagacccaacaatgaggttagaagtaagactcaatgaaatcaaagtgataccaatataacaagttgagtcaatattctgcattgtgggcttgccgggagcatgccaatgtccgctgtgggagcgtttttcctcttttttttccattttcgagtttttttttcgctttgccaaacgagaaccagcggacgcagaacagaaatactttttgggacgcggtaggccaagtgctcagaagtaagtgaaagttgaacgaagcaaaaggtcgaaaggcgcaagattgaaaacaattcaagcaaaagaagaaacggtatcggaataaatcccatgcgagtcgcccaaactaacggtgaaagaagtctagagttgtagcaagaaggaattatgcggcgagacttgtgatcttgagccgtcgacacagtctgttccatccgaggtcgtgggcagaacttgccaagtatcaccaactaggttgcaatcatcggctgatgcatagagggaaatgcattgttgcacatgtagtgctcgagatgcttggcacagtaggtgcagcagcacgacgaaccatgacccgtccagagactctgtgcgaatggcaaaccgtacgccggagtgtgatgataggacggaggctgggagcgaggtgcagggtgaaccatgtactgtgagggtgcgttccagccccgcgagtagggcggaggcggaggcgggttagcgtaaccccaaggaccaaccgagtagtagtcgggggttgtgggcccgctggaaagggcagagggaggcgagtactcggacgcggtcgggttgagccacgagttctcaatttgggagctccgctggtactgcggcgggatagggccttcgggggacataaggggcttgctaatagcctggccgcgggccacgttggtctcgagaggtgccagagtctggcgagagtcctgagtccgagctgttgccttgacccgccaggtgtcccagtgcgcgcgccacgaggcgaaaccatcctgcttgtcgtagatgcggtcgtgaatcttccagtcaaaggcaaaaagccattccaattccatgtggttcaactcagcaacggggatgttgctaacctcagcccaggatttgttctggaaggtattgtcatcaaggaacttgctgcccaacagaagagccacagtcaacatgcggtagacttggctactgtctgccttggtgaaggcgcgtttggctgacaccaggcgcatacggctggccaggtagaaaagaccgagcaggatggtagaacttgggaggcgtgtcgaggacaaaatctgaaagacgtatttccgaaactgggggggaaccgaagatcctgggtagatgcttcgcacgaggtcaatatctgcaatggtgatgttggtctcgaacaaatcatacattccctgagccatttctgccacaaagtcggacatgcgatccatctcataatccaggtgagctgcgacacctccagttgctttctcctccttgcggggttgttcgagctgctgttgcatcggggcggcttcctgtcgacggtagtgaggcggcattgtagcatccatggggggaagctggacgttgctgcggattgagggcaatccagtgccaaccatggggttgaacatgggctgctggttcattatgtgatgatcgcgagcagtgttcatcggatgggcggactggtggagattcatcgaagtgggtttggcgtaacacagagactgcgagtattgttcgatgaattcattgccgctttggtggtagcgaggagggaatcctgcgtgaccaactgggtagaatgatgggtcttccatacgaccaccgttgacatggggaggcgtaggcaggccatggtggcctgggacgaagaaggacggcatcttgagagggggaagggcggttaccagttcaggacggggagctagacgtattctgttgccagggaagatgatgaatcagcataaaaggcctccggggtaggcaaaagcctgatggaccgagagacaagagttaaagaaacaaggagacgaaccgtctactccaccagatcctgatcctgggggggaggaagaggagaagagcggtgctcggcgagcggatcgctctgtcgtattcctagggggcagtctctagttgaatgacatcgaggtgcgttcaatgatccaacagacaaatgacaagtaaatgggaattggaaggagtgtggtgaacggtgaacaatgacacagtcctcgcttgaagtgcctcagtgacgcagcttgtgggggagggtggtagatcacaatccagtcaattcgaagggctttgagaggcgaataaccaggtcgaagcgaagcggaagagcccacgtagaattgtgaaccgaacgcgctgggagaaggaagagcaccggtggaagaaaactaaatttcccacgcgtagacgcaaacctcacagaatgaggtgatcaacgacacttagtgaaaagctcgttgacacgggagaagattgatacaaaaaacggggttgagaaggaggatgaagagaagaaaagttgtataggggcgttgtgggaaaaggccgttgggttgccccggtaattttacatgtatttggtatacagggaaggagtcactcggcccacatatggaaattctaaatttaaaaagctcaattgctgtttcacacatcgtgtctctgctagtatcaggtaaattaggccacctacaaagtatgaatcatgatgcttattggatgtgaatttaacaagatcgtcatttcttattagttttctagactatcccgattttttggattttttactataaaaatctatcctgcgtttcctataagttgaaaacgtgcacagtgcatagtgcaggtattatcatgtaattgtattgtaaggctgttaaagtaaagaaaaaggccctagacccttcaggcaaatccggtgatgcaacgtccgtgtcactggttctcgctggttctgactggtacggagttttgtattgagctttggcagaaaaaaatgaaattcgggcttagtaagctcagtatattccgtcgccttggttggaattcgttttcaagaaatttgaatagtaaagagtaaatactaaatatccccttattaaatcactagcattatcatatctataaaaaaacatctgaacatcaaatgccgcatccctccgtttctgaatctacaaaacccctacgtagtgctacctacggatgtgttcatccggactctgccaacaaaccaactccaattatgtacaactacggagtacaagtaggcactatagtcaaactaacaaaccttacagctgtcgccgggtcattctatccctcgatatgtaatcacacggctcattattccgtacacctaagcaagggcaaccgacaccatgcatctgacaaacactccatctactccgtactccgtacataactagcactccccctacctcttctgggctttgacatgtcagacacagtctaactggccacctagggaggaaccggggctctgactcaccgtggacaactccgccttcagcgaagacctgggtgttgatctctgcagtctgcatcctaatacggagtagcgtcatgctgcatgggcaaatggatatgttggaggtactccgtacatgtacttactcttggaggcaaaacagtgtcttggcaggtatttatctgaggctgacagcccgctatatttatgtgcctatctgcttaaaaggcgcatacatcttctgcgtgccaataaaaagccccatatatatggaactcatttctccaagaggggtctagaaatacattattaatccttaaatacttaaaatacttaactataacaggcatcgaaaattgcgcgtattaatgaattccagaaagaaaaaaggaagcccctcggacctcgtgccttgccatgctgatgcagttcctccgattctttcaaggtaccatatagtacatgcctatatacaccttgcaccacatgtgatggttctaaccaacatagacaataaatacatcaataaatggacctacagaaaaaaaggaaaaggaaaaaaacaggataacaggaccaacgatgcccgaccggctacattcggcagcttttcccctagaataaaacatctccatatttcctggctgcactatatgattccatttcgccgtaatttaaggaaaaaatcggaaaactcaagcacccctcctttctcctcagggcgggggaggcaaataagagggcacaagtacgtaggtacgcatgttgtacggagtaactataaggttgatagttaatcaatgatctcgaaagcactgtcacatttgtcatgatggtatgattcttcgcaggttgtttcttacaatttctgttttgggttccttatatatgccggtattgtatatggctgaccggtctattctatgctttggtgagcgtttgggcttttatgtcaggtgcctaggtcatgcatgcctggataaaaagaacaatttactacactgcctctgaatgggctgtgacaagcctgccaatgaagaaaacactgaaaggcaaccaattagaaaggcgtatacaaaggccttttgagcaaaagcagaggaatatcgttaatattcaaagcatgttgcaaaacaaagcttcggactttgaaagctcaatcgaccttctaaaggcaaaccataagctttactagatatgttatataactctagactcggtccttaggaaaatgccaggatccattattatccatatcaaaaatatacagaaaagatatgtactcaaaggaaaagtgcgacagcagcgataacaccaagagcagacaaggcgccggaaacagtcgaggacgaagcacggttgaacataggtgatgcacttgctgagctgctgctttctgtagtagaacccgaacccgtgcttgcacctgcgcctgtgcctgtggcagcagtaggagaagaggccgcggcgggggaaaccttggctgtggctgagtggattccggcggagattgaaggtgtggctgagctgatgcgtgtgagtgtgatgccgggcagattagaggggtggccggtattgctaccagcggagatatcagagccagagccagagccagagccagagccggtcgaatcttcatcttcaccttcaccttggttcgccgatactccggaaccaggtccactttcaccaacgcgagaaacactagtctcactgatcacacctccctcggtagtagcggtgccagtgacagtgacaatagagtaatcggtcgaaatccttgtctcactactaacaacagcagtcgccgtctgcacaggaacagtcgatgtatacactgcgccagatgccgtggtggtcacagcggtgttgattgggaccaaagtggtaccggcaacgatagtctcagtagtgacgtgtgttgtctggtcgcgggctgggcagtcagtcactgtttccgggcattgggttagagtgacagttctggttgagaggattgttgagattgtgtagtcattgtcactgccagataggctagtagggctggattcctcggaagtagcggtgcctgtgatggtgacaatagagtatgcggttgaagtctttgtgtcactgctaagaacagcagttgccgtctgtacaggaacagtcgatgtatgcactgcaccaggtgtcgtggtggccacggcggtgttgatcgggaccgaggtggtaccggcaacgatggtctctgtcgtgacgtgtgttgtctggtcacgggctgggcagtcagtcactgtctccgggcattgggttagagtgacagttctggttgagaggattgttgagattgtgtagtcattgccactgccagatgggccggtagggctagatccatcggtggtggtcgttgcatctccaacagggcagacggtggtcgagacgatgatagtctcggttgtaatgtgagttgttttgtcagtggctgggcagttggtgatagttgagggacaggctgtgatagtcgcagtgcgagtggtgaagacagtagaggttgtcatatccggcgtagaagtttcagctggggaagagctagtgggcttcacagatgcaacagttgtcggcgccgtggactctgaaaattctggtgttcccggtgtcgaggctgaagactcgatgacactgctggaagcggggtttacaggtccggtgatagtggttgttgaatgtggcgtaggagttccagctggggaagagctagctggcttcacggaggcagctgttgtcggtgcggtggactgggaaaatgccggtgctccaggggttgaggctgagggcttgatggcaccactagaagcagtgataggtgttgtcaaggtgatagggcctacagtgctacttggtgatactgaggagagcgatgaagatcccgatccctcggagctagaatggccagatggggagacagaagaggcgagcggagtgctggtagccacaggcgagcccgatggggtcttggtagggaccgagacgctggtcgaggtgaatgaaccacatctcttctcgaacgagaagttgttcacatccactgttgcgcccaatatcgtggcaccagggcaactaattaggatgagcatgtcggcttccgagctaacagccgtccattgcttggtgatagtctgccaggaaccggctgtaagagtgctaacgccgacatttgcaccattgagtacaagatccacggtacaagagccagctgtcaggcggaaatcgaaagagacagagtaagtctcttccgcaacggcgccagtaacggtctggatcaacagtgcctgcgattggatagcttcggcactcagatgcctatcacaaaatatgagtcagttcatttatactctgcaaggaactttggtctgtatgtatgattaggtaggtacgaacaagtatccatcgacaacagcaccggccgtgggcgggagaacagtccacacactgtcatcgagatcgatagtctcgaaagccacatcctcaatcaagttttcagaagcacaacccaagagcggagctaaagagggaatagtttgactaggcgcggtgatagtgagtgcaacagctggaagaacgtggacaagccacatcaagcagctttggaccatcatttttgtatagaatctagccaatgtaaacgaatggactggtgactaatcaccacaaaggagcaaaagaatgtttagatgagcaagtgagcgagtaagtgaatgagaggatatcgtgggcttttagcccccggatggctacatagtaatctccccaggtctgtggcgttactgctccacttggaaaacatggcaatttgaagcgaggattgtctcgctcaagacaaggcaattggttcctgcatgaattagactgacttgattaagggaccaggcacacatcaaatgagtaactagaatcgtgttattcttccacttagggcttgggaaaccttgtaaaatgattaccggcacctggcatggcttgctgtcccttgctgtctaagagtctcgggaagattgggcttattgtagacgccgtatttctcactttattgctgaaatcacaagagattcatgaaataactgatatcaggggtatctacgttttgatgtcccctccgttcggcttataccagtggcatgggcctttcaatagcctggtctatttttgtaaatgtgcgctatggcccatcagtaaccgggaaatctaagacatgccataaagtttaaagacaatgcattgcacaagaaaaagaagatctcagagttataggctgtcaacaaccaaaaaatcctccatgacagtctggttgtacctgtatatgctatctagccccaaaacgcccaggaaacacaacaggtcatatggaaagcgaatgaagccgatgtacctaatcacacaaaatgcacccgaataacaaaagacaagaaaatgctaagtgagaaaaatgaaagcgctgaagtcatcacatcatatataacatacctaccctacgcaagagacgtgggcaagaaacaaacgaagaacaaaagatacgcatataaacagccacgatcaaacagtgccgtagcggccgcgctctgcgcccaacaaagcctgtccctcttgagaaaccgaagattcccttgagtccctccggggcgaagcagaggggatccagcctcgcatccagccgtgaacatgcctccagcgactgcgaccgcgctttgggtcatccccatcgccactgatgaaactctcgtcatcctcgtgctctggaccatcgccatacatgagaaactgaacacccatgaacccgtccagtcccaacacaccgaatgcacccaagaagaacggcgtagcgcgtccaatccattccaatctgttattgccgtggttgtcagcccagccgccgccgccatatggggagaaatcggaccaagcattcgggttggtgagcatcgagctggagtagaacaggttcccacagaatgcggccatgaagagcagtggggaaagaccttcagtgctcttgcgctggtagtttttgtatagctgtggagggcgtgagccgagatacaggattgttgacatccaagagaagacgcggccgatgatctcgacgatggtctcccgcggtgcttccgaaatgaacgtgtcggacttgtcggtgggggcagcgtttgcgagtacggcacaaaggagtgatgccatgagcatcgtccggggcagtgcgaatggcgggctctgcatgctactgcccaaccttacagatcgacgcgatgagctcaatttctcgtttgagtatgacgctgttggcacatgggtcgagtcgagtgctgacccggcctggaagcccccatccttggcctcggggtgcttgttgttcatgttgacgggagccggggtctgattgtctgagtcgtggcctggaggaggcacgccttgaatgatgtttcgacgagccgagtcatgcgaatgtgacaagtcgtcatacgaatcattctggcgaggtttgtaatgagtgtaccagaaaaactggaataccagagcgatatcaacgaagacgtaataactggcaatcacgacctgccaccctgcctgtcgggtatatagcgctccaacgaggttgctcgcgtcaccaaggcaccagattaccaagaaaaatatcgataagcctgacgtcgactgcacttggtagttcttataaatctggggtagttgtgcgaaaagccatgagactatgctgagggtcccaaggacggaagagatcgccgcgagaggagtggggatgcagatgtggagatgcgaggagacggcggtcaggaagggcgaggtcggttcacagtggtcaggaagggtcccagagaggaggtactgtaatagtggaggagacatggtctgacgatcagggtgtctttgatagatccggtgacttggtacagcctcgagtagtgactcgtgtaggaccgtgtggcattcaaagtatggggtaagggcgataagcggatccgatgtgaacgagaagaagagaggatgtatgctctaagtctagtagagctaatagaccgagtaagttggaaggagaaggtattaagtaagtgaacgaagcaggaactggagagaacagatcttggggtcattctggagtgtcacgagagctgaatcgattgccttatcgagctcatcggcgcagatcggatgactcatgcgataagcataaaatgggcgtatcagggcttctccgagcttggaaatgcagcaccctgcatttaggtaacacatcattatgttgtacgatgtgagccatgatagttagttatcataaggatcgattagtcaaatgttctatacctaactaggtacctacatgtcggtacgtaaggtaccatctaaactcccaagatcttacatcccataaataacttggaagtggcaacgacacatctcaaagtcatggataagaagctagaattcaattaaaataacgtatataaccgtgctaagcgcccgacacaacatcttcccaattaggtctcttttgtatggcttactctacttaggcactatatgaattttctcaaccctcggactagctaaagtaagagaaagagcacgaatatataatgataaatttagcttcgttgatttaatgctagcattaattcccgatatccaatgagaaagaagaatagtatttaacaaagacactatacaaaggttctgcggtggcaatttcggattcggattctcatagcacgtagatcactcggtccattggaggggtaggatgtgagtggattttactgtggttgaatgcccatttgagcacacttttactgccttgatgctcggtataccgatcaagtactgtaatggtgcagagggcatgtcagtcgtcgccctcgggggcctctgcctccacgagccatgttcgttgatgatgcaattcatgttttcaatgacttgcaggtttcatagcaagaattgaaatgttaaaatgagattatttcctaaacgaaagtgagggtagataggtcgactaaggtgtagtgtgatatgaaggtcaattgaaacttcatgaaatgagagaactttgatagaagttttcaaatgatcattaaatttggtgtaatgcttgtttataagacaacaacctagacgctgctccttatatccgaggagatccacgctgctaatctttatacgcttcaatcaactgcggtcgcctgttaatctctagatatcctacataggtaggtccctattatgacgtcgaagcaagtcagtatcagccgctcaactcttcagccagctggaaaaggtcattagcacatgcattgaaaatcctgaagatgctgccacggtcactaagtagaagggcgaagtggagctggcggctatgcacgccactcgcagccattttgatgttgtccaatattcgtcatcgaatttcgtattaatagttctatactatttaaaggaaattgtagaagagcctcgctacctacggcccggccgcacgccccgtatttatagttggtgtgcattaatttactagtgtagtaattcattgggctaactgtgcatgttgtcacacatgaggtaaattaaactctgcttacatcccgacattaattgtgtgatacatgactcgctagctgctatctctataccccggcttttacgcgggctcactcaacgagaggtggctttgctatatgtgtctgacccgcaagtcggaagctggagactcggtggtcccatcttctattttgctggagtcttgttgtcttgttgtactgaactatggtatgatccctcacgaaacttcaaaccagccatgtcatgtgctcattgcccaattatcatgccactccgcactaagcgttcaaatcacgcggccagtgatgtagtaagacgaggtgataggcacgtaaaccccgcaagaccaggaaggttctctggttcgggtaggtcattggacaatggtgttggcggtcgtaccatccgggcgtatgtagaatgaattacatcattacaagcattccccgcattctggggtaatatatatatatataaaaggttgacatctctgaattgatttccaggagtctcacttctacaattcttcatcaattatcacaaatacctcacagattttcaatatggataatatggacaagtacaattctcagtgggtctcgttccacattcgggaccacatcaaagatggcgagatcctggtgcaaaacactgtcattgaagggtatctataattacagagatacaatagatctctactaacactcggcagcgccgagttcaccgaccccaacaaccgacgcaagtcgctcactgaagaggaggttgacgagatcaagatctcccacgatggcgttggcgagatcggcgctagcagccgccgtggtagtgagggccgcctggacttatttcatgacaatgacaagatttgtgagctccactgggaaaaccgaggtggagactacgccaacttggtcgaggtgctggacaaaagcgacaagtacaccatccagcatggaggatggagtgctgaggccggtcccctgggacatgtctttgtcgatgtcgtggagaagaagaaataattacgctccacaggctgcaccaactccctacttgggcgttgaagagcaaagagtgcagtccgtggagtatgagtggcaacatttggcagggaaagttggatgtattctaaagtgtcataaacaaacccaaaaccaccaaaaacaatgcaaaactttgaaaaccagtatcaatttttattccatcccaattctaatacataggtgggtgccaatcaagcaatttcaaagagctgcccaccgagccacgcggggtcagacaacttcattgatgccgaacacgagcagtgccttatcgccgaggggctagttttatggttggattttggttggcttgggctctgaatccttgtctgagtagtttggaaacccacaaggtaccataaagaatcaatccttgaacaggcaactaagactcccttccgcgaaccagtccttatcctttttccagccgtggacgatcaaatctcttccgaccttcaccacctcctcaatttgcttttgagttccccatccagggactctacttccccagcaaatcaggtgcacaccaacgtggatcgcagtgcggaaagccatttcatcatcaagggccccgtatccctctaggaatccttgcataatccacagtccaccgtccacgttcttgaacagctttgtttcgtacaactctgcaatcatttggcccaagtccaatgcccggcttccgatatgcgacatttcccaatcgacaatgaacattgtcgtcttggtttgacgagtgagaggctcgtttggaagaagaacactagaaatcacgtcattaacttggctcagttcatgaagtctagatccaatagagcatactttccagtccagaagtcaccgtgaataattccatatccatcatcatgactctgtcgctcaagctccgctgcagcgaggtcgcggaccttctcgaaaatatcacgatcctcctccagaatactggggaagttttcaatcgtgtccatcagcatagtgtagttcacccagaatttcaaatctttcatgaatttgttctcgccgagaagttttgtagattccatttgctgttcatcggccgtccaattgtgaaacaatctcaaccaggatcccagggcaccgcccaaggctcgccctgaggattcggacaagtcatgcgaaacctctgagagcaggaagttcttcaggtcgattgaatttggaagatcttccaaaacctgggtgtctgtctcctgattaaagtctaataagtgcggtgctttgacacttattttgccattcgtatatattgccaggccatcgagggcttgaagaatggcttcctcaaagtgctaatttgagatcagcatagttcgaagcaggctcattcaattaaaagcaactaacgcatctcttgacatcgattttaaaatctgggttagaggccgagtgatccttggtgtgcttgatgacgattgattgtccagttgaggaaagtctacctcgatagacaaagttggctgtgcccccagacaggcgtgtgagcgaggagcatgcgaaaggagtgagggaaagttgctgggcaatttcatcgcgtgtttgatcctcattgatatttgccatgttgtatggcttctttgcgtaagagtaaaagattgcgtgaaggtgaagggttcaagagtgtttccctctaggcttaaaacgcgctagtacgtatatcgtccccgcattttatctccactggcacacccatattccgcttttatcgccacatgtctcccaggcaaagtctcaccttacaaaaatgcgattacagaatattcaccctaaagtgcaggtcaacaggcattctgaatattcccttgttgatgttatggccttgtcacaccaaaatcgtgggctgcatagcatcagcgatgtctatcataaatttcagcctggtcgagaaggataggagagcccagctctaggctggctagattatgctactcaaaatcttggccaacccttctttcgcaagctagctttgctgcctagtcttatatggaagggaaacgggctccagcgttgcttcctatgaatccgagactgtctacctagatctaaaccagggcatacatatatatgtagaagatcaatactactatcgcttaaaaatggttcgaaaactgccagctattgaatccgtcgctttcatattagcgatatggggtaacaacgccggattaccgttaccaccacagttgcaacattggaaggatagtgtggtgaaatctttgtttttatggaagatagaaaccctcctaagcccatgatagctcagtatctaggcacagtaccgaaaacataattaggagggtatttgtcctttatcggaatggttgaagagaatgatgaaaacaagtgcatcaagataataatgctgtctctaaaccgatagcaagtctcgagcaaagtagagtacatgacttaattccatggcataaggtcggaatcctagcgcgacaaaaaaaaaggaaaaaaagaaacactaggcaaaagaacactgtccgaagtcgagatccgctcagtattcatcctcgtagtaatgtctcgaatggctggtatgatgagagtgcccgctatggccgctatgactactatccctcgaatggctccgatggccatgatggtggtggtgacggctccgatgatcaccgtgatcatgcccatgctcatattcactatcaatgtcacgcctcttgtgatccttcactttgttctctatgaagttcccgagtagcgcaccaccaatcgcacccagcaagccatgttccttcttatggccgagataatagcccgccacgccgccagcgatcgagcccccgagcccacggtccataccccggtcagtgtcggtatctgtatcgaagcgctgttcgccactgcgctgtgaatactctggctctgatgcatagacggcgggagggtggggacttgcggagggtgtgtaccgtggttggctggccggatggttattgctagggctcggtgttagtactatagcttttcacagctgggtatgcatcgcccactcactagtattccgcgttcccggggattctgtcttgcgcatgttggtatcctgtcggaaccactggcccaaggtagtctggctgccctgtcggcgtatagcttctttcggtggaggatccatatggatctggcgcaagttggtatggactttgctgtggagcataggcttggtttgggtttggactgggctggtaaggctctgatccggggttctggtatggcccttggtttccgtaaggctgccggtgaccatataccgggtactgaggctgatcctctgggcgatagtagtcaaccccgctcggggtaggcgttgagtgtgagttgtaagtattgtatggatctcccatggtgatgcgatagatatgttaaggaatcctgtcgcgtcaagaacgggaacacaggaaggttcctatatactccgtacctatgtgccgggtttcctttgccccttccgtattagtactcgcccctcccgccgcttttgctcattgagatcatctcaatcgatcaccgagcctgaccggagtgccccgattcgctcattgagcctcttcggagcctccggagcggaacagtaacctaactaaactaccaatacactagccccactgatcaacaatatttcattttgagcatcgcttatgttgtacgaatctgaatggaaagtgagccatttgtaattgaccaatcggttctcagcgtagttcccaagctttcgggctcaggcttaggaagccgtggcactgaagcgttgtcgtcacagattcattattgttgaagagttgtatatgctggtattgttgtcaattagataaatcaatctttggcctctcgcttcctgagctagaaaggcgtttccgtacctagctcctatttgcacaaagatgggggacatgcaactctactatacagatctaatagattgatactgatccgccacgtgacttcaccgagcagctcactgaaattactcggtgagcctgactctgagcgccctgattaaagcggcggcagctaaaacaggaaagtctcaccttgcagagatagatcagacagatgacttgcgggccctatatgtacatgcgtcatggtgcagctgaccaacccacacgaccctcgccgggacttcggaatgcacctgctctccagtcagatactgatcatttgcttatctgtacacatgtatagtttgaggagtgtgccttctaatgttttttttttctcttcccaggggaaatctgttcggcaactgatattgtattgagatacgccagtcgattaaccttgaatgataagatgtgaaagaaataaagctgaacacggatgagtcggggtattccggtaaaaatcgaagaaaaagatggaaagcatggtgtaaatagagctggccgttagacgttcagggtcacatcgctctctggggcgatggaaaaatgcagaacaagagtgcgccaagcagtggcatcaagacacagcacaaaaagtaagaaaaaataagaaaaaaaataagaccggccaaaagtgatgcgcccagcacattcagaaacatcctggccttcatcgccatgcaaggcggactacctatcaacacatggttttggtttcaagagattcatacacacttgattacacttgtggactccgaatgccacgagtcgagctgttactccgctgtgacatccagttcacaagcatctcgtcaagctggttgttcatctccttgagcctcttgctttcctccttgaataggcgaccggtgatggggtggtcagggccagcgggaggtacatttgatttgtcgtggacaataataaacaagtcgcgaatgtcattttcttcgtccatgtaggatcgcagactggagtcgctccacgtcggggtgtccacagaaagggtgtcgactaaagcaggagtagccgtgccacccttggggtaattgacgtcctgtccgggtgatgatggtggagacggtggcgagcgagagcgtacgtctcgaggagagacattgcttgtcgaaccgcgtgcgctcatgggggaataaacctccacgggagaaatattgacaggagactccgactcatctccagccaccagcgtagggacgaatttctgggcggacgctggtccggccgttgtacgacttggatcgttaggtcccctccattgagattcactagatggtcgatcaacgggcgactccatggggtccatggattccagcggagtagcaaagggatccttggaaaaactcgattggctgataggcgattgtaacacaatttcacaatcttcgtaactgctctctctttcttcttgtgacacctgtcgaatgcttttgttgccctggctctggttaatggcctcgttgcccctggcgaactcggccatcgtagggtcaaggacaggatcaaccttcatgattcctcggggctgcttgtgtagcttgttgtttgagaatttctggggcttagagggtcgctgttgttcgggggacatagactttgatgagacagagtccatcgaggtcttgggttggggtgatgtgcgggatgccgactctggagacctctctaggtcgtcaatgtcatctttgctcttcttgcgcttgaataacccgctcagcattccaggttttttgtctttacgcttcttctcctctttgtctttggtcttgtcttgagagttcgagcccttttcgatagattcaaggcttccacgaggcttcaccaaaacgtcagccaaccagtctttggataagcccacaaaggaaacatacctctttccactcagctaatgtgtttgtgctgttttcgtcgcgaatatcgcgcaggagatttggagtgagagaaatcttcttgggctcggccgtgtcgtctttgaagaaggaatcggtgttccgtacagtgccatttctggatctactgacgggggcttctgctttgtaaaagtaagttcagataccgccagagagaagttgagttgagtgtgtttaccttctgcttcgaagaactcttcactagacgggcgtcgatcagagtttgaacgctgcaaatcttgtttctctacaccgttagcatcgacatgctctgtggggttttggttctctttctgggcttttggccgaagaggttccacgacaatatcttcagcttgctcttgcacgtcttcctcttctccgtccagagtctcgtcgtcattgaaaaagtcgccgtgttcggaatcgtcgtccgttgagtagtcgacgtcggaggcatcgatgtacgtcggggctccgaagttgacggtcttcgcattccgacggcgcatggccttcttcagaggattcttcgacttttcgttattgtcacccaacatggtcgcagacaaatccacgtttctgtgtttattcaatctggcaagcctctcggttggtgtttcaatgtgttccgcagggaggtaaccgatgctgccatccttcaccacccgcacaagccaccagtagctgttgctgtcgtcgagaagaaccatagtatcaccctttgcggcattcgcttgcccatcgaccgtcgcgacgaagttatgaagcgcatatacaaactcgaagtcgatatcctctgtataacatcagttaacgcccgattgatgtctatagtccccgagagtccgtaccatcatcgatagagggcgagctggagattttgtccatcatatcatcgtccatcatatcatcgctttcgccgtctgccaggtcgccatcttcattctcgtagtgattttcatcctcatcgtcttcctcgtcgtctgcttcgcgatacgcctccttgtcgctgcggtattcttgatttttgtgcgatccgtcctttaattccgcttgcgaatcttgctcggcatggcgaatagcaagcccttgattgggagcaggccggccgctcccaagaggatctggttgttcgggttgtttggtgtgatctttggcggaaggggtatcgtgatcttgaaggtccaaggtatctagtggcggtcaacaccttcaatttcgaaccaattggcctcgcgctccagaagcatgtgacctaccagctcggatcatctgaggcctagtcatgttgcggtgtaaatgagtgtggtatcaagagcaatgggattggaacaagacgtgagcgcaaggagtgactagcgatccaggaatacggaagtcaagaagacaagcgcgggataaaagcaatgcgcgagccttcaaatttcctgtatccaagtaatccacaaatactagacagtaaaaaaagtcgaccggggtcgcgagcacttggtgagttggtctaaatgagagacagtgccttgaatcagaatagtgggggctggtctgcacttcggtccagcacggaggtcgacacaaggagaaagaaattactgccagagcgacaaggtgggaaaaaaaggcaggaacaaaaaaaaggaacaaaggagatgtctgccaagacgacgttgagtctgaatagcaactcctttcacatctccaaaagccaaaaggaggtattcccaaacaagcgccccttgcgcgcggttaaacccatggcttgacccctgaacccatatgcgggcacgtaatattggccgactggtcagagcttctatggtatactggcctttgtaagtctactagattggagctttttttcaggcaattcaagtatagaataatatgctcttcggcactcgatacagactacacagcactgtgaagaactatcaaagtcgtacggagtacggagtataccatatgtaatcataattaccctgcatgtcgctaattaccgctgtatccctgacacatctagaaaattagggcgtgggatgctctttagtcaggtgatctagaaattatcgccgtcatccgagtttccccggtttttttttcccctctcatttaccagactactccgtacttgacgaatacctcactcgcagtctctctcctactacctttgtctatactcactgtgcttaatctcgatctttttatttgctttctcaagtttaaacccccctcaattacgccttcctttacatcaccactgtatcaaacgttctttccccacttttgacgctatcaccccacaatcataatcatcttgaacgccatcgcgaagcgtaccgaaacaaaaaaagccaagcagagggttatataaccctactgcgagcctatcacgggctgacaataccaacatttcgcctcgttatcctcgttagggcatggcacatagcgagagggccggattggcaagtggattggcaggtttaaggattgaaacgaagtttcatgagcggaacaagtccaaatggacaaatgagaattctgtgaggagagcgacgacggtgggcgacggtatcgagagcgatcacaccaatcaatctcatgattatgcgcgtcgccacgatactgatcaagaccacagtttgttaagtgatctacactcagcgacccctcccatctccgttcctcgtcacgatgcgcagcatcatgcagtcgatgccgatagcttcccgcataaacccgatagtgtgcaagggtctcctctcgacagctatctgcacactcgtcgaccttcgatctctttcaacccgaaggtctctgtggactccggaaaccaaattccactagaagagccactgtcgatgggagatgtgaagaaccgtccaccacaaaaatttgagtctcggagctctggactccgaaatgctctttcacaagatgatgagcatgtcgaagcgagccagtccccgaactggagtcctaaacaatctctggatcggagttctccgaccggggaatcccgaacccaaccctttgctatatctgagaatggctcgaacgcgggctccgagctcgttcgtccgacgtccctgacatcgcagtcgacggtatctccggtcacggacgaggtacggacccctcccgattactccagtcacacgttgctgtcgccattttgcgtgccgtcaccgacgcaattctttgcatcgcctgaagacaacggcagttcttggtcgggaggaatcccaacatccttcggaagcaagcgtagctctaccctcgatcgcagcagcagtcttcggaactccacccggcacagttctcggcgatcgactaactcgggtggcaagtcgcccgccagtatgtttctttccatgtggaacaatgttgaagagcctgctccccagcccgatgacgaaggacagatggttggagacgactatgttctcggaaagcaaatcggatttgggggttttagtgcggtgaaagaagcctataaggccgaaaagaacggtgaaaccaaaagacttgccgtcaagatcgtgaaaaagcagattacagggcgaagcgagcacgaaaacgaccaagtacaagccgagttcgaccacgaagtgcgagtatggcggtacctcaatcacccgcatatattgacgctcgatgccgtatacgaaacagatcacgccacgttttgcttcaccaagcttgctattggtggtactctcttcgatctagtccgccaaaatcgatccggtctagatacacaattagcaaagaaatatgcgtaccaactagcctgtgcaatccgttacctgcacgaagatgcccgcgtggttcaccgagatatcaagctagagaactgcttgctcgatcctgttgagtctgctgacgacacaacatcttcaaacttggtattgtgtgattttggaatggctgaatggatgtccatcgacaatggtggcgactctcccgatccctacgaggatgctgctgaccgtccaccgcctcaacaaatgggccctgccggatccagtaccagtgtggctggtagtctggaatacgcatcgcccgaactgcttcaatcagtaggcggtgttgttcacccttcagtagacatgtgggcctttggcgttatcgtctataccgttattgtcggctcacgacctttccaagactctttcactcctcgcgtccaagcaaatattatcagcggcaactgggatcataatgctgtatacggcgacactgtggacggcccccttcgccaagatcgccagtatgccctcgaattagttcgcggctgccttgaaatggatcccaacaagcgttggactatccgccacgtactagcttcgtcctggctacgagaggttcatgaggcagctgaaccctcacccgatactgtgtggagactatgagcctttgctcatcttttcttcgattcggtgattatgtcctgcccttcactataactcctaaggcaaatgagattgtcttgaaggttttaacttcaaatttctacgctgtgatggctctctcttcaccggcgtggatatttaacaggcgcctttgagatcactatgatacccctccgtttccttctctttgattattttgattatttgctttgcttctgctcaagactgttagcatgtgcctttttttttgcggtttctattatctattttcaatatcccctcgcagcacattcttggttttgatttttggttgaatttggccttggcattacgagacggacgactatgatttattcttatagcatgcgtggtgtttcatattattattatcttttgtcggacgttacatgggcgttcgtcacttcagttctttgctttgtgttgttaacttagcttgatggtttgcttctactgatgtactttatatctgccgatctttgatttaccgatctggctttgtcttctctactcgatttggtgagatatctgtccggctggctggcctgtcctgggttcggaacaagactgatcaagttatgtgttatattttgcaactcgcaagaaaagtcggctgcacatgcggcctctgtccttaaccgcatagcactttgataatctgatctatctggctcaaattacatgatattaagcgtattctatctaaaataacatttcgatatctaaattttgtctcggtgttatagctaggatggtagcatgggaccccccttgtctatgagactagcgccaggaatcagaataacagtacgaactacacaggtatatcgagctttccacaggtgcgatggtagaatctctcaaggtgcagataataaaacggcctttccgtatatatatgtgggcaggcagggatatttatacataaccctcgagatgcttataggtaatgcaactattcaatcttccctagaacgaaaggtcttttggggagtataatagaaagatagggacgagaagcatttcattgccaagcctaacatatccaacagaacatatttatacatatacagcagaccagtctaaaccagccttaaaaaaaaaacaatgccgagcaaacgaacaaaccatcaaacagagatcaagtatgagattctcaccaagccctcaaatctaccaaagcctattctcaggcaagaccttctccttcttaacaccagcagtagacttcctctcctcagaagagcggaagaacagactgggtccctcaagcggcttaagcaggtgggaaagatatccgcgatgcgcaggatcacggtagtactcgatatctttacgcttcgtcggatccggcagtcggtacttcatttgccggttgttgactaccgtactccaggtcatccaggccgccgtagggcgaactttggcgagtttgtagagctgttcggagccgctagcgcgcgcccacgcagcagacaggaagctgtgcgtctcgccgtccaggatgcggcgaatggacggccgcgtgtagtagcgggtagtcactgagccgccggcgccttcgatggctgcgatggcggaggcggagacgcgcgaggcaacgacgtggattggttgtttcaagtcttgggcgccgtcgccgaggatcttgaggccgtcgatgggtcggctgatgcacccgctcttgtagagctccttcaatgtaatcggttgtttagggttgatgcggccttggtcgatccagtattggatacggtcgaggttgacggttgccatgtcgacggagaagctggagccgaggagggagactgattagagatgcactttgggggtttgtggtggttttgacaagggaggatgacttacatgttgacgccgccgcgctcgccgtgcacgatgatatccttggtctgaccaccattgaagcccgctgggactttgccgtgctggccttgacccttgtgaccgcgaccggaggtcttacccttgcctgaagcgggaccgcggcctcgacggatgcgcttgttgtaggcagttgggttgtcggagagggaggctaggatggaagcgttgcggatttgctgggattgggggaggaggaaggcgagtggagaggcattttgaaaggtccgggcggagaattgtgccagctgcgtaggcagccccatcagccggggagacattgtgtgtgaattgggttatagcctcgctggtgttgcattcgcgggttagtggtgagtttcgagatctctgtcggggcgggttatgtttgatccgactccgggatggccctaactaagtacagtatatcagtcgagctgggcaccgccaagccctgtgttgctcgttcggatctttcaagaaagatatcagctttttggataaagaaatagattgggttttttatgttccttttttctaatatatatatcggcatgtattcagacagtcgggtaaatgagtcaatatataacccaaacccttggttatacatctaaatctactatgacgctatgcaatatggtacaatgaaagatagtggttcaagggaaaaaaataccagttggcaaatctaaattcatatgctgcagagctaaagctatgtctgcgaaagtcaaacgccgtatgtatgcagaatgcgataggagcagtacattgccgatgtgctctgaggcacattcgacgggcgaagataaagtcaagaataacgccgcagatgccatccccgagattgattccgtctgcagggaggcgaaaaccgagttccttctaaaatggagcgccgaaaatatgccaaatacaatcgtgaaaatgaggaagtctgtgcagtcgaaaaaggaagacaggcaagagaagagaatagtaaggtgtacagtgaatgagataattttttttctcgtgtgacgggtcgtggcgcggtgaagtcataaacgcaggagatgtggtaaaacggggcacagaatgctttaaccagagtaaccggtgggtgggtagataggatgcaggtaaggagcttggttccacgcgtcaggctggatgtagggcagcaggccggtcttgcgagaggtgttacccttgctaagcggctggtagtgcatatggtcaaacggaacattgcgctgctgctgtagagagcttgacggaggtggaatcagcaaggtgttgacggaacgcactggccggtaaggcgagttgcggttggcgaggaagaaggaaggagagaggtgggtctgcggagtgtgggcggaataggctgaaccaaccggcgagacggtggcagaagacacgccgaatgggctctggtggtgccggccgagttcgggcagagaaggggtggtgtacatgctagattgcatcgggggtacggagagaggaggcatctgctgccaattcgccgggcgattgtagataggaggcatgatggctggaaggtgggagggtgccgtggaaggaagtgtttgaggcgcggggtaggaagttgggaggggaggcggatggtgaggatgcggaagacgagaaacgttcataggtgccaccggggccgaagtgggagtcaagacaggtggcagggtgggcatcgtattcatggcagtcgccgggaccgtcatcgacggagcagatgtggcggaagacggcgcaaaccgcttggtcggctgaagctcatcgttctcatcgcggcttcgtttccgagagcctcccatcgcagcctcactgccgatgtgctgtggcggcaagtatggcaatccattaggtggcatataccaattgggctgcggctgggatcggaaggcatcggtggtaggcgacggcaacttggacggcgactgcgattgcacgcggggaggcgaaacacggaacatggcggctgattcggcgggtagcatcgaggcttggttgaagtagtccccgaagagtcccagcttggtgtgccaccgggaccattcggtctcggaggagaacagatcatagcgaatgttgctcaagaactcgacctccataatgtgaatctcgtgcaccgcaatacccgatacctcagcccacgtcttattggtgtaagtgttatcgtcgaggtctgtggatgagtcagctacgttgtccaatcaaggaaagggcggtgaaactgataagaaccactcacatttattgccgagcatcagcgcaaccgtcatcaaacggaactcgctgcctttcttgcccttgaccccagagttgaatttctttaggcggtaaatgaatagaagggccagtagaatgacgttctggctgacttgcgtcgtggaaagaatcgtggcgacccatttttggaatccgacggtaggtatggcctccgcgaccagggaaggaacgggatgttggcggtcttcgatagcttgcagtttcgaggtcttttcgaaccagaagagacaggtcatctagaaatccagcccgttagcttccacctcacttttgtagacctgggaattctcacctgagccgcaaactcggccagactgcccttgctgttgttgatggatgaggggatgcggagttgcgatccagttgcaccggttgacttcttttgcgccgttggttccgttacgggggcttctttgggcgcggggtgggcttgcggtttcatagccatcatcgagggaatggaatcgaactgcgggcgagtagggccgtataggtgcgagggcaccctgttcggtttccccccatatgcgataggtggcatggcattgtaggtgacgccggtcatatcgtgaggaggggtgggtagaccgttccgaatgggaacagtccgataggatcccgaggtctggctctcaaaagcctttgccggatgatcctcagtcaagtcaatggttggaactcccagtgtcgaagaggaggaatggaagcccagagtggaagacatagggaaagagtggtgagcagagaggtcgacacatggagttttatttcttttatttcttttttttttcccttttgatcaaagcaaagaaaggcgtcggcggatagaaccgaggagtttcagtgatccatgttctcttctatcaaaggtgaaagtagagcgcagacaatcgatgagagtgtccaattggaatgcaatcaaggaggaaagggcgaccggcgatgattccaagtgagggaaaagtgaatatcgaccgttcacagggagtttgaatgatgtatatagagtagccacgataggcccatataaggaaagtagtgataaaccatcagagatctggctactccacttggagatgaggaaagcgaaaaacggcaaaaatacgggaaaatgcaaaagaatccaataaataaaaccaaataataaatgtcaaggcatccgaccccatccggagaaagcgatagtggccatacacagagtttgacccggacgcaggtccaggttgatcctcctttctgggctcgtttgggttccgggtttggacaatctagaattggaaatatataaaataaaagaaaggaacaaggtaaggtaacaagtaacgggtcagtaaccaagtcagaaataataatcagaaataccggttgatgtcagagccacggggtgctaagtggatgcaactaaaaagggtaggtcacagaatgtttacctggtcccggcctcacatttgcagttaaatgacccaagttgactatagcgtaggactagtgaaagcaaaaagagggaaaaaaaagtaaaaaaaaaacaaatgaaaagtaaaaccccaaccaagttgaaatcaaaagagaccatcctgagacccatctcagatccaataataagtcaggtttagcatcaataaattaccaaaccgtgttatgcggaagggctgtgagggtgcgcaagcatgtaggtactgcaaagagaaaaagggctaaggggtggtggttgccgggaagcgcgggggggggccagggaggtttgagcacggtggctggtacattacttgtcgtatactatgggaaaggcaaaggaatgaaccgaaagaaaagaaacggaagagaaaaaaagaaaaagaaaagaaaaagacaccaatgatgagcgagtggaagatcaattacttggttgaggatgaccgaccaaagagagggcagatcgggagtctcggtaagaatggtgcattcttaggtaagaaggcaaaattactgggtattgggccaatcagcacccagagcctcggtattggccggaatggtccactcccagtctcaggccatatttcgctttaatctttttttattttcttttgttaatttatcccgtgtacgaccggtccacggtccagggctttcatcttgctctatcacacttgtgctcgcgtactccccgacttgttagccgccagtcattggttccgtatattatgcccagctttatgggtgagaggtaatttattcgcgtcttttcgtgtcctcaggcttggtcttatcccgtccactgttccggctttcctgtttatgattcagggggatctcatcataattacaggctactatcccaattttgatagttcagcctcgggaggagggcataccggccatcgtctgattcgtccggcttttatgcactggatttccccaaggtatttccctctccaatatacagattggtcaccacatactactccgtacctactttcatatcatgtacaactggtacatcggtatttatctcccgtcaagacgccctggcatataccaccgggactgttggcccccagtgggatgaatgagcggtttcaccctgtttgacctgtccagacggcacaagcttcacgtaaggtggcatgtagttgcacttgtgatccagtgtagggtagaaagctgaaattgcaacgggcccagatcggctggtggaattggaatccatcgctcgtggcgccctaacggtcatcttttcgagaaaacaagccgtgacggcccagagatgtgcacactcctcgcaaactatattgctgcatacaccggtaccatgatgtggaagtatcgtgtctaagtgtctctgtcagcaactcatcctagacacgcaaggcatacctatcgaaccactggaatcttcagaaaccttcatccccatatggtctttgggtggactctcacagagacacttctctatcaccgttcatgtccgaaaccaggttacttgggtaacctccaaacttgcctagggatgatccaattgtgctattttagtggcaaaaccaccaagcgaagtgtccggtcacccaaatcgtggaccttcataaaaaataagttgatcaggtgaattttataaaaaaaaaaattcaaagaaagaaagaaattgcaccctctttctctccactttggtttctgagccaccgccacggaagatgtttcgtttctagaacccccagacagaaggtggattgaacaagggaaagtccactgtgtcataatgctccatcttgttagacgatctatgctgttgtcgatggtttgaaattttctttttcttttcactttggcccagagccgactcctgattggtcaagtgctagagtgcccccgtcttttactattttaggccgtgtgttcgttcactcgtcacagtcatacacaaaagagccctggagccttgggagccagcgtcaaaggttgtttgactcggagctttgcccttttgtttcccccttgatctacattcgcttctgctcttctctttggtgggtcgaaacagaaaaaaaaaaggagtttgctaaaatgaagtctttacccttgccatcccggttgcggtatttcatttcgactgcacaattcccggtagctccacaagctttacctatcgcctttcgcccttcgcgggtgagattcctcggcacagtactacatgcagagttcgcctggccacaggctatttctaacctttcttagtctttaattattgtatagagagagtggggggaaaatatatttaattgcttttttttggaaaatgtcctcccttggaagaagtccggagtatcaccccctgtgtgtatagccaccgtctctttagacaggttgtacctccgaccattggcgcatgcagttggctgcgaccgctatgatcgtgatcttctcggcaatgtcataaattcgaatgtgtatcgtctaccgacatactgagtgtcgacctgatgcacgcggaaccccatcctatcatggaaatcatccgagctcacacctcgaccttaggtccgaggtacttctatcacctaccaatcctaccatgttgtatgtactccgtataatcacggggcacttgggaatatctccgcagcactttgcgcagcactttgcgcagaaccacacttcaatgttgcctcttgattggcgacgactaaatatccagagttttcactttggtagttgcggacagtgtgctccgtacgagaaacccacgcaacctggaatctaaccagggttacggagtaataatggttgggatgtctagtggctgatctaatctcgcaaagctgaagccgatccctttacgttgttgctcctatatcgtatactccctactccgcaaggagtaacttcttctatagtataatgataatccattcaatcaacagatcaccggcttactccgtactcagtctcgactatcacaaccaggatgtgttggctctattaattacgcattaaccctgacaccttccttcatcattacacggcggggcttggattccggtacaagccctctgcgcccggcatcaatttcctctggaattttaaattgcttacaatattgtggcatttaatttccttttctcttccaagtaacctatcttatgcgtcagtcgcaaggccaaaaaaccccccctacactttgtgagaacactcaggatctcaacgccgtgttcaaccaccttgcgcctcttacctagcacggctccttgcatgtctcccatctgtgcctaaagtactgagggcgacggaaatattaaatagcataggaaccctagatcattgcctcgatatcacataaccacacatgtagtattctggttcctctatcggtgcatacactatctgggattttctccgctctcgtaaccttgtaatacgcaggttacaattatctatgtcgcggattatcggtttgatgcgctgcttcgtatacattctgttttcgatttcaatagcataaggctgctgcaattaatcttctcttcctggcgtcatttgacccactcccgggatgaaggacacggcatgcaaacatctttaaactcttagagtaatccttactagacccaacaaccggggtggaagttggtggaattaattggagactcgaaattacagatccggtcgggacccataatgtatagattgtcgctacgagtaaaacgttaatattacctagatgctttctatatgacgtcggcatccgcagtacaacgttctatacggggtatattggatgtgatatacagtatgtatatcctgaagttgtcctgtgggtgactacggagtacttggcacccatatccatgggtaattctagcgctgcagtcttacgatgatcacacccattgaccctgcacgccaccccagagggttgcctcttccctttagtctcttccgagtagtcaccgacagaccgccgcaacccgacctcgacccccggaagtgcacaatttgtcaagggcaaagacaagggcaaatgcaaatgcaaatgagctcgggcacggccgtgtgacagaacggggtcatctcgaactatcagttgatgtttttttttttttttgaggctgatctcggactcgagactctgtgcttcaccaccccgcgcacaggggccaaccgccagagatactccatagagggggcgagcccacacaatccacacagcccacatgctcgcaaagtttcagaggcatagcaagttgaggggcaataataatcgaccggttctttttttagctttttgactttgtgcttgaccaagacttatctcacaatttgtctggattgtgcaaagcgccccgagcaccaagcaaagtgctaattccgagactaacagggtactaacaggatcttgaatcttgcctttttcaaagactctgcttccgcccgtgatttgactttggcggattcgagaatatattccctcaatggagccttggctaatcgatactctttttgcccccgctcgggtggcttatagttgatcaacgatcaatgcggtgacggtgtacggagtagaatctgaggttatgtgatctctgatatggtctagactgcaacatatgtactgtagtcagattcgcatccataatatactcggcacacaaactgtgggggaggacgtattacgcagcctttgtctcagtcgctttcaacgtctaagattagttttccaggcttaataatgcaagacacttggggcttgggagtctagagcgatgataatatcaagtcacgactcgacgatcccagtcggaacgcactgcaccggcatccgatgccaggaaataaattcttctgccttaacattttacttagctttgaatggtggagcagtcaacgcgtactccatacacattctggcttgcacctttcttgctaccgagtaccatagtccaaagtgtacacaagatcgcatattccgtctcatccgggagccacttcttttcacttttttgttctttttttattcgaagataaaccaaaataaataacagtgtagtaaaggctgtcctgtgggaaataactcctctgccccggtccaagacgtgttgcaatgccaggtacagtcccgaggcgagctgggcatgtttccaatctgcagccagtagcactgtactccgtactcttctgtacattgtatatgcgaaatacagatatgcaataataccagtgccagtatgaaattcaaaagagaaaaaaaagcacggatatacggcaaaagaaaccctccaatctcgggaaacttcacattgtcacttttcgattttatgtggatcagcggactgccttcgcctgcacggcacccggtgggtgaacagcacatatgtcacagtcatcgacatctcacagatcgaatcactgtcgtttgagataaccgacctaatgacctagactcaatcgcgtttcaattcaatcatcattcaattgcatctccagatctatatcgcttggaactaaatctttgacctctcggagttggtggacgacggcttggtcatttcaaggtctccggggcagacatggtcatagctatgaccaggaacacaggccagtggcgggtttgtgcttttggcgtaaccgccctctcacccttcgtgttcttttcaatcttttcttctctttggcaatcgcggattgaggccgatcaacttccaatgtttctttgttggccctcgaaataatcgggtttattcaatcgtgctatttctgaaaccgaacagggctttactggtctgatcatttctttgaccttagtgggttactggttgtgcgtcgcgggtgacagactgctcacagttttgccttgggtttctttcttttcgtttgcctggatcggaatcgactaacctggatgggatgcaccatggcatgcggttgattcttcgtttctgatttaggattccgaacacaatatgccaactaaaaaaatgcaagccgactaaactcatgcaagttgcatatcggtctagccttgcttcgggaattcaaggagtcagattaaccccggattaaccgatgcattcgccattgaattgcatgtctattcatttgcagcacgtaaactgattcctccgaggagactaattgcgatgtctaattctggcctggaagatatcttctgcgttattgtttcgatcataatgccacaacagttcattcgagaagaatcaagcaagagacttgaggtttcataggtaagcattttcgaagcggattacatggccattattgagagtctgtcttgtattttttggtaattcgagcaatggtctatctactccctatcctcttatcagacatttcagaccactgatctgtgaaaaggaataattgatcatacccgttgatatcaccctgatctcattaacattctagtctgatgccttgccttttcaaacccgaaggctctgtgtgtacagactcaagacaggaagcaatacgccatcaaccaagtgcatccaatcactcacaggaccaaccagttcatgttgatgagagcaagcaaggcggaaaacaatccaatagacaaggcgaactcccaacggaatagtaccgcactctacatgacacatttcgctcggagatgcagacacgaagccatagcagcacctccgacatcataattcggcctcgtcatggccataatggaacctcgcctttcccggatccgaactatctcatgaagcgactggccaaatttccacctcacagtgcggctatatgtacatttcccccgtaacacagacaaacgaaacccgaagcataagcgatgtcaaacccagccagacagagccaatggaacaaaaggaagtacagctcaagatattctataccacaccaatctaagccgcatcttgcatagccgtacctccaatgaagatatgatacctcgtgacacggagaccccgatatactcaaccaacccagatgcgattcagatggccgcgtaggcggggcaaataattagctgaagggtgatattatgctcatacccgcgtaagagcacacttgtacacttgtcaagcaggggttgggcctactcaatagacagactcgccagttgcaggctcccagcactgcttacttgcatacggataggcggacatttgttaacgccgttatgtttggaatttgtccgggctatcactcgtagatacatgtagaattggtatctaggctctgctattacgggttgtgatgcagtaggattggatgtgttattcttctttctagtttggtagattgcttatcttcgtgttatataagagagtgtggggtcctcgttggattatatatcatgctacatgtatcttattataagctctttgcaattggatataatattatcttgttctagtcgcaaatttagcattgctcctaatgtccgagtgtctgtcacatcggattatgatgtctcggttgatattctagcttatacgtaagtttttttgacgctctaggaagccgaagtcatatagctgcatttgatatgccacagaatcaatggacgaccctcgccctttcggtgatatgagcataaacgaaaattttatttatgcaatattggatagactaatgaaaagaaatctcttaggtttatatcacatttgcagatatccacattttttcttggttttacttatacttgcatctgaagcgctgagacctccactcctagcagattttcttctatgatgcgtcatatcggagcgggtatcaagtctccacaattagcgggtaatagagggcgaaaatgtgtcggacacccaacaagaactccgactgacacgagaaagaccgggagcgctgccgattgctcacatcagacgtgcgattaagctcccagagacaatgataggccgacccgggccgacgtttcctacgatatgcacggagtaactaggtcgatagtcagaccatcgggatttgtaaggctatagatgggagaaaccgggccagttatgaaagtggagcttcgaacttccccggattttgtcaaatatagctttggcgcgggaaacgttagagaatagcgtatttatgtggaacatagacgtgcgtataaagagagtccgtcggtatgcgggtaataccggttgagcgtcggagaatatcgtaggtcttgggaattggggggcgggggaggaaaggggaatatcgttcagcaaggtgagggatcagttcgaatatcatcaattcgaccttgagaaagagcgtggaagcgtggaagccaaagtcgtagcataattttaccccaaagaagaccccgaccgaccgagtttgaagatcgccggttaattttctcctcaccgggaaattgcttgtcccctcagttctccaattttagtatttcttgtcctttttagggaggtttaggcggttattcgagcttggacaggaaataagtacaagtttcaatggacgttatgagcttagatcttagagcagcctaactatccccgtaaatagcaggtgaatcatcgcagtggcagaaaaaaaaaagaggaaaatgtacccagtacctctgcttgctgcaggaagcacgcaatgggggaagtaccaggtacacagctatcccctttggtccggctacaccgattcgcctaaagcagcagcccaacaatggagcttatcaaagcttttttcttcccttcttaaattattgtgtcacccttgattttcatcctatttgtatttcctttactacatttggtgcgccctttcacaatggctggcagcacgctagcaattcgcaagatggctccgtccatgcagctgtcgtccatgacgcgcagatcgatgtccacgcagctggcccttcgcgcaaagccgatgcggtcgaccaaacttatccagtctgtgtcgcgcatcactcgtcgtggctacgccgatgctgcctcgaagcctaccccttcacccgccccgaagcctaagaagcgtttcagagctctgcgttgggcctggcggttgacttggctctccgccatcggtctaaccggtgctgtcgcatacagcatcttcgacctccgccaacccccggaccaggcccctcctgacccatcaaagaagactctggtcattcttggtatgtatcggtcgcgattgtacccctacagccgacgtgtcgctaacgcgactgtgctcgttcaggaactggctggggctccgtttccctcctgaagaagcttgacaccgagaactacaatgttatcgtcgtctctccccgtaattacttcctcttcactcccttgctgccctcatgtaccaccggtttgattgagcaccgctcgatcatggagcctattcgaaatatcctgcgccacaagaaggccagtgttcagttctacgaggccgaggcaaccaagatcgactacgagaagcggattgtgtatatcagtgatgattcggaagttaagggtgatatctcgcacaccgaagttcccttcgacatgctcgtgatcggtgttggcgccgagaacgcgactttcggtaggattcactctcgcatctgaaacgatgcattttggactaatatcgtaacctataggtattcccggtgttcgtgagaactcctgcttcctgaaggaagttggtgatgcccaaaaaattcgtaagcgtattatggactgtatcgagactgcctgtttcaaggatcagaccgaggacgaggtcaagcgtctgctgcacatggttgtggtgggcggtggccccactggtgttgaattcgccggtgaactccaggacttcttcaatgatgacttgaggaagtggattcccgaaatcaaggacaacttccacgtcactctcgtcgaggctctacccaatgttctgcccatgttctcaaagcaactgattgactataccgaatccaccttcaaggaggaggagatctccatccgcaccaagaccatggtgaagcaggttaccgacaagtacatccaggccgaggtgaccaggcccgacggtaccaaggaacttgagactatcccttacggtcttctcgtctgggccaccggtaatgctatccgcagcgtcgtccgcgacctcatgtcccagatccctgctcaggccgagtcccgccgcggtctcgctgtcaacgaatacctcgtcgtgaacggtaccgacaatgtctgggccgtcggcgactgcgccattgccaactacgccccgaccgcccaggttgccggccaggaaggtgctttcttgggccgcctcttcaacaccatggccaagaccgaggctctccagcaagagttggagaccctgtcagagcgccagtcccacgccaagggcgacgaggagcgcaacctgattttcgacgagatccgtgagcgccagaagcagctccgccgcaacaagcagatcggtcccttccagtactcgcaccagggctccttggcctacatcggtaaggagcgtgccgtggccgatatcagctggctgagcggcaacatcgccagcggtggtactatgacctacctgttctggcgcagtgcctacctgagcatgtgcttcagcagtaagttctaagctctatccaacactgattgaaagtcatcattaacatataatctagctcgcaaccgtgtccttgtctgcctcgactgggtcaaggctcgtctctttggtcgtgatgtctcgcgggagtagacatatccacccggctctgatgaccttctgtaatcttgccaatcccactacattttccttttggatattcaatgccttccctgacacattgactgtgtaatgtgtcccgctacgccccccttatgccatccccaaccatccttctctttatttctctttgcacctgtgaccgtgataaacatattcatttccctttttttctcatgactcactgttggtgctgcgattggttccgcccagagacaaaagcattaattcgcatcttctttgtttcactttgggtttcttttcagactgtactgtacgctataggaatatatagactgggtttggggttgttgtatcaaacctgtcatttccatctgtgtattatctttcttccttgcacagtgtggtatcacactgcgtgcttggactctacctcttgctcgctgaacgaaattccttttattctgcgggtcaatatcacagatctggctcattgtcagccggaggaaggtatccgtcgccgttttgtactctcttgctctgcacgcgcacttccaagcttcgcacctccttgtgtcttctcagcccatagcccttaccaagattgacatctcccaccggcgatcgaagtcctcataccaagtcccacgcccaagtattctcgccgaattgcggccaaagataggcttcagtttatgacgagttagcttgatgacagtttttaggaggaggcctcatacattcatgtgtaggtcttatacttgccggccaaactctagtgtagctaggatttttacaaatcaagaatgaagaaaggaatagattatcaaccttgcgatgaatggtctatatatacattgacttcaaagcagttagagatacatactcccaagaggaataggggaagaagacggctaaacaggataaagaaagcgatgagaacactagcagaggtatcgaaactccagatcgagaagaaaaaaagagtgtttcgcacaggcagtaagggagaagagtcaaaaagcccaaacatcatatcttctagaaaaggttccaacggccccgcggttcctttccaggaggcgtacgatctgatttccgagcgcggccgtcaagctgtcggatgccttcgatcttctgcagagccagctccagcagctcctttttgcggatgatgtccaggtgacggcggatgcggggatcctcgcgggcaaaccgctcgacctcggcatctgaaagttgtcgtccaagccttgaatcaagctcacgcgggaaattatagtaaaactcagataggagctcgacgttgaggaatagcacggccgtggatgtaagtttatctgccacaacatctaggaacacctctgggcaatagtacttgttcttctgtgttgcgcattgcttggaccggacagcgagaagtctcatcttgataagatccgctcggtctcggaggaagagaccttctcgtcctagataatacatgtcagtgtctgtaaataaacgaaggagagaaataccaacctctcgccaacaaggcagcactgaagccacccgcaccgccttcgccgttgccctctagtactacttcgccctttcgcactcggtcgataaacgcgacaacgtcttggagttttcgctttccaaccgtgtcttccacatgcttcagggccgactcgcacgatttgagctcttcctttagaactttgcccgcgttatctctgcctttagcccattcaggatcttcgatctcaatctcaaatttatatggcttgatgcaattttcgacttgatcgctggtgctgaaaaacttgtcattcaaaataccggtgcatgcatcggtgatctgtttgcgggcaccagggtgggaggcgaacgtagaggaggctaaaagcgagtccacatgattgttgagggcattggcgacaactgtcgtagccaaccgaccaattccaagctttgttaatgaagaagtagaagcatcaagcttccggtgccaatatagggactcagcatcggcttttggaagatccttgagaggatctaattccagcagcggaggatctaagtcctcgactggcttgttccagtaacgctgtgccagaatgtccatgactcgctgatccaactctgccttaagcatctcccgaacctgcggtcgcccgaaactttccgcgaatgccttgaaggagtgcttgaaagcatcgaggctctcagccaagtgggactccgcgctcaaaggccgatcattatattgaaccttgaactcataggttgtctcttcaagctcttggctaatggcgtctctggttccagacaggctagatgacatggtctgctcaagaacctgcatcagtgttttccgtaatgtcgaaacaccgactgagacgtcagagtggggaccgaattcattttgatgcgcagagaagtaggcatgttcatttttgagaatggcgctagtaatgtttccagggcctctagaaaagagagctgttgtttgaggaatcctggtaacaacacccacgtaacctagccggagggggtattttttatcggaaaggacatcgtggccacgttcggggctgacaaggtccatcttcgtaatcacaccgatagtccgttcaccccgagggtctactcgacgactggctcgaagtgctgtcgagttcgctaggtcaacgtcggcagccgagatcgccaaaatgacatttggtggctgaatgtacctatcgcaaagatcaacaatcttttgcttgagctctgggggctgatctcggcccgcaacctgaatatatccgggcaggtcgatcaaagacagatccggaacattgggagaatatatcgtaagctgaatgggatcgtctgtgacacaatccttttcgggaacggcaaggttcaggtccgtgagtgtgcgctgaacttgagaaaaatccgtgatctttccgagacccagagccgggaattcaccatattctgcctgggcgttaggggtgttgaccaatgtgagctcgattggccgccgggtcaccatgttcgagcccttgggcaagaactcatggccgacgatagcctcaagaacagaacttttgcccgacgattgggatccaatcacgacaatcgacggaagagtgagcgtgccggactggccgatggtctggagaatattccggatttcaatcattttgcgtgtgagcagcatcatttggtcatcctccgcaacatctctctccggtcgcaaatctccctcccccgattgagcgtatccaaatgccgcagtagtagcagcggcggcggcagcagtaccagcccgactttgtttcggctctttgcctccaccaccagacgagtcaccatttctcgactcggactcctcgtcgaaacgtaggaccttctgcagccagtcaggcatttcgatgtttccggtcgtcttattccacccgcgttgtgtctgatcagccatgccctgtagcccttggaacaaggtcgaagctgtattccccgctgtgtccgaggcttgcctgaagacatccatcacatagttaccggcctctggaagattgaatcagcctgagcttctgcttgcagtgagcttgatacacgagatacatacgagttgcttggtattgaaaataagctagacccgcgattgttgcaccgccgaacatagccggaatcctgaaaagcttcaatgcaagcttcggaagcattcgagcaaatgagattgatcgaacagcagggacattgtggatggcatttgcacccactggccatgctcgtcctctgagagcagcgccaccatctgcgcgtagcaggcctccggtcctcgagcctgcattatggatatggcgagctagttgaccgttccgcaagagcggtcctagccgatgggagagtatcctcccactcattattgttgtaatatcattcaatagaaaatggatatgaaagtgatggccttaccggatcactgcacatgtgacatcaagcctaacttacagtccccgtgacctgcgcaagtagccgcgtagcttcccgtagcttccagtaataccaccgtcacgtgaaatatgacgtgctgtgcaagggaagtgagtttgctcttttgtgttgatttgataaaaacaatctttcctcttcgtgatctctagcaaaaataaagctcaaatatcttgcttttttggctgtaagatcgcgggtgacgtttgggcatctcaccggttcccaacagtcggtgactcttcttccgccccgaccctcctcatacatcctttgacaccagtacggccttgttcagactacaaatttggcttacaccttgaagctactagtaaatttggaagtggaatttgatacagtgtcatttccaccgcattgaatccaggccaaacatgtgtcgattcctggtaaggtccatccctccaagcattgggcccgaagctaatatctcgattagatttacaaagggcgaaatgagatccgtctcagtaagctgataaccgagccaagtcattcaatcctcactcaatcatatgattcacgcctgagactggtaagtacccacataattagcatatcgcaacacgctgacatgtaatatcaaggacaatcgccgtcctgtcaacggtgacgggtttggtgtgggcttctacacagaccccaagcttggaccagaaccttgcatctttacttcaacactgccggcctggaattgtgagaatctagagcgactcgcttccaaaacatgctcaaacctgatttttgcgcatgtacgcgcaacaaccgagggttctcttgccgaaaacaattgccacccgttccagcaccagtccttgatgtggatgcacaatggcggtatcggtgggtggagctacatcaagcgtacgctgggaagctcactcgccgacaagtggtacctgggtgtgaaaggtggcaccgacagtgagtgggcattcgccctcttccttgacttgcttgaaaaggaaggagtggatccaagctctgaccccggccctgagggattcgggcaggctctcctacgtcgtgttttgatgaagaccattgccagaatcaatgaaatggtcaaagaaattccaaagaaatataatgtcaccggagtggagactcggagtttgttgaactttgctgtgaccgatggccatactgttgtttgcactcgatacatcagcagcaaaacagatgagcctgccagcttgtatttctcttctggtactaagtggaaggaaggtgaaacgaaaggacacttcaagatggagcgacacgataaaggtgctgatattgtcctcgtggctagtgagccaatcacatttgaacgacgtgagaaccctttctctctctctatgcctatgaacatatgctaattttatacgtagacaattgggtgtcagtcccaacaaattcagttgtcacaattcacaagcagactgttatgcttcacccaattcttgatgaattctatggcgaaaacctcaaccacgaccgatcttcctgctttgctgtatccaagggacttgttagcaccgctcctgggacaaccgttcgaccaacgaatacgcaggagtcttgcgccccttcagcaacttgcaatgctatcggaaacaccaacagtggtatggaaagcttacgatctggtcatgttaccgaatgtgccgtgtcgtactaaattcggcatcgagccgatcattcttggagtctactgtgaggttcagccagagacttcaaagcactgtcttaatatggcgttggaaagatgaatatgccgggatatctgagtcaaattggagtttatgagttggaatgtaagcgtttggggttgtgtggtctttcgggttatataatttgcagaattcgaatgtaaaatgaatgtcaaattgaatttggagaagtattaactactcagccaagagtagaccacatggtattcatacaattggaactctgaatccatgattccggtttgtttgtatatatataacacccggtcacgtggttacgtatcatgacgtaacttaaaatcaaagtccacaggtggacctaactaactagtcaggaagaccgagtcaggcatcatctgcttggttaaattactccctaactctctatgtctatttcatgaacatggttgtctgagaatcttaaaatgaggaagactttactactcgtctttattcacggtttcaaggtatgcaaaatgcctgcttgttgaagacctggtccccgcaaagaattacagatttcagcccaacaagatttgtttttttgacctagaacttacgttgactgataaaatccaattctagggcggcgatgatacttttggcacgttccctgagtatttgcgcgttttcgcaagcagagcacttcctgcggtcgaggtcgccactgctgtctaccccaagtatgagactaaaggtgacttgaaagagtgcgtggcaagattgcgagattggtaagactatgctcagctcctcttgtgaacacatacaggttttacttacgacgatatctcttctgtgtaggttacaagatactgtgattgatcttgaagtagccagccatacggcatcacccaccgttgatccctcggtccatgtcgttctgatcggtcactcaatgggaggaatagtaggagcagatgttctccttttgctagcagcggaacaaccaattcctcgaaatacgcagccagggttaaatggcatcgaatctatcgtggaaccgggtactttcatgttccctcatatacaaggagtgcttgcatttgataccccattcttgggcatagcgccaggagttctgtcatatggcgcagaaggacactatcgtactgctgcaaccgcctacaataccttctccgaggtagcaggtctgttcggttacggtgggaacaatgcatcaaaccaggggaccacccatgcatccccgaaagagtcccccaaaatgtcgccttccacacccgacgccgccgcgacaccttcctggcaacgatggggtaaatatgccatgttcgctggcgcggctggtgctgttgccgctggcggcgcagccttatatacgcaacgccagaagctcactgacgggtttggatgggtatcatcgcacctcgagtttgttggttgtctcgcgcgcacgtcggaattgcacgagcgtctcctgcgattgtcaagtctcaaggaggaacgtggcatcggatgtgtgaacttctacacatgcctcggaaaaaatgcgactagtcttgtggaaaaaacatcagcaaacaaaacatccttcagccagaaaatcattaggtcgaggaacaggaccttctgttcattgccagcagaggtggaacgtggcgagggatctcaaagtccaggacttttgtggaccagggcagttaatgaccaggctactgacgaaacaaacgcacatattaccatgtttctgtccaaagagaatcctgcattttttgaaatgctcagggaagcgtgtgcggtcttggtcaagtcgatagacaaaggctggtatgattcgtccaccgaaccgcccaagaaagacgatatcaagcaaccacatgcaacagagggcacaaaaaccaaaacagacggggacttcatggatggcgatgacgttgttgtcgttgactgagatctgagatctgagatcgcaaactctaattcgacccacaaatcccccagttttcgttaccatagacgttctacaagaactctactccgtacctatcggacttcccctggtcggcataccacttacttagacttcgcgtgcactgcaccctagcgcacagcgaactacatgcaaaagattcgatcaccatatcgagatttacctccacaggcaaaactcgcaatgggccttgatcgtcgcgcaaagtccagaacaaggcggtgcggtcgtattcactccgcttcgactttctgagcagtcatacccgaagttttctcagtggacgttttcttcgtttgggaacatggcagtgctgatcctgtgtcctacttgttccactctctgaacgattgtctgcctactccgaagcgatcacacccttgaactggtatgacgtggtcccgagatgttggggatttgcccgggccgttttgcattattataacgcatggtaacacttcaaagttttctcttgcgattcacattagtctatagcttcttgttatgtagcctatccctgagggtctgacgcctagacggtttgctgaggggtgatggacgtcaacttctttccaaacaaacttgtcgctaggtcgaaatagaactctcaattctcgtatattgtttcaatcactagtggtaaattgcgtacagttttctctatgccaacacttgatcggaagagcaaaaagcaaaaatatcttccttttattgtacccctacgataattgataatcatccatgtaattagtatatgacgatgtaacttatacccttgctagaaagaatgccctagcgcgccgatatggtggaagcatttggatagccgcgaaaaaatatataaatgagatatcatgaagtcaatagtcacatatacagcgcttgaatgaaagaagaaaggagcgatgaaaacaagaaagaaaaacacaaggaggtaaggaagaagggtcaataattatgatgaccgtacgttgaagagcgatggtggtacaggctgcccgcatactcggagttattgtcggggtagaccgtagctcggcgctcttcctcggatagaagttccttaacctcccaagtgtttggcttgacaccgacggagaattccagatcctccttggtaatcgagtcccaaaactaaagaaagttagcaggaccaacgccataggcgtgaaacgtgaacttaccttgtagaccatcatgactgcgaggagattgcagaatgtagcaaagaaaaggccgtccaagtaatgctgcacgttgttgcagataacgtcactgaatgcatacaatataacctggccaatgatgaagacgaacacgccgaacgagatatggcctagtggccagcggtcatccaatgtgttcgcaactaggagcaattgcatgatcaaatacacagcgatggagatggcgttcagcaagtagagcaccacgaacaagccagtggtattcttgggacccatcgaaccccatgacttgaaagtcgccagcgaaatcagaaacgaaagagcgaacatcgctgcggaggggactcggatcaaccaaacggagagggctgtgccgtcttcgtacagctgaaagccgacgaacccgttgacgagaagacaggtgcatagcgcggatatcaaaccgttctgaacagccacgaagtacgggaacgggccacttcctggaggaacgacacctgcatcaataagaagcgagaaaagtgtcagagctaggtagatgtagaagaaggtgacgatctctttacggcctatttgtagtgaaaatgtcagctagtttgcgccgaatgtgagtgaggaggatgccagacgaaccgacggcagtaaacttagatcgaacgtgcaaaatcatgatcactgtcatgctaagcgccatgatatgcataaaggacgcggcgccctcgaatataatggtattcgcaacctcaatattccgcgcatagcagttagatatgatgccagttgacccggaaattgtcgatgccgggcccaccaaggagcacaaaggcacgggcgccttctcgcatatcgtgtcgaactgaccgaaccccatgatgtctggtcactaggatattgagtagtgcgacaacaaacagttcaagttccagtcgcggcgggtcacgaatgttgagtggacggtctccacaacgacgggggtgggatggtggaggagatgacggtatgtgcctcggtccccaataacagcgtggctctttctgcaccccagctgcactatttaaatcggctgatgcccgctgacagccaatgtcgaaggtcagatcacccctgtgtgaatcgttgatgcgaggggaagtgtctcagttttcgctttcaagatcacgggattggaatcgcctttgtaggtttagcgtcgttgctagggtggccccggggcggaacctggcttagtcattcggagatcggaaacgctagatccaaaatggaatagctcgaagagatctcatgtgactcgggtccgaactcggcccaagccgaactaccacgctagttatgtcaattatacattaaggggtcagggcacaataacacaccatccaacccaatttagaaagtcgactagggaccgttgggactatccgcatactgcaagctatcttatctactttttcggtctccacaagccgttggacttatgtgatcaagacgatttggtgctggtcatgattattggactgtagtctacggagtcaaagttggggttagatggggtttgtattgggcagttcacctttttcctttctctttctcttgttattgaattagacttcctctgtatgtggactgacctcttgtctccacacgaccctacaactggggcattgtcgcaccatcgtctactttgagactagggtttaccaatccgaggcctcacagtcatctgttcgccagaccagctcccagttaggtgattgtctctatgaatggatacaacgacgcaatcctgcagatgggatggcttgatcttgatccgagtgaatggtacattttgccacggacaaatatcgcctatgcagattgcctgataatcggcttccgagtcttcggaagcgattaaaatgaaaggtatccattgcatcaggtttcatctatagggcatgggttgagatcaagtaaccttgtatcgatcccccttttcttttgacttttgaattctagcgtatagatgtcataatgcggcggaaagccgttttctatataagctccccgatctttttgatgccatcaacgctactacactgatttgtcaatctgcttagaacactttatagcattcctcaggtgttttgtttcatgtataccactcatagtctgattgtcgaacagtctttgcaacattatatgactatcaaatgtgggtaagtcccgtcgatcctcatgtggcacagaggctcagacgcaaagctccctttttgataagaaataaacaaagaaaataaattatcggagcttatcaccggctccgactgcccaactcgtcctttctccggttttccaacaggcccaatcttgcacaatgttatactatcgacaccagactatctcccaacaagagaaatcctccgtgttcgcctgacccctggctagagagaaaaaaaaaccagaataagcagtgccaaggtgtttgacaatttggcttaaggtctcgagatttaagagactgccgaagatatttgtctcatgcatgaagatcccgactagcgccacgtgtgaatttaagaagcatcaacggctgcgaggaaccgtgtcgatctcccatctacccgatatttgcgatgttcgttctcgcttcctgacagtcccctaaacagaatattaaaaggaaaccaaaacaaagcaaaaacgctagaagaattcctctcaacggtcatacaagttaaagcctctctttatgcaggacccgctttcttgacaagggttttagggggtggagatggtggagagaatgccgtgcagtactcagtactgtatactacatctttacccatcctttagggatcgaaggtaaatttcgtttgaatatcttgggttttccattaattttatttaattttcggatttttatccttttactttattttattttatcctgtttatttattgccatgcccttgggcgtcatgacatccaccctccaaagcaaactagtgactcttatatctagtcgagcctccatctatatttttccgatttcctacaccttcaagattgatatctcatccctcacagttcaatctattacacagtgttgattcttttcattccatttactatctccccggtcatacttccatcgcagctggccagtttcacagatcaaaacccccctcgatgggatcgaaatgtgcaactttttcaaaaacttttacatatattccacttgctccaatcctgccgcccacttcctccgcaccgaaatggaggggacaaaagacaatagcacttgcaaagacagtccacacgaccgattcattgtggtggtgggcaaatgtgtactctgctcgtctgctcgatgattgcctaccatcattcgatacttcgggcctcagggtactcgaaataaaaatttcacctctgaaactcggtcaagggcattttctaaagtttaccatcccgcttcctcctgtccgtggtccttggcatgcaagactccatccaggaactatgtattcggggagagccgaccctccaccgataaacgcggctttctgaaaaacattcaacccttctctacgtgactatgatcgacaaatttataaaattcggcttctttgatttggatttgtggggcaaaccgtgccggtttaaactttgcttcgcggtcgacgcgttctccgatactttgtattattggcttttgaagcgttcatgtcgtcccgtttcattgtatctctttttccctattgtctttgttagcgtctggtaccttgtttgggagtctggtgggtttcatatatgaaacttagacgagtgaaccttctgatttttcaggctttgattccccgatttggagggtttgccctaactatggttcacttcaatgccttggtatgatccgagagctctttgcttctaatggacagggagctggaaaaaaatgtattgtacaagtactcaaccaattttcaattggtccctaaatcacatgcttgttggaatgctcatgcacgcggaacggatatattttctgcgacttctctgactggttcccaacaacgttcgggcccaaccgctcacagataggtaatgcaatccgttcaatctaactctctaggggccacatgcgcgacgtggttgatctctcttccatcacattccgccatgtctaggccaggggcaaaagggggtgtcctaacacagtgcggaaagacaaccgcgcacaagtaaaatgacaacaaccaagtgactagagagagattaaggtacctatgccgtaaaatgagcatcgaatggaggactcctatagttcctgtagtagggtcactatctacgaattccccctcgagcagcttcggctggtccgcttacacaagggttgaattttctccccgatcgagtccgtgcttttccatgataggatggacggaaacatgaaggattggaatcaggttttcccatctgttgagccatactacagggcatcatccatggaactagggacacccaacacagagcgaagaccacgcaatctctgcttcggaagtaccgattgaagaagtagagattagatatagtacacagccctccccttgcagggatgttatagtctcgttctagccatttgtgttctttgcctaagttagcttactcttgtcatttatacttgcgtcaatttcaccatactttcgccttacagccccgttattttcccccctggaactatattataagtccatgcacgatgccacgtgtaatctttgtaagggacctggggcaagggttaaatataggtagaggggtgaacattcataccccaagaccccaagaccccgagaagctattggctcgttctccctgggaaacacatccatgggcacataagagcttggggctttcgtacccgaataacccgaggtgtggatccacggctgatagatgcccttccgaaacagccttgggggggaccggcggtccacgcgtccgtccacgggtggtgtagctgaatcagtggagtgaaactaggatgcatccatggatcgtctattgcaattatttggaaccccacggagtaatttcctggtcgaactacggagtaaatatacggagtagtactccgtactccgtagtacaattgaattcatcgagaaagccctggaatctgctcaggtgaaaatgtgctcagtctgtttcacacgtgcatatttcccaaattctctttcctattagcgctagttcgagattttccggaaatgaaccgactattagagtttccgttggctttttttttttctctcttccacgctaagactgcggattcctctatctggactgtgttctgctaggccactgcgttgtcctgtaatccatacatacaatatgtattaactatttgcttggcttccgtcaattaacacagaaaatagctaaggcgttggcggtgaatgagcttgtgcgccgtccgtgcaataataagctgtgataccaatatcattgcgtatatagggaggagtacaacgtaatttatacactcacagaaagccaagtcttgttatttgttgtaccacccctgaagattatagttaggaactatgccgacggctgaatcgggtaagtggcacggataatgatctatggatcaaggtcaaggtggtttgtatacaatctacttcatatttattccctttttttgtcagggtttttttattcgccgagcctataatttatattacggctctatccctaattcaaaattaaaggtatgatgtacacggtccctcaaaagaccaatgtctagaacgttatgctcaacgcctttctgctaggctaacgtggcttgctttttcacatgttcatgaatactaaacaccaattgattaccatagcttaatagttcaacaaccgcggcggaaataaccacgaggagatgatagccatgattgtgatacgcgacatgtctataatttccacgattgagctaccgacaggggtctcatccttttggggggagggggggaatgcgcatctagacctgtatggctcattagcctctagaaaaaccgtcgactcggatgaatatcaatctccaaaatagaatattagaacaggtcgcacgcccttgttcttgctttatttgctcttgccggatacaggagcgacgaactgagttgggctggaaaccatgcgattcgtttatcgctgaatatttttaatcggaacgctttttcccctaataaaacactaatcttatttcctccgataggggtttctgatattttcttgattttatttgtatgttgtatggttcccttctatgatcgtgttgttctattcaattagactagctcgtggatatgaggcttagcatgcgaatccaacgagaggatgtcctcgaagaatcaattgagtaaaaattggtgattgatgtccaaaaagcccacttctccagcctatgtatgtccccggtcataatccacgcaccacgtgcgacttcacgttttacactatggacgagatatctgagccttgttaggcataatatcaacttcggcaacccaagaaacgtggccagatttaataacagacacaaaatagccaaagattatggcattaacaactgttcgtgtgcacatcgagtttttaaggttgagtcctgaagccacaaccggttacataccgggttgtgcctgagctagatcatgaataccagagcaaagtgatttgtcggcagtaaggacgagtcccggcatttctaccaatccaaactagctaaaacatctcgtttctttgctgagatggtaggcaatatccaaccgcgtataagcgtataacaagagcacaatacaacaaaatcccaaacagcatgcagaacagcccaatcaaaccacttttcacccaaaccttcaccccaatcccgagcccctagaaacgcacctcaggccgaataacaagcctcttgtgcacatatggcggaggaagagtagtatatctcacgcaaggcttgcacgggagtttttctttcgaggaaaatggcaaacttgggagatcgccaagatgtagactcagaatcgacgaggctctcttccgatcaaagattcctgatttagagcctagtgtcgaggctgagggagttggtgtatggcctggcgtatgctgtggcaagcaggagactgttatcagactccgaagatggtagaatgattcttcctcttcctcctcctcctcctcctctttttcttctggttgttccagcttaagttcgggtgctgctgatgggggctctgctatggcggcagccactgatgatagggcgctattgctcgatgtgttgctcacggtagctgcaagagcagctaattgattgatgatttggtctgcttcgtcgtggtgtcgtgttgtagtcatgattatcccagtttgatgaggttctttatcttgggatttgagttcttgggacgtagttggggaagtggaagatttgttcgtgtctgatcttcgtcgtcgggtccatagatttcttagcagagggagaaacatggtaacgattaaagaaaccacttaaaaagagatgtcagcttgtccagtgtctagatatgtcctcggagtacgcacagttcaagcgactaatcaatattgaatttatcagttatccaaaatccttcaaatctttaactagagatccgatgtttaaaatctagggttcccttctaaacctcagatatatatgtcctcggtcaacgcacgagcttgatacaatgaagggattcaacgagcaagactccgaccagtcggtgcaatacaaaccagactggatctgaaacaccacccagaatccgggatgatcagatatttcccggaagactaggccgttagaacttcatgaatatgactggatgagcttaaaatgtggattcggagactagtactgcccctctcgtttaggtgcatcaatataaacagatcaacatgcaagcatcctaccgtacggaaagaccctaccgaagagttgatagatcattccccaaattggagtgttgcaaacggatagattagtgcggatgtgtatcccgtagatcactatggcaccacattgccacaaatattagattcgagtaggttcgagctatcttgccccgtttgtggattgagagatgggtgggtcggatcgttagggctggtttataacggggccggagttaagattaccagggcaaattaaaccatcaaattaaaggatatgtgtccatattcttcgaatgtcattgcggaccggtctatgacatacttcgaatttggccatggaccgaaatcgtaatatgacctaagcatgcaagccgagtcatagaagcaaaagcaaaagcaaaggcaacagaatcactccgtcctcggatcccggaccatgcagtacaactaccaacaatcaaagtcagcaacaacccaaacagatacgagccccacaagcaaacactaccaaacaagtacaatgtacataccatgcaagcatccaccccatcccgacactccatctccttactcatgtgaaagcccatacgctcatagatcgccacattaggcacattcttcgagctctcgaggtaacacttgattccctcctcatccgcccgtttcgtaacagcctcaaacaacaatctcccgatacccatcccctgcgccttaggactaacagcgacaatattacagaaatagtacccgcgcggatcatcccagatagaagcctgcgcctcagcctgccgctgtttccagatccagtacctgttcgtgcgcagcccgccgcggccaaagtaccggatgttgttgagcatctggctgaaggatagggcccatgattggaaccaggagtaccagctctctggttgcgcggcagggtggggcgctagccagcaagagaccccgaggattggggctggggttagtgtggtgctgtgggatttggagtcggtctcttgggtttcttttgcaacgtagaagagtgcattcttgattccccaatggcagcgtgctgcgagagaatcgtagtttctttgcttgttgaactatacgtggagttatctctcaggagacgtaactgccggccaagttgaccgcgtcacgagagagatgtatgttagtctgataataaggagtggatatatgtctttcttcttttgcttttggtagcgattctcaacgcgcgacgtaccttggatgaatcgaaggcccacttgaaataagggtcgtctgcaaatgcctgctggattatctcaataacaccggggatatcagtctcggtaagaggcaagacttcaacagccataatggcggcttgggaactctgtatggcgggtagatgaccacaatttaggcaaatcggaagagataattgaaggagacaaagaaaaagcaagtcatggcagttggggaaccagacaacctcgggaatgtggagagagttggatgcgccttatcgctgacacatcagttcttatctctagccctgaagggctccagtgccagtttttatgagagtcgggatttcctggaaaggtttgataggtttaatacttgagatcattattcagtttatcacatgtatccatataaggtatctgactaaatgacccatttcgccttttgtccccgatcaacctcggggaatgaaagtccagtatcaacaccagccaaaaagtatagccgttcatacatgaatcataaacaaagtgctattaaatggaaagaatataaatccaaatataacccagagaagagaaagagaagaagaagagcccaaactcagatctgaagaatagatagcatagctggaaaacatgtgcctgacaccaatcccaatatgaacattagcgtaaattcatgattcagacctcgtgacagctttcttccttttttagaaaaaattaagaatagcagtattactggaaatagtcttcgagtcgcacccattcgcggggcacgtccatgctgcggttgacgcgtccacccggcgtgaggggtacatcgacgcggccacgaccgcggtcatcgtcttcatgctcttcatagaacgataaacgggagaaataatcctcgagaacggcctcccggtcgtccccgacaatggtatcgtattctggaggtggggtgacaagcggtggcgcgggagggacgtcctcgaaagcggggggtgcgtaggagggcgcacggagcagatgcattgggcgaggtagggtaggtgtgttgcggtcgtttggtggtgttgcaagatgtgcttgtggaggccgggcgagaccgccagaatcgttggtgaagctgcgggagaagttgtggcctgttgagccgcggcgaacgatggttcctggtgtggggcggctgtcttcacgatcggatgatgtcgctggggcgatgacttgctctcgaggtgcaggaggtgcgccggggcatccgcattcgaattcttgggctggggaaacgggtacttcggctggggttgtgtaggctggtaggtagatgttggcctgcgtggccttgcaggagaggatgtggaatggcgagtctatggagatttcgaaatgtcttcgtttggtggggtctctttcgtcgatcttcgaaagacggaggacaatctgcgtggatcgattagtatcattataaccaaagaaagaggaaagacttgacatactttgatccagtggttgatctgaatgttttcgtatgtggtatcgaaatgcagccgctgaccctcgtccctgcccttcatttcgtggcaacttggcaattgcacgttgaattccatctcagttggaccgacaccagaatcattcgacagattgcctagcagattcgtccgattccgatccacaacctcatccccccttgcagcagcagcgcggtggtcccagtcgataccgccgcctgcagtgacacgcatggagctgccaggatacgtgctgacactagacgagtctgctcgtttttcgaaaagcaacaccttcttcgctggttgcaaccggtgcacgctcttgtctgctgtccagtgctgaatgttctccgtcacaaagaccttgattcggtggcactctactttcgctagcggagttaacttgaacgcaattgggatctgtgagcccagcgggaaggacttccccgagatgacgatgtcgtagtgaagttggtcttcccagttccgcgaaatcgcaatcggctcgacttgctccaatgaaccctcggcaggggtacggatcacagggatttccatggtaccgaggagatttggtcggaatgcgcctgatcgttccaccattgcttctaggtcgtatctcacagagcccagatccgttttgattgtctctggcaatgatccgtcgattggaaactcgaagctgtataaataatcgcctacggggaacatgcggtaatttcgctgtggctggggttgcgaagtcggaggttcgttcttgctgaagctgcgtgaatgtccgtggttggcttgtagagaaagacgtttgacttcgcggggtgttggtagggcgagtgaggcggtagaattgcgattggagaatatatgtagttctcgagttgtcatcgtcactccctccttgcctggtacggacgacaccggtttggcatgctgatagtaatgtgcgccatagtcattctgcatgagcgcggtgtcaccgtgattgaaatagaccacaccatgtgtgacgagatctttcttatcatggaagtggatcttcctaggaggaatacctgaacaatgttagctcatgttcaggtacaatttgatgctgtagattctcaccatctggccaatcggtttgggcatggccacggaagcagatcgagatcttcttgatcttgacacatttggtaatcttcaaatgcatttgcccccgcagaattgcagactttttactgcttgggtcttgctgatcataaccctgcaagaaaagaacgggttctgtgagggcaatcccgacagaaatgccactcccagtggctacaatcttctcatttcgcaagggagtaaatggggtggtagaatcggtattcacggtatggggttcatgtactgagcgaggcagcacctcggtggacgatgaatccgatcgcatctcgtcctccaagtcgaccgatatcggcgacaatataatctccgaaactggtcgtacactaagacgttgcgaaggcgcctgaactccagacgaccgcaagcgaaggaatcgctttgcgttctcacgtgggcgcgccagctttttgaagattgagtcccgacgactccgtttagggatctgattttcaatacaaaccgtgtggcgacgaggcgagcgagtgatgagattggaaattgatactcctagcgatggagttcctgtgaactccgagggccgagtggggttgctagaagccgaccgagaagataactgcgctggcagaggaaggatattagcacccatcatgatgttatttgtctgctgagcatcgccgaataattcccaaaattgtacgtatatcccttggatacgcttgtcgccaaattgggcaaaacacaagcctggtcttccaacaagaaagggaatacaaaagtgcagggaatgtgttagacagattcaacataccttggatctttaatcttgtgagacgatgttttcttttttttttcgtcccttgaatcctttcacgcaaggagactgatctttgtaggaggatggaattctcgggggtgctgacttcataagcaatcctccactctgatcatcgtgcagatctctatttcgacgtgtaggattggctgttatagtgcggaattgtggctccttttcccttttccctttttccttgatctctatgactccgctcacaaggcgtatgtggcgtcgtatgtgattgaaaaaggtccgtgaatatagttagaaaggcgaactacttaaactaaaaagagtcctgatccacggaagcgaaaagaagaacctgaaaagcaaaatataaggtgccagaggagcagcataaatccgaactcgatgacaacaccattgagaaagccggggggagagacggagcctggtctcatatccggcgatccgggccatacgtctctaccatctacggtttacggattttgctcggcatttctgtcaatatttgtggagaaacattccattggggtctagagttataaatgcctcggatctcacggcctatacaaacggcttcacggattcacggcatagggcagtgctagcgcccagctcttggatatcttggccttgttgatctacataacaacttagaaaactgcatctttagttgcgctttaatcactctttttatgactttatttgatacgtttaggactttacaccagatcccatggattttgaaaccataacaaatatgatatgaacctagacctttgcatttcttaaatcctcgtatatcatcctccgcatgacttacttatgatttccgtacatggctagttactccgaagttgactaactacctagttagttagttagttagttacagtaactcgttcagggcctgattttcaaggttcactgcacggcttacacagcttagggcttaggtggaatgtgaatggtcggaagatagaccccgataaagatggtgatcagttctagttcgtcaccatcacctatgtgctgtacatcgtaggcacatcagactattatactaaatactactggcgtgacgacatgtccatcttacgataatgacctcatccgccaccttatgcctagactctactccgtacatatataatcgtatagagcagatctatttcgggaagcaaatgccttcgttctctctggggtgatcgccctgtggacttctctgccctgatttacttccccacgagccgcgtcgatcttgaactacgtcactagacgtatagactacatagtatatttagtggcctagggatctcttcccacaactatcttgtaagcacgtattttcctagaacccaaatcaggcacagggaaacacggtcccgattcaaatgtcctgtcgcacaacgagctctgcttcaccactggaagggttcatgcgttcggtggaggctgtctaggagctgtgggcctggatcatggtggtttcactatcttctttcgaagtgtcagaactttccttattttttaaaaaaggtcaaaagacattgattctccatgaatcatactcctaagagctattagctaataattgccgtatgtatcattaatgttccacagcagctacccagtcagggggagccttgaacctgagtaacaacagatccacgtacctagttcataataatcaatgcttccagtcacagaatcagggcatatgccattagatttatgcttagtaccactagtgccaaacgcgaacgcatgcagctagctcataggataccttttccccttcccccaactcccccaactcctccactttcccctcactagccgttgctcttatccagactgtatcaatcccaatagtgtgcccctcattttcatcagttgaaccaattatcatccagctcattacatgcgttcatcaggctatccccttccagctgattgaagtccccattattctctccaaaattatcagtgtccatgaacaaatcgtcgaagtttgattcagcgggccccatgaaatcctccccggagttaccctgtagaaaattgccgtcatccccttctgtcttctgtaactccatatcaaatgcaccaccactagcagggacatccgaagtattccccagaggttgagtcgtgcttaacctgtccgcaccaccagcagcgccggaggctgtgaaatttgacccggataggaaagcttgattgcccatgtcatcatcgttgaagtctaagctaagaccaaactcgtttgtgcccccagcgttgttgaggactgaatcaaaagtgagatcttcattgggtccagggggtgattgacggggagcattgttatcgctctcatttttgacaacgacatcatcgcctgattgggtgtcgggcttgatctctgccgctgattggctcacggagatagcttcttctgatttaggcatagtttcaagctctgtgcccatttcgactttctcagtcgggggaggttgaatgtcaggttcaacctgttggttcacatcgctcattgtcacatcttcgacgggctgaggagcggcactagtggccttgagagcctcgtaatccctttccaaaaaggctttcgcgatgaactgcatagggtcagaaatgaaaagggaacccgaaaaaagcaacaaaaaaaaagcaaaaatgagtatatttgagattgttgatatttactcacaatttgctctgataggttatccaaggcattttggaagctatcatgatacaacggaatggatcgttgcagattgattcgcgacggcatggagccagacttgcgaaacaaacgaccggtatcaatgagctagaaggtgtcagaggctatatgccaagagtgatgttccagagccagcgcttaccgtccgctctattatgcttgagagctccgtaagggattccgggtttgaataactagttgaatagctggccatggttagaatatgggaatgtgaagacgagtagtgtagttttccaactcggacgatatacaagttgaaggaagaacttgggagaagttaagaatttggggagaccggagagtaaatagactaaacccattgaggtaaagtgtcctcccccccacccctagcggttaacttcctccctttacctttgctcttctccagttccttttttttctttctgtatcctcaacttctttccagttccctttttcctttttctcttttctttgtttggctttcccctgtaaagggacttgcatttggttttcttcaagctttctcagcctcttttttgttgggctttctacccttccaacgcgctttgtatcgtttcaaacaaatctccgaccgcagctttatcaggccacagaaacatctcccttattctaccggagctggatcgaaaaaaaaaatccaaaatccaaaaacaaatccccccccctcaactcaggttccatctcggtgtctctgttactagcactgtttatacccggtgctctttgtttccccatcttaggaatctttcttattggacttccatcctggtcccccgcggcctcctataccacgtatatttccccggtcttatttgcgatagtggctttcggcgacgctctgcattgtctcaaattccgaatttgacagatcataacactgggctctcccggtctgacatttaaccccgtccgacttccgcatctttagcttcctctgatcgtctttgggatatatccgtatcttttcaaaaagcaatcataatggctgaaaacgctcaagcctcgaccccctcgtctcttccccccgcgcctcaacccgctgtcggtcaagcccaacagtacgatgctcctcagggcaatggccagggcaaccagtcccatatgcccccgcccccgcgccccccggtgataattccccagaataccaatccgattcccaccgccatgacctctcccatgtccggagttgatatgatgtcccccacaagcgctggtggatatgtccgccgagcggctcctgaaccaaacaagagagccctgtatgtgggtgggctggacccgagggtcactgaggacatcctcaagcagatctttgaaaccactggccacgtggtcagcgtgaagatcattcccgacaagaatgtgagttctcctgacagacagcccccctgcatatccgccccctgagttgttggaaatgctctctggagctcttatctgggataccattgctagtccttgatggaatactggttgctgactgttttactcattccaggggcaattcaccaccaagggccacaactacggtttcgtggagttcgatgacccaggtgcggccgagagggctatgcaaaccctgaatggtcgcagaatccaccaatcggtaagtttcctttcgttcctggtattctgtggctgtatctaattgcctcaggaaatccgtgtcaactgggcgtaccagtccaacactaccagcaaggaagatacttctaaccacttccatatcttcgtcggcgacttgagcaatgaagtcaacgatgaagtcctgactcaagcattctctgcttttggttcagtatccgaagcacgtgtgatgtgggacatgaagactggtcgctcccgtggatacggcttcgttgctttccgcgaccgcgcagaggcagacaaggccctcaactcaatggatggtgaatggctcggttctcgtgctatccgttgcaactgggccaaccagaagggtcaaccttcaatctcccagcagcaggcactggttgctatgggcatgacgcctaccactcctttcggacaccaccacttcccaacccacggcattcagagctacgatatggttgctcagcagactccccagtggcagactacttgctacgtaggcaatctcacaccttataccacccagaatgacttggttcccctgttccaaaacttcggctatgtccttgaaactcgcctccaggccgatcgtggctttgcattcgtgaagatggattcgcatgaaaatgcagcctctgcgatatgccagctgaacggctacaacgtcaacggccgtcctctgaagtgcagtgtaagttattgctattcctgtgatttcccggcttatttactcactatcgcagtggggtaaggatcgtcctcccaccggccaattcgacaacttttctccccagcagggcaacgccgctcccttcaacaacagccctgccggtttcttcccccaatacggtggtcccgcgaaccccatgaatcaaggtgagcctagtattcgtcgtatctctcggcactcgcttactggtgtaataggtcctgcccctgctggtcgaggctgggatcaacaacccaacaatttcaatggacctgctatggctggccagggctacgcccaggcaggtaatgccgggggctacggccgtggccaagccatgtccccgtccggcaactgggaccaatccaccaacttcaacggaggctaccaggcgtagctcgggttttgacagtctccagtcagtctgctcacatacgacacttccggcattttctcacagaactaagtttatttaacgtcctttctgtgtttctttccatagcacccttctacaattccccatcaccgttgatattttctttcttttacctaaattgagtggattttcaagcgagcaagttgcttttgtctgaaacggaatttgtgtgttgcgcaccccataccccaagtccactatgttgatttgatttttctctttacttcttttttctttttcttttccttaagcgtgccttgctatcaaggattctttggacttttgttggctccgtcacgcccccccaaataaaagcgacctccctactcttcacccgcgtatttggactgttgactgtttgttcatttcatttctctagctgttttatcattcgagtacatttgttgtatcagatttgcttccctgtcttttcttaggcttgctttctttgttcgatactcattccactcaaaagatgcttttcatgggttgccatggattcctcggttgacacattggtctgggcactttcccacgagtatccgtatatgctgtgatgaatttctttggagcacgcgacatcattgatcttttttctaaatatctctgccttgctggcgttctagcccagataccaatttgcctttttttcccctgcattttgcctttccattgctttaaactcattgccgatggcactttctttgtttatttttatatatactatgtatgatgtgcagagcagacggcggattgcatgatattatctgcctataggctcgcagtgaaactaaatatgttgtgttatgctctgcggggcatttgaagtcgaaccggtttcatagcagttggtatctcattgtagcgttggttgattggtaaaaccgcaacccttctcttgctgcacatgtatgcagtgtgacaatcagatgtacggcatgttttagattgggataggcaatgtacatgctccatcctttttctattcctctgaattttctctgtactcaactggaaaaccgggatcggatggttatttactaatcacgaagctataactccgtacttatggatatatgtgcataggtattccggctttaagtattctatttactctttcaattaaaagacaccataaaagacatgaaattaaagcctctaatatagtatcaagactttgcagcattaccctctagccgtgagaaaatattgaaggtacatactgggaaggcgaccgagttaagggaaagtgcctctcaaattgatgataagatccaatattattatataaattattttactccatatcttacctgttattgctgatactttatatgcactagagacataattcaaggctatttgagcgtgtgtcgccgctggcatcgcaatattgatatacagttacattgttggtgcctgagatatagggctacaatgccactcctttacggccctgtgcaggtaacattcatggatgtctttgcaaaacaaaaacaccaaacgagaaaacacagattccgagtttcaccaagcaagaggattgaccgagctgacgttccagctctcggttccactcgcactaatggacgatgacgagagaaccgcggacttggcggtccacgaagtatctcctcgcacgcgatcaggcagcgtaagtagcggccacaaacgaagcctttcgggttccctcctctcgagactttccttccttcgcgtgaaccaggtagcacacacctccctggaacgacaccaccccggtatggatcacgatggcgacgaagacctccactccggtatgccgcagaccacaggcaagggaggaactaccagcagccgggcaatgtctgccgctctcgcacaacaccgaacgcgccgtcggcgtggttcactccgcaaaactgcattgctaggcaccaggctcgaatcgcgcgacaaaagagccaccgccaaagccgccgaagctctcgaagccctccgcgccgaacctagccgacttcctgccgccgatctacaagcggctatacaactaacagatcaaaccccctccgataatgggcctacgcgatactcaccgcgcgagagcggggccttcgacgatgaccgcgacgatacccaacaaccggcctggttcagcgcggcaaatacccagaaacccattcgaccctcaataagtcgccgacgccagggcctagcacagcaaaatctccaagaacaagcgaccgacgacgaggacctcatctccttccctcgcctgcactcaaatcccacagcggccgacacgggcaccagtcctaaaatcggctctgcaactggcttgcacatctccccgccatcctccaactcggcttctttttattcgctccaacctcagcccgaaccagcatacctgcccgtccaccgacacaagtcctcgcccctggtcacacatccggttgagatgaagagcagtcccgatgtggacgtggactactccgagaccgaatggtggggctggattatactggttgtgacgtggctagtctttgttgtgggcattgggagctgctttgaggtctggagctgggcttgggatgttggggagacaccctatgcgccgcccgagttggaggatgatccgactttgccgattgtcgggtattatcctgcacttatcattctcacggctgtcatgtcttgggtttgggttgttgtcgcatgggtgggtatgaagtacttcaagcatgctaatatatccggggaggatatttgattttcttctcttgttccagcgcataccatattataatacccttcttcttgtgagcgttaaatggcataaattccgtggggttttgtggttggctgacagtgttgacaacattcgatggtcaatacatatgggctgcgcaaatattgcagctatattgctgccactgcactatcagtttctggacatgagcgacaaagaggtataagcatcgctggaatttttcccagcaaataatcttgttgtcgtggcctcatatgtacggccatctagtctataaactatgtacatactgaggggcatgtataaatcacaaatttgcaacgtccaacttcctcaagcgcaacatactatcctgcaaagaagtcgctagcaacgtcccatcagggctccaaagatgactctcatgcgtccccctgttctccgtagcccgaggtgtccaaccctcctgcacaaaccacttcataggcaactcactcagaccgccaacaccgccatctccaacactctcccaatcaatcatccgcagagcctccccatgctgatgcacaataaccgtaagtgtaagactcgccatctcagtccagtgcttgatccccagcgcgcgcggaatcaaaagaagcgagtttttatcactggaatacatatgcgcacacgcatacaaattatcatattccccgttctcttctctctcgcggatctgcgccaaactcgcagcagggtcctcatccggtgatcctttgagccggtactgcgttagctggcgatatcggtcagggtgttgcttgacatcctcggtgcggttataatccttcatatcagtcttgcgcacgtctagaccgggaaactcgtgctcggagatgttcccctgttgcacggcatcgatccaccaatctgcgtccacgctgggactgggaggctggtcttctggtcgttttgccgagaggattgagtcgaagcgcgcttgtgctgatttcggctggtgctggaagagacgctgcttctcatcccgcttgaaggagcatatgcacgagaagcagattctgcctgcttgtctcgcgtcgacggctcgtgcgctgtacatgaatccatcgcggatatgtcgcactgtgtacacgtacggcgtgtcgagccgtcccgctaggatgaatgtacccgtcatatcctgccgatatgtcagtttgaggttctttgagggaaattcatgtataatatcttacgtgaatcactaaaccccgaccgacggtcttggacgctgcataggctgcttgggcgtagacatgtccgccgaacgagcgcgttccttgaccaggattgaaaggtattgccagcgagcgaaaccgctcaatcttctctggtccggtggagtcgggatacgagatcaaggcatcttcgagtcgctgcagcgacatcaactcggtgaaagaatgcggggaagtcagctcgccgtcattgtccggggccctgctttgtggagacatagcgcgaaagaggcgagaggcggtttgatttaggcccttttcttcccaaagagtacaagtagtgtgaagcagttgcttgtcgacaagggtgattgttctgcgggctgatggtacctgtccgatcaataacaacggcctctgagcggtcgtggtatatgaaagtaggattaaggatctgagccttatacagtattctgttctttaacggaaaacgggtaggattgtcttgtggggagtagaggtgaatagatttgataatggatgtatggtgattggtaccgagtacataccccggactaagagacgggaccggccggtgcctcggcttgtcagtttgactcacgaccctacaataactaaatagttcctccgtagttagtacaaaatagggtgaatgttctaagtgtaaatatttcgcataaagtaactcattttatggcttctgaatcgattatctatgtacatatagcatgcttagtccaaattcagcgttcacgactgatcgggtgaatacatttcggctggagcgctttgcttcaggtttacataaatcgaaccatggtggcgttcacagggtacggcatgtcgatctctatatatacgttgggttcctttgccatgctcgccgttgccatctttcatggagtcaagaatggagggaacaggaattgtatagtaacagccacaaaatagacttgtagatcaaactggtattttatacaatatgcgccgattttgctgataggttcgagtggcagttccctatgcccgtgccataataatacaaagaacaaaaaaaaagtgctggaaactaaatgacgctcccaaatctgatatcaataatcaaccaaactttcgtcgaaaagatcacgtcgattagatctgctcggtaatggtggaaacgttgttccactcgaccttgccctcgatatccttgatctcttcgagcttgtcgccgagtttgaccacggaaaagttgatcatacgcgggtcgaggccgagagtacggcggatagatgactgaacagagccggaagagtcgaagcgcatgatgaagtgatgaccttcagtgtatcgggcctgatgttttgtggtgaccttgggcagacggaaggcaccccagttggtgtagccgcgaacgacgccaccggagcggatgacttgggtaccggcattacgggcgattctgcagtaaaatcatctatattagtattcgacaggttcggatgatggagaccgcggcgatggtgttggttcaaacgtactctcgcacctcgttgaggctgcccgggcggacctgttagcagagcggttagcaaatccaaacatttctttgagtgtcaatatgacagtttcgatggaactaaagcatacaatggcaattagctcgtacaacatggcatcgagggttggcgcgaactagagacagaaatggagcaatgaccatttgaagccagcaaaatccgacgaggttagcgcgttgcttatcgtagtcttggcatttcgttatcggggaaatgccgtcaacgaaactccgccggagaagcgcatcaccttctttcccttttacttaaactctctcctcttctcatttcactttccacgcttctcattccttttccctatacctcaaaatgtcctctgtcgctcgcgcaatccgcccctttgcttcccgggtcatttcccagaagcctcttgcatccgcctgccaggtttcgcctgctttccgtttcccgcggggaactaggagcttctcccaaagccctctctgtgagtactatgaacacccaatgctgttaatgctgtctaggacgatgtaaaacatacttggaccggcattggagcatcaaaatttatcaaacatgctctatgatgttacattttactaacggcgcaccaattcgcaattatagcccaggtgaagaagtacacagagtcgcacgaatggattgagctggccgagggcggcaagactggttagtgaacaaccacctcgatcaattggtctcatacacctgccttccatccattgaaccggtgccaggtgtatatggcctccaatagtatacagaatatggagcagcgagctaactaacagactctctacagccaagatcggtatcaccgactacgccgcccactccttgggtgatgtcgtctatgtagagctccccgaggtcgacctcgagatcgttgccggcgagcccgtcggcgctgtcgagtccgtcaagtctgcctctgatgtcctctcccctgtttccggcaaggttatcaagggtaacagcgtcctcgaggataaggctaagaccatcaacgagagtcctgagggtgagggttggatcgctgagattgaagtcgctgatgctgctgagctcgatgcgttgctcgatgaggctgcctacaaagagactatcgatgcttaaatttgtggagtgattgatcttggttcgtaatttataaatgcctgtctggagctagatgtggtgaatttcttctttaactgatgttatgttgtcatgtatgaccaatggtgaccaatttccttcaacgagagcgtttagatcttgtcgatccgtttacggatcgacgaactattcaacaagatttctgtatacgtggacggatagttgttttatttccttgtagagaaaccatagtccatatatctaggtggatgtatatttagagctagatcacgcatgtcgcaatagtggaatgcaggtctgtgtacaggaagatgatatcatgtatgagaagcattacaacataagttatacaggaggtatggattcacgacagatcggacattggaggcgaagtctcatccagctttccagacaggcagtgtggaatatatgacgacaaggagtgaccatatatagccggcgactcaagatgcttgcggccccatcggtgacgctacttccacccgaagcagaaggcgcgggaaggacaggaacctcgatatcctgcatgcaaatagcacagtcgaatatggccttcttgcggtctttccgctgcttatcatcatccttcgaatcactgactagatctcgttcatcaccgcgcagggatgcaatcgacagaacgccaccaccggcttcgagatcctcgtccgctccggataaatcgcgcagcatgggatggtaatcgtatgcatgcggtgcccagccacgaggcacaaagaagcgtggcccgagaacgtcctggctgaccaggatccatgcttgaatccacacccatccagtcatgatgaatgcgcttgtatagtcggggcggataaacaacacgtttccccgtgccgtgaggaagtacaagaatgggaagagtcgcagaacactttggccggcaacaaagtcccaccgaagagccttgcggcaatttctcatcgcgttgcggtagacctgtggaacccagaaggagagatagactgctgccaagaagcgggtgtatattgagccgagacgtctcggcaggaggaaagcccagattgacaggatgagcatgccaaatagggtaagatagaaccgtgcgtacattgttcctacgtcgctgcggatttgccttggagttgggggagtggctcgggtggttggcggcggcgaatccatctcatcgtcgggggcatcttggtcgggtgacaagatgattggggtcgctcccgagtctcgtgcttccgaagcagtggcaggcaaaggcaaagttccagggcgagttgttggagttgatggattgggcggacgatcttgctctcttctttctggctcttgcactgcccatatttccatcatgaacttcattccaatataactcaccgacaggaacgccaaaaatgatgcagtagccaaaactaggaaagatactgcggcatatagttccaaaacaatgaatgtcaaaacaaatgcatcgccgagcgccatcaatgcgatggtatagaagctgatccgactccgggtagaaggagtcgaagcctctttgatctgtcgaagaagcagggtgatctgtgcaacaaaaacaccagaaaccacaaaaatgagacgagatgcatatttactgtactcttcatgcttaggcccagtcacatataatgcatcagaaggaggaaactcaggggttcctttcgtttgaagtatgtacccgcagtctggggagaagacaacagcagacatgaccataagaggaggatctgggattggcgctcccataggatatctgagctcttgctccatacgctccaataacaatcggtcagcaacggcatcttcgagcatgactggatgctgctgcaagtagatgatatgttcacatttaggcgcagggaactccatctgctctgttcctgtcagagaggaccaggggaacagtgttgggggtcgattttgcttctccgagatggtgtccgacagtgacttgagaagaagctcgtgtgacaattcgtaagtgtcagaagatagcatgaaatgcggcaacgagaagatgccgccaaatttctcactggaagtagtcaaaacgatacttccggtgtctgggaagtgtacacctaacaacgagatgtaccaggtacttccccagaagtcctcgctctcgaccgtcaaactggctcgcatctctctcaaaagtccatcgcccatctgaagttcttcaccacctccctcttcaagatcaaagtaaaaggtgccgctattgccagtgatattatgactgaattcatgagtaaagtattcgtgttcttcagcgatggctgtcgtgttcagaggttcacggcgatgaacaccttcagttcgccgaacccagtccccccgcagcttcccggttgagttgcgatatatcggaagcagaagcttggtcaagttcaaagtaggcgagacaatggggtcttctagaccgtccggggattctagcccggcatttgagaccgctgattgtaactggtggcgagccaggcctttgacctgcggaaaaaggtcccaagcatagctgtcattccctcttgaacccgaaaaaggaagccatcgattggcgggcggatcgaagtcgccatattttgatccattcaataaccgaaggacctgtcgctcatggtcaagctcacgttgccgtgcccgatcttcatcgatcaatggcggtcgagactgggaactgaagagaaggtagaacaccagcacgaagaagaaaaaggagccgcggttatccatctatgccacgcagtctcggcatcggactcttttctcaaagacagacaataagcatcgcgataaagagaaaccaaaaaaatgcgagaaggaggcggggagctcggctaagttacagagggaacaaacagaaaagaactaatgaatgacgaacgcagtataagaaggtgtctacggagcggagttgatgatgtactcgaccccggggagcctgcccgccgggcacccactccttgctgactcatgacgcctcaggcatgatggatggatcgatatcaaccctggaaacgttctacttcgggatttataccccgtaaaattaaaatagagatgaacaaattgtttcttatctgaccattcttagccagaatttagaacagaccaaaaagataaaaaatgccaatgcattttatggcaagaattgtccactaaatgcgaagacccgaatgcttgatatcaaaccggttgaattttggtacaaatagaaaaacgcatacacacaacgaccatctcaatcataatagctctgctttatgatgcagcagccaggacaccaccctcgggcttcgcatcccgccgccgacgcttctcgagaatggcctcacggcgctgtgcaagcatcttcaattgtctgctctcaacaccctgaagccagtaaccaaagcttccaccaacaccggcgaagagaggatagacccagagggattccttggcaaggatcggacgcatctcgataccgagttgccaaaggcggacggcaatgcctgtcggatcaacacggttagttccaatggcatataaataacttgaacaatcgtgctaccaagcagcgtgctcttgtgatagattgaaagctggggaaggagatgtgacgtaccgaagccgccccagaagagtactttgtgaaccatgatcgcggtcgagcgcggggttgtggttgtaattcgggtgctgatggagatccgagaaagattttgggaaggcggatgggttggctggttgattcaacaccacagcagccgggataattgggggcggagatagatgttgccgtcgcaatagtccaggagagacgaggttgaagcaaatcaacgggccgcagttcccaagcacggaacaaccattcttccggtcacacttgttatcgcttatcgctcgcgcgacttcgacttccccaggccaactatggcttctgatgaggcaatggatgattctacagctaaacggcctattgatattgagagcgtgaagcgcaagaagttcaagaccgacgaccttcccttgtctgcggcgcaacatgcagtcattgacaaactcttacattcattcaagaagaagggtggctttgatagtgtccgaaaacaaatatgggctgaattcaatgacggagtatgatatattatccacatgttttttcgcaccatgctaatcctatgcgaacaggaacttcgaaccgagtttaccaacaagttagtcgcacttgcagagtcagcgatcgatcgcgagccggcactgctgtcccgcgaaagaggaaaggcagcgacactcattgagggcgcggtggaccgcggtgatgtctacaagagcgtggaggactccatcgaccaattagcatccaaacacctggatttcatcctggaatctgttcgtgagatccgatgtcaggacgttggagaggaagtggctgcccgtgaactcgagctagggaacaaaaccgatgcagattatgaagcctacgtcagcgcccagcgggaggagcgggaaaaagtgtggcgcgaagaggagcgcaaacagagagagattgaggaagaggaaaaacgcgtcagggatgaagaacgcaaaaagaagcgtgaacttgaacgacagaaagacgaagaagaccgggcccgaagaaaggaaattgatgaacagaggcgagctgatcgggaacgccaacgcgaagagcaacgaattctcgacgagcagcgagagcgagagcgagaggaaagatacgagcgacgaaggcgtgaagatagggagcgatatcgaggctgggaccgtgaccgcagtcgaactcgagatagagaccgtttccgtgatcgctctgaccgtgggttatcacctaggccccgggattcaaaacacgacaagtcatctacatcgaatgttcccactcctgtgctaccgcctcttgtggatgagaagtcactcgaggaggctgctttgcaaatgctattgaaagaaggcgaagaacttgcagccaaggctcgacagaagcccgagtttgactttgaagaggccgaggctattgagaatggactgaaaccgccagtatcagcgttagggccggccaagactgccaatgattcaaggttttctaatacatctacgagagcggccagcatatcccgagatgctaacacgaggcgtggttctcttgcagaccggggtgatcggtcccgacatttgactcgggatcgaagccgtagtcgctcgcgtcgacgacgcacctcacgttatgacacagatcgccgacgtgaacggtctcgggatacttctgtgaggtctcgagatcgtgatatggatgcgcgccgtggctaccgcgacttccgggatgatcgaggtggtggaagctacagaccaagccgtcgcagccgcagtcgatctgccggccgggaccgcagtgttggccgcgaccgagaccgcaaccgagaccgagatcatgacaattatcgtcctcggcgcagtcggccctctcgctcacctgtacgccgacgttctcgcagccgctcgcgctcgcacccccctcgtgctcgtgaccgtcctcggtcacgttctcgatctactcgacggcgatctcggtctcggcgtcgctcgccttctcctactctagatattgaccgctacgtgccctccaccagcaaccggagcaagtcaccccgccgccgggtccgatctccggagcgagagcgagaacagcgaccccgtttagccgatattgaccgttacaaaccggtatctgaacgagataagggttcgactcaagcaaaagagggagatcctgaggttgacatagaaaaagaaaaggagaaggagaaagaagaagagaaagagaaagagaaagagaaagatacagatgatcgccgacctcttcgacgaacccctagtcgccgaaggagtcctagccgacgaagaagcccaagtcgacgacgaagtcgcagccgcagaaggaaccggagccgatgatttttatgcaactttgccatgtatgaaaagaccagggagacttctgcttacaattagaaaaagattttcgggattgacgccgaaaatgaccgcttttgaggccagaaacggctgcctttacacccgtaactttggaccactacaacattctacacccgcccagcactgttagtcatcctctagccctgatgttgacgctcgacttgtacagttagttgttccccgtatttccaacaacatggagccttcttccatacgtagccttatcatctttcaaaagaagggtggtaaatggttaaactgcttcgacccggacggttattgaagtgagtgcgtctaaacgggcgaggaaagaagaggaaaaaaaaaatagagcaagctcaaatgtgcgatttgactagatgctcaccacgaagcacccgttcttattaagaccaatgctagtgaaaatgaatttatcgcattctattgcggtcttatgcgatctctcctctgtgcccaagactgttgtgatagttttcccattcaatactcaagtctttccttttccatccttcgctcccaaacgccaagcagcaccgaaaagctagcaatagttctaggtctggggcttcagctgttctttcaatgtccatttgtcacatctgtggcccggctggccttcccgctcatcctgtatatcctcgcagcgcctgaccagcagttcaaacagacgttatatttcatccaactgttttgcttcccgcgccctcccctcagttgactctaaatgactcgggtcaggacaaaagtcggcatccatccaaccacctagatacagcacccagcggcctgacattgtccgcgcgggaaacacgaagtcatgtttgacacattatgccacgccatggctgtataataagagacagaccgtgtgaatcagcagatgctcaggacttccctttctagctcgtactgctgtttggccgaccttagactcatgggtaggggcctttacgacggctcccgttaatacagcacgatgccctatagttgatttgtggcgatggcgatccggcttctgtcgctgtgataggtctttcttggagaagacttactatgtagtaaacttagggggtaatacttcaactatgtattcccaagatcacatgcatcgatatcagataagcttatccgttatcagttctccacccaaaaaaagttgaaaatgcccagactcgccaacttccactctttcaagacaaccgaagacactgagatcatttagccatataaaaaatttgtatattggcacgcatccaagttgctaaaccccacatcagcgcatcacaatctctgaaaatctctgctacccccagcgaaccacatacctccaacatcgaaaccatgtcaaacgcaacgataagatctgaggctgctgcaagcaatccctctccacaatctttaaacctagcagaccgcactgcgccccgtcgacagcgcgccagctctattcaatcatctgactccgacccaacctcctcctcgggctcatcttcagaggatgacaacgagagcgaaagagaagacaaacaacactccgaccaagaaatgaatggcaccgaggagtcgaccacccatgcaaatgcctctgatccatcctcaataccccacatcgccggccgcccgaaaccgcgcatacatcgtattagaggcgactcgggacttttgtcgcggctcaacgctttcttgccgaagatgaaagatgcaaatgagaatttgcaaaagcagattgaggctggggaggctggagatctggttctcgataatgcggacgaaaatgcagagcaatatattgagatggtaaggcttattgattgtgcttattgattgtgatggggtttgctaatggatttaggatcttggtcttggggttttggaagagaaacgcgatggtgattcttcgagtgatgaggagagtgatgacgaagggtctaatggtgtcactggcactggggagacccctcaagagatgaatgactcggatatcattgggaagcttatgggaggtaagagtaaaaagttgaatacggacaagccgtctatcgaggagatggcttaataggcatttgttcgtttgatttagtggtgggttgcattatttataacatttttggtggagatgcgcggtcttgattcaatcacgattgacattcatttgcattatcttgggctttgtgttatcatttagcgtctaatgcttttctttttccctctacagaagtggcccagaccaatcgcgtgcacaaagacacatacattcattccctttgtatgcaactcatcaggaatcaagtctagataaacagatatggaagaggaaaataaaactgtaaaacaaaacatgagcatatcgcggatccctatatatgcatgaacccatcatacactatgaccgaatgacattattaaaaagtgatatattttgcgtttcaccatctcgtttcttaggccacttccttgatgcggcaagtccagccggattcctggctcagaagaggcaagctgcagcaggtcagtatactgattagaaagggacggcaaggagtgaactaacctcgcaccaagacaccaacccagctcgttgtttttgatcttcttggctatcttgacctcgcgggacaagggaatttcgtaaccggtgtgcagcagaaccgtcatgaagctaaggtccatacaccattccggacgatcccgaagctgtgcaagcgcattatcctcaccctcgaacttaacactttcgaacgccttccattcactctcaccagcacaaacggtggaggtcagctggttaagctcattcagagtgaaagattccggcatgccaagtggagccgtgcggtcgaagaaataagagaagatgtacaagtcctctcgagcgaaagtctttgcgagagatggctggtgcacaccgttgaaagaacagggtgcaagcttacactcgccgctcttcttcaggatcttctcggcgatagcacggcactggggggtcatagacttgtccttcgggccaaccatgctcacttcgacttcaggccccagcggatgatcagcggggaacttcagctttactgtcttggtcattcctgtgccaatgcaggggttggagataggctgcttaacccaggaaaggtccttggggctctgagctagcatcgcctccacgaccacggtgtttatggccgtgcgagcagacatgagaccgtatcctagatgagagtgttggtacagctcgaaatggcggccaccaaagttgaggtcatacttgtggtcaccgggagcaagacgctccggcataccaccagccttgctctgctcgaatgtgggttcgaagacaatctgagtggaaccgccacccagatcaaagacagcggccgtaggagtctcatccgggccaccaatcttgcccagcaggtagttggttgtaatccaagcgtagacaccttcctttgaaccatccatgatctcgacaccacctctctccttggagacaacggggaaggggtaaacagtctctagacggtgtctaacggcttccaagatcttgtcgctctcttcaggacctagaagacgaagtccggccgtggccttgacggcaaccggagagcacgacctgtactcctcggggaccgacttcacagcgacctccataagagggtccagactcagagctgcaccctcggcatcctctccaaaagagctgagaccggaggagcctccctccttctttttcgtttgttcgaacacttcattctcaagttctggggtagggccgcagttgttgaatcggtatacatgaattcgggacccagtgctgccggcgtcaatcatgagagcgtactgaataagaggcttggatgaatcaaacggcttggtgcatactctcgaagtggacgcgtcactgcttgaaggtggttgctctgccaaataatcagtcctgcgaacggcagcgcgagcaaggggaacaccaaccgttggtaagatttgaagtgctcggctgtgaaggggagagccacactaagaccataaagatgaacgcaataattgcccccgtcttcaagtaacgcgatctctgggtctgtgccatgttgacgggttgtttgtcggagaattgactggacttaatagactgcgatatagcaggtccgtcgctgttggagatggagcggtggcgggtggccgaatctatgtagtcggatttgctgttagggatttgattgtcgactccagtcgacattcgagcagttgtcaaattatgagggtgcagtgacaggtggcgtttgttgctggcgcaagaatggtgaaacgattgtatggggttaagaggaataatgaaacaagtaagtaaccattgatcccgatgtcctccaaaaacaccaagccagcctaagaaaaaaagtggatggatgtaaagagggaaagtctcaggagagaaaggagattcagggtttcatggttgtggcgcagatgtggcgttaaatgcatgcatggatgtacatacaacatagtactccgtacataccacggggaacttccagtatttacgcacaataggaatgctaatatacaatcatagcatctttctcttctactaagtccaaagtaattttccttctaaaatcaaagagaagaaaggataagcaagtaacgtaatgattgtacaattcaatcaagttggcggtgcaagctacatagagtgctatatacacgaaagataaaagaacaaagttgaagtatactcagcttcctagagtgtactccgttgggagagtactccgtacagctcgtattgttagcgcgtatagggattatttattgccagtgcgccccgactcttgaattgagggagcaactcacattttccatgtgtgtattaaggcagctagctgttttagactacacgcgggatgccggatatgcttgttaatgtaatgagccatcataacttggccggaagcatctaacctttcaaggttggtatgtaggtagatacctagtccgggggcagtggtttactaatgtttgttgtgtttgcatcctggatagccatactgttcaacttactccctatgtgttgcaaaaacactacatctctcctcacaggcgagcttgccaaccttctacaactcctgctacattttccgctaccagccgacaatatgaatcacacacgcagtttcatatcatccgcccaggccctacgccagatcttcatcgcacccgttcgcacctccagagttggcattcttgcgttcagtcctcttcagaatgcaccccagactcggttttttcaacaatcccattgcctagagcttcgatcataccggccacccgttgaaaagcccccgataaacgaagctatccgtgcgtcgtttgtccaagttgtgaacgacgaaggtgacctcgaccctcccaccagactagaggatgtccttgaaagctttgaccacaccgagttctttcttctccaggtgcaagaaggagacaatgacaacccaccagtttgtaaggtctacaataagaaagaagtgcgagcacacgaaaaggccaaatcaaagtcagctcgcgaatccaaggttatattcaaacaaattgaactgaactgggcaatcgatgcccatgacctgtcgcaccgcctgaaacaactctccacctttttggagaaaggccgcagggtggaaatcctattgaccaccaagaagcgcaagcgcaatcccacagtggatgagatcaaacaggtcatgcagagtgttttggacacaatcagagaggccggtggaactcagaccaaggcaatggaaggtgaaccggggaagcaacttaggattaccgcacagaagaatatctagcggagaggactgcttccatgtatactatatggcattgaactgtacgacaacgtgacatcgctgtttctcatcactgttatactattctttgggtccactcgcacataccttggaagtagcccggagagctaaggccgttggaactctccgtattgagacacatctattcataaaattgatgtttcattatctccatttccaggctaggtattctgcccgcaattcgaggcctatgattggctgatgactaagctgtcctgagatgggtccattcatcccggaacccatcttactagaaaatttggtgttgacctgggcttcttctttcccatccttactccatctcttttaatctttcctttttgttcttgttccatcgttttatttattgaaccaagatgtcgagcatctctcgttcattgaacctcctggcgcgcactagccggtcctccctgctgcgtccgactaccgtcaaccccgtccaccatgtcttcagcaacaaggtgaccggccgtgggttggccactgctttcgagcgtaacaagccccacgttaacattggtatgatcctgtcgttggcgcataatccatctccacgctaaaaggttgttgcttaggtactattggccacgtcgatcacggcaaggtaagctattcgcaacttgttccgacatttccgccatcttcgaacatgagatttaacccgtccgcccatagaccaccctgactgccgctatcaccaagcaccaggcctctaagggtcttgccaacttcctcgactatgcctccattgacaaggcccctgaggagcgcaagcgtggtattaccatctcgactgcccacattgaatttgcgactgaggaccgtcactacgcccatgtcgactgccccggtcacgccgattatattaagaacatgattaccggtgctgccaacatggatggtgccattgtcgtcgttgctgcgtccgatggtcagatgtacgtcccccggtctaaaaacctagtttgatgagtgtgctgacgcaaatcacgcattaggccccagacccgtgagcacttgctgcttgcccgccaggttggtgttcagaagattgttgtgttcgttaacaaggtcgacgctgtcgaggaccctgagatgcttgagctcgtcgagctcgagatgcgtgagctcctctcctcttacggattcgagggtgaggagactcctatcgtcttcggctctgccctctgcgctctggagaatcgccgccccgaaattggtactgagcagattgagaagctcatgcatgccgtcgacacctggatccctacccccgagcgtgatatggataagcctttccttatgtccgttgaggaagtcttctctattcctggccgtggtactgttgtctctggccgtgtcgaacgtggtctcctgaagaaggatactgaggttgaaatcgtcggtgcaaccgactccggcaaccccatcaagaccaaggttacggatattgagaccttcaaaaagtcctgtgacgagtcccgtgctggtgacaactccggtctcctgctccgtggtgtccgtcgtgaggacatccgccgcggcatggtcgttgctgcccctaacagcaccaaggctaacaacaagttcctcgtgtccatgtacgttctgaccgaggccgagggtggtcgccgtactggtttcggtgccaactaccggccccaggtctacatccgtactgctggtaagttcaatttccactgatatgatatcaaatcgataagggatgctaactatgctctagatgaggctggtgatctcagcttccctgatggcgacatggccagacgtgtccaacccggtgacaacgtcgagatgatcctcaagacccaccaccctgttgctgcggagcccggtcagcgtttcaacatccgcgagggaggccgcaccgttgccactggtctgatcacccgtgtcgtcgagtaaatggtccagtaaatgatccgctcacgcccttggtcaggcaggcgaactgtctgacccttgtattatgaaccctttttctttaacatgttgtttgttttggcacctttcattccacagcgcgggaatcatcgatcagcacgagggatccggggtaaaccggagttttcgcttgaatcttgttactgtcttggagacaaatgtagtcggattttctttcatttctccactcccgtgaaaatgtattcagacaaaattcttcctaaactcatatataatttcagtccaagtcttaagtcaatgtgtacaagatatctcgctgcttcacctcttatttctttatataccatgagaggaacaaacttgaaagctagatacatacttgtagacttaatcgaaatactccttacatcaacgccaaatcgcagtcccgtcgataccggttccaattgatgtttcgcccagcgcctgattgcggtatcgtttaagaataatacaaacgttgcgcattttcaaatacgccgtgcgaaatcagacactacaatcgacactatatagagctgagcaggatttggtgctgatatatggtgctgcggaccttcgcagtacttattaatatgtgatgctacgctagttagttagcatacgattcgcccaggtggtacgctatcataatagaaatccatatacggaggatagtatcactgaattctctcctccgataccggtgcgcgggttatagaatacaatagtatatatcgtgctccgcgcatcaagcatttcatatctttatgttgtatgttgtacctacatatgctgtacgtacctggaagaattttagggcgcattacagtgcgtacggagtggagtagggatgttgacacctctaattggaccatctaattccacatagctatattttcctatcattgggccttctatcaacccacagatacgttatcagacagcgttcgcttacgcagttcactttcattggcgctccagggctgtcattgctacctacagtagaagtatgtaacctcacaacccgcaaaaccaatcgggagaaacggagaaccgcatcaaaaggattaatatattgggaagaactccacaaacaataccggagaaacggaaacaaggccaaaacactatatttaaggggaaagccatgggcacatatgtagagggcttttctggaatttttggtattttcttagaagatcgcggaagtgtttcgcattctttaccaccatgaagaatcgagacgatattggtcctatagccagtggtgggacagttgctgtgacgcccttgcaagctcaagatgcaccgacttatctttttacgttgtatgattttatttttacatcaattgaaaggagagaagcctaatgacctacctagcggagattcttacacccagaccgatttcactgtcgatggcacacagccatctatctcaaacccgatggggaacccgatactaggtgagtgctattcacctgaacaagtaggattgaaataatcttagtgccaaatagggactggcacaacgagcggtggtatcaattgggtcggatacttgaccactctatacaatgtctcgccggtactcagctacaacttcgccgtcataggagcgacaatcgacaactctattgtcgatagcaaggttaaggatgtgacatcacaggtccgggacctcgagttagcatatagcaagaagcctacatctgcaccatggtcttcagataatgcggtgtttgggttttggattgggatcaatgagtatcgcgccttaataccccgttgtcagttatgttctaatgcttccaatttgtagcatcggccgcggtcatcaaaacacccaacctaatgtacttgtgccgacattaatggcccagtacaaatgtcttattgaaaaaatatatgcatcgggcggacggaggtttcttttcctcaatgtcccgccgacagatcggagtcctatgatcaccaaacagggaccggaagccgtcaaaacacacgctacgtgggtgagggcttacaatagcggccttcaatcaatgatcagtgactttaagtccaatcataccgatgtacgttttgatctcttgcagtatgttcatataattaacctgatcgtagactactatcgttctttacgatacctggtcctttatgccgaagattctggacgatcctcagacatatggatttccgaatgccacttgtttcaataaggatggcacatcctgcatttggtgggatcattatcacccggggcagaactaccataaactgcaggcagcagatatggttcagtacttgcagcctctcggtgcttggtagactggcagaggcggagcgagatagatagacgtgaatcacaagaggggatcaaaaagcagaccatagaatagttagcagtatggaaaatcccaaacacaagtcgtatagaggttagatatatatgtggtagacggacttaagcggaagaagcgtgtaagtgatgcagctgattggcccgggcaaaaatatcccaccacttcggccgaacttgacggacgaatatctatgagagctaactactcaacgagtgtggacttcttttttgttcttttgtttaagattacgtaggcctggcttgacctcgagtgctgccttgactcttcagggctgttgcgcccctttctcggccgttttgtctctactcccgagattattcctcgcccaaaggatgatgctgtacaacctccaacggtcattaatctgatcaacctctttagcaatatatcgtcggttgacagatgatcttatccttgccttttcactgtatggggtaagatgaaatcctgcacagaccaagaaccgcgaaagcggatgagaaaggggaccagaagttgcacagagtgtatgtgtcaaatgattgataattgatatctcggcgctaatagcgttcaattataggtcgtcgacgcaagatccgatgcacattccaccccaaccgcccagaaatctgtaatgagtgtcggtccagaggcatgaaatgtgttgatcaagaacatgcggttatcacccctccattatccggctaccagcggaactcccaacttggcgaacagccatacagcctacgagcgagtcgcgcacctagagaacctcgtggagcggttgaccgaccgacttgaccaacgggactctgacactccgtcttgtgagcaccatgggataaatcaatgttggtatctcctggatacgtgtgtattgatatcgcgtgattgacattaactagcggacggcataaatcacccaaggccactggctgccgagccagacgaactaggcccatccagtgaccagatttgcaatgcaccaatactacaactgttcgacaactatatcgtgagccgccaagaggactcgtcgaataatgataaattcaccggtgttcatgatatgtcgccaaaggccgaagcggtgcgtgccgaactcatgtctctccttcctcccgcagaagatatgaataagataatcaacgcgtcgttccactggtacgtgtggcaagatcatctcccagagctgttcgatcgacatgtcggcagactcgcttttaatgaaaattgtcgcgataatctagtggctcccgccgaagtcgccaaggcactcatgtgcctgtgtatcagtgcgagtcatgctccgtctgaattcgacttcggtactttaaccgtgccttttgagcctcaaaaattctctgatcgatgcattgagatggtggaccgtttaatcgtccgtgatgacaacttcgcggctaccctgcccggtatagaatgtcagatgttgctccacagagttcatttgactgatggccggctccggaaagcttggctagtgattcgtcgggcaatcgagtttgcccatttagctggaatgcatctgtccaccaagattccaaggccaggcgactccttttatgaacggcgcttgaaaatctggtgttccctggcaacatcggatcgatttctgagtttaattcttggcctgccttatggcatcagcgatcaattctttttaccacagatggaacaacgcctcaattcaaacttatcagctcccgaggaatacgtgttgcgcattggcattattgcgggacatatggttgaccgaaaccaagacccttccaagatgactatcgcagcaacattacgactggatcaagagctgcaggattcttgggaatctatgccaagtcactttcaagtcgcagagccttgtgaggatgagaatcgggaacactacattgagagggtcccgttgcaattcatgctcaagctactgcgtgcttttctccatctacccctgatgctgcaatctccccatgagcctcaattccgtccttgccacacgatcgcgattcaatccgcaagagaaggcctcgttttatacaaggtccttcgatctaccaccaagccctatttgtgcaaaatgatcgactttatggctttcacgctatgtcttcttttgataatccacctgcaaggctattccgatgagaatccatatcaaagtaaagagcaagatgaagaagactggggtatggtaaagaaggtgattgagatacttcgtcaggcggcaacagagctaggaggctcagttgctgctgagtctgcgaacatcctcggcgctatccacgacaccaaagatttcaagcacgattggagctgtctctcgagctgcaaaattacagtgccctattttggtactattactgtcggtgcaggaaccaagttttccaagggtcgcccccaaagcaaggagcagacatcagtaggatcaggcacaatagggacggaggcttcttgctcggaacaatgtcccactcagctctatacgccgccgatgtctgaccctgaaggtgcgctatgtaccaacaatgatgccttgaacggtgcttccctcacacccacgatggcgtctggatatccagacgaatcatggcagtcgagaagtgaagtagtggcaaacccatatgtcggcctggaactcaatgcgtttaatggactgttcgacgattttgggcagtacatgtggccaaaccgtaatattgacctcggacttgatcagggctggaatctgaactggtcagatggcgagccaccaccatgaatttagacacccttgtggctttacttaaatgtctgaaatatttatatgctgtaaattagaacatttgacaatatatgtattccgtcgaaagaaatgcgatttctatcatctgattgcatgaccgggaactggatctgttgccagaccctggtcatgtccaaattggccaagtagcattgattccctgcagtgtcaataccattaagattagatctcaatatcctgttaataaaatgtaatagaagagatcagaacaagaaatcgagcctagagaggtctagaaatgacgttgcccgggggttaaagggggttatgtaagattgttttccccagcatcgacctcgggctgattatctcaatgaacccgtgaaaggaccgtgtgatccctaaattattcccatttgcccgtttgattagtctgttgatgtttcccagttgcatggtcctctagatcctagtatatccttgttatttcaacttgctcttgccacaacacctcctccttgcctaacatacacagagcagaagataaacatggccgaacaacgcccctcggggttggaaaggagtccaactgcgccgccggttctctcaaacggccactttgcttcgatcggcgccgaaggtgatacggcctcctatgagcatggcgtgcaggtgattgatgggaataaggagttcaagtacgaccacctacatctatggtttaactaatcatgagccctgaatgctgatcgcatcactatagtcccaacctgtccaaatatttggcccttgagaaggtcacgccagctggtttcaactaccatctcatctccgtgttcggttcgcaatccaccggaaagtccacactgctcaatcaactgttcggtaccgagttctccgtgatgtccgagctggaaagaaggcaaacgaccaagggtatctggctttcgaataacaagaaccagggcgaagctggcgcgacggagcgaatggctgataacatcttggtcatggacgtggaaggaactgacggtcgcgagagaggcgaggatcaggactttgagcgcaagagtgcgctcttcgcgcttgcgacgagtgaggtccttattgtcaacatctgggaacaccaggtggggttgtatcagggagccaacatggggttgttgaagaccgtgtttgaagtcaacctgcaactgttcctaaaggacagacagtatgtatacttctgatggtccctttctctatcgctttaggtgctaacctctctccagcaccacccaccggtccctcctatttttcgtcattcgtgatttcatcggtaccacaccactcaagaacttgcagaagacattattggaagacctctcccgcctctgggacactatatcgaaacctgcgggtttggagaagtcgacaattcacgactactttgatttccaattctatggactgccgcacaagggttatcagcctgaccagtttgtggcggaggcaaaaaagcttggcctgcgtttccgggaaggtcaccgagacccaacgagggatgctcttaagggcgagttctccgaaggaggagtcttcctcccagagtatcatcgccgcatcccggcagacggattcgcacactacgcggaaggaatctgggatcaaatcgtcaacaataaggacttggatttacccacacagcaggagttgcttgcgcaattccgttgtgacgaaattctgcgcgaggtaatgatcggcttcgatgaggcgatcgtcgcatttgaggataagcaggccgagtccgtccgtgctggtgcgccagaggttctgggaggacttggcgttgccatgcgtgctgcgcgtgtcaagacgctaaagagctttgagacggaagccagccgataccacaagggtgtttaccaacggaaaagcgctgagcttcagggcaaggtcgatacccgcctcaaggcacttttccacggccagctgtcggcagctcacaagtctggaatccgtgacttcagtgattctgtcagtgctactgtgaaggatggccaaaagaagggcggcagttacgacttcgcggaaatcgtcaccaaagaggcccagtcttcgttggagaagttcgaggaggttgccaattccacgttggtggatggagcctcttggagcaactacgagcaagagctatctttgtataagaaagaactggctgaggtcagtgccggactgcgccgcgatgaaatgagacgtttggccacccgtgtcgagcgatgggttcaatcccgcctgggtgaatctgtgggccttgagttcaatgccctcgggtctggaagagctggcagtggtgcccccgagaacggggagaagcctgccgagaaggacttttgggatcggatctggaacttgttcgaagagactgttcttgacgctgagcggagattcacggaccgtgcgagcagcttcgatgctagcattgatgaggtcgatgttggtctttggcgactgcgccgtaagtcttggggtgttctccgcgccaagatcgaagaggagatgattgagggcaacttgctcctcaagcttcgggagaacttcgaggacaagttccgctacgacgaagccggagtgccacggatctggcgcccaacagatgacatcgagggcatttacacccgtgctcgcgagtctaccttgacagtgattcctcttctgtctcgtttccggctggaaagaactactgccccacccccgcttgaccgatggattgggcacactccaagcaccgtgacatctgcggatgaggaggatcttgcccccatcgggggggtagatgaacatgagggcaagagtttggaagaagagatgacaattcttagcgatacgaaacgccaagagctcactgtacgattcaagaaggccgcggacggtgtctatgtcgaagccaagcggagtgccattggcggtatgacacaggtccccttgtatttctacggtttgttgctggctctaggctggaacgaaatctgggctggtaagttttcattgatgaatccttcattttcgcagtctgtatactgacgttggtcttcagtcctgcgcaacccggtttattttattctgctatttgcgtgtgctatttgcgtatacatcacctatcagctcaacctgtggggtcccatgctgaagatgaccgaagccgcctcccagcaagctctggaagaaggcaagcgccgcctgcgcgagttcctcgagtcctctgacgctggccgccaggctattgctatgtcggctggggagcgtgctgcgtcttcaggccgcaaggaagagtatgaaatgtcggatatgcaaaagagtggctcgaaggctagtgatgacctggatggcatgtaactaccttgctcttctggcgatcacactgtactttactttctgtagcttctataagcatacaatgtggactttttgactacaatctctttgcacagaacagaagattcgacttttacgactttgactcgattgaacaacttactacatatttcttgcatcgtcgttgtgaatgcatccacgcattacaggggatggtgggggacagaagaagagaagggggggtttatactcgcaggtcaggtgaggacgttgcaccttccagaaggatatcgattacgttattaggcaggtgtacacaggttcagaaggaacgacaagggttctgcattccattgggatacagaagggtgcggcagcgcgtgaaggcatattctgggccttcttgatttgcttctatttcatcggaactcaacttctacatcagctcttcggtgatatcatatcctgctatgttagtagcatctcaatggcgaccttgatataccaaattcaactactgcgggggtcatacccacgtcaagggtccggacttcctccgaggtggggtaggtatatattcacccaacccagcgactaccaaacttagcttgtgcaatgtgaagctttgaagttatttggctaatctccttcgccaattccctttatcctgaaccatgtccggtattcctaatctccctgagacattcgatgatctccccgacaagcgtcggttctggcctgggaccgcagggtcagaagaagaagggctgggaatgctccgccttctgacgcccgagttagtcgctcgcgccgcacaaacacaaatccaaacaggcgagcgggtatgcttaaactggaacatggagaatttgaacccaccaggtagaacaagggcacctaaccgttgaataaaatgagaacctgtaaaactcacaactcgagaaaccaggattcggtcgcaaaccattcgagcaccgtgtcaaatgggtcgctgagggtgtcgctttcgatgacgagtaccacttcaacccacagcagtcctcccagtgggacggcctccggcaccacaatgcgccggccccaacaccagaagacgaagaccgacgccttttctacggcggtacgacggccgaggaaattctaaacgagaactcgtcgcggattggcattgggttttgggcgaagaagggtattgccgggcgcggcgtgctgatcgattacgtctcctacgcggagaggaatggcctcagcgtaaacgcgctgagtcggcaagtaatttcattggacgaggtgcagaagatcgcgcgcgaatgcaacatcatattccaaaagggcgatatctttttcttgcgggtcggcttgcccgggacgtgggagcggatgtcggccgaagagcgggtaacatatagtcagcagggcatgccgcagcatgccggaatcgaacagagtgagcgagtgctgcgctttatatgggataatcattttgcggctgttgcatccgatgctgttagctttgaggttttcccgcctctgaacccggagttcgatttgcatcatcatcttctggctgggtggggtgtgcctattggggagatgtttgatttggatgaattggctgcgacatgcaagcgtttgaagcgttggagtttctttatttcgagtagtccgttgaactgctcccggggagtgtctagtccccctaactgcatggctattttctaggttcttttaagaagctttaatccaaggcaatttgtagattcataacccgatttatcatttggggagtacggagtatcttaatgtcatatccattaccgccacgtgacccagccaacagacacctaatatataaggccaacatttttatatgacccacttttcccttttccccctttgcctcggaagcacacggcttcattccaatattgtttattgtacagatgaatcctcgactcgaattgagggtaatattgaaggtcgaaatcatgtcttgaacatgcaaatcttagcatgtaggcctttttgaaatatgactgatctcgacgctcagccacatcctagaacaggctaacgctaaggtctaaacatcgctagatttatcctcatgattttttttttcctttataggcgaggcatgctgccgccatgtgaaaatttattttcctctctgaagatatgccgcccaccatcaaacgggtggcggctcttctgtcctgcatcctcctagttctagggctctatatttactatcaacctgaaccatcacgaccactcacccacaatggagtacttgacaaatttcctgccaaaaagccaaatcgacagcaattgtttgatggctcttgggattatcagcgcgatagagataatctgatgctcacacaagaccaatgtgaccaggcatttcccgatctatacactgaacttgatcgcgccagggacgatcgcaaatctcgtccgatatccctcaaggaactggatgcaatcccagcccgaaatggatatattcgagctatgatatatgatcagcaggtaaacaacatcatttcgtgggtcatctacttagtgctaagcgtggtctagttgtatgtgatcgacaaggaaggctccatttggtcccgagaaaaagctacactgtctgcgataaatcgagcgatcatttcatcgccagagccgctccccaatattgaattcgctttcaatacagatgactcggtcgatgaattgcccctctggggatacgctcgtcgcgcaaaggacaagtctatatggctgatcccggatttcggatactggtcctggccagagaccaaagctgggtctacacgcgaagtacaagccaaagccgaatgggcggaagaagaagggttgacctggagtaataaaaccgccaagctgctctggcgtggagtgccgatcatgggcccgacaattcgggataagcttcttcaagtgacgaaagacaagtcctgggcggatgtgaagccgcttgtgtggaatgataaggacagtttgaagaatgactacaagactatgccggagcactgcgagtatcaatatgtcgcgcagacagaagggaatacgtactctggtcgtctgaagtatctccaaagttgcaggagtgtggttgtctcgcacgagctggagtggatccagcactactatcatcttatgaaatcgtcaggacccgagcaaaactttgtccaggtgaggcgtgattggtcagatttggagcgacaaatgcagtatcttttgtctcacgacgatgaggccagacgaattgcggataacagcgttcaaattttccgcgagagatatctcagtcctgcggcagaggtgtgctactggcgtcggttgatgcgagagtggaagaaggtcattgatttcgagcctgaattcttcaagatggtggatgggaagaaagaatggagaggcatttccgtggagagcttcttgttgatgggagagctggagtatgatccccgatgaaggcactgaaatatatacatgtgataccccgattcgaagcttaaatttggatcctttcccttattgactaagatacttcgcagttgggatatgctgaacgcgcgagctgggtattattcaactggtttgctggatagcccggtatcagccaagcccacacttatatagaagtaggcgagaattactatactaaaggctacaattaaactatagagattacttggccccctgtaaaactagtgcttcattcttgtgcgagatcaacatttattcgccaagactgttttacgcattccgacccttttccccttcccccccagtgccttcgtgactctgctgcaaaatactaggtaggtagtactcaattaaagtcctacattccaagttcttggaaaatgtgttgttttgagactatgtttacccaaccacaatgatcgtcgcgtgccatcgcttcttgggagcaactacttaaatactatgagacgcaattcctcgtcaggttcctcgaaccaactactttcacaacatcgacactctctttaacgcctttcctagccggagaattactttctttacccaacaatctttactcccgaccaagatgcacttctctaaggtgattccacccctcaatcgttatacttagatgtacacaacttgctaacacaaacagacccttgccaccgcggccacctttgccatgactgtatacgccggcttccctgtcgccagcgttagtttcctctcatgggagaagtgcgacattggccgccccgcactcggcgaggccaagttctccgccgatgtgagcgtcactcctgtgacatgcgacaagacccctgtcaaccgtgactggagcattgacaactattccttccgcgctcgcttggataccaaggacaccgttttctgccacggcgtgaccatctggaacaacgatggctgctctggtgagcctgtgtacttcctgcctttcgaacacagccccttcgccgagggccagtgtctccctgacatcctccagcctggctatgtctctttcaagctggcttgcgagggtttcccctagaggcttaatattcgatttccatgcaatcatgacttccgagattgtcatattggattctatgaagaccttggatcggcgatagatacctacattcattcattgtctgttttctcttatgtgtttcttacttggccctggctcacggataaatctggtattaccgagtacttcctaggctatattttccacgagaccacacttcatagcataatgtttcctaccgaccggcaaattcaacaactaatttctcttccatgaagaacatacaatgcatagataggcaagaagcatcaaatgttggctagtcctgagttttgacgctcatggttctgtacatataacatgaggatatcaaccttattacatggttaggctactgttagcgtggcgactactagtcccgaaattagctcaaccaagccaaggatgatgtttattcaagctggtcaatgacgacgagttcaagtaatctcgcttgacttaccgtgtcgttttgctttgttaagcactcaactatagatcactgaacgcttggcaactgccaaatctgcgtcaagcgaatctagaaagccaacaaaccagactcaataatcatgaagctaaaaagtctggaattctagcacctttcggtagcttattccaggaagatactccaaatttggaacggctaactacgcatagagcttgctagcttcattgccggaccctctgactgaattaatacggcagtaactgtatgacacggttattagcaaattacataacctgtctgtaggatagttcacctgcattccaaatagcgctaataccaaaattgatgggcagtagacttctcggcatggaaacaaggttggagacacttgtctgttctagtcctcctctgaatttgagtctttggcagatacagacaggcaagaagtagagaagaggggtgggctgggaatcagaaattctgtctaatccggcgagggaggcaaggaccgaccacatggacaggtgacacttgcagctgcgctcgttaaagggtctcattgttccttctcctgtcccatattccaactcatatccctattcatacacaaccgtacgactatcatgcctacagacccgaaaattgacaccctgcaccatcaactcttcgaagaggggctgaaggtgtgctgggaggatccttggcgacgagtacatggaccgggctacccacaacgccaacaccttcccccggaaaggggctcattagcgagtggctcccatcttccattcctatctgtacccttactttattaaatattatcttttttatcttcgtcttatatgccttttgccttttcctatctatgggtacttacacgtctgcgggtagttcagccagccatatatgaactcctttccaacccattgctctcgatgccaggttgggctcgtactcggtttcaaccgggtatgagccgcggatcctataattctgctgcccggtaccttagcttagttggtactactactccgtactctatatctatcatatttgaaggatttggagcaagctggagtgctaatacctagcggcgttctgtagatatagtgaagtgaagaaataccctacccataactgctccgtaccggttcgtacatctcgcaaattcaagcaaggagatctggacgcccaagggtggccgggaattcttgtcactgtctgcatgcaaggtgatcatttggcagcctcatatatcattcttcttgtgagattatgcaggggcataggggctagggttactttcggatttaatgcaattcattgaggccttgttgcctgatgttggccttaatactgaccgcttcttggagcgaagcgaagcaatcacaaggtcttcttaaaagttttcgccatggaataactacctccaactcgacaacttttttaccaccttactctatcaagataagctcaatagatttgatttttattagagtgttttgaatttttcaggtcccggtatggcagtcaaaattgaatgtaccttccagagaaaacaaatttgaggtaaatatctgtcgctgaggtgatactattgccgagtctacggggtacgttgtcactattcagctgtcaccactgaagccctattcggcgtgccgtctgccgggtgccgcctgttgtgtaccctctgccgcttgccgtctacctgttacttcccgaagctaaagtcgtaaaaacctcttatattagatgaattaccaattctctattcaatataataaaagtcaagtctattgatatcgagttttgtagggttatcactgaattcaggctcaaaccgcctaagaatcatgcgatgtatggattgtatggcaaaaatagctttatattcatggcgccagatgcgcaggcctccgtaataggtatcttgatttttctgccataccaaactaaggtattaaggcgccattgtatgcattaaatccgaaagtatccctggccctatgcccctgcgtaaaaaattggacgggatctcgaggcgtttcaccatcagagcagtctatttgctgctcatgttgcggattatcggtctggaacgctgcacgtggaaggcaccgtccctcagtgttgcgtctcaatggcgagaccgacgatgccagctgaaggaaaaccttcagttcatagccggatatactgagaggatataaaaagggctgtttattcccgctgcattatatccaacaacattccaacgggccattctgaaaataatcgagtatatgaagagtacaaaaaccccgataccttagttctgctgtctcgccttcgaaagttctacatcatatttcctttaaaacaaatcacaatgccttccgccgttcggccttctgagatgcacacccatgttgccattgtcggtgccggacctcgaggaactagcgttctggagcgtctttgtgcctcggcacccgagtatcttgtcccaggggcacgattgaccgttcatatcgttgatccatcgcccccaggcgcgggtcatgtctggcgtacaaagcagtcggatcaacttctgatgaacacagtcagctcccaggtgaccttgttcactgatgatagtattagctgctcaggcccaattcgtccagggccaagtctctacacctgggctgccgataagatccctggccttggacctgatgattgtggaacccgtgcccagtacggccaatatctcgaatggatcttccaagagactgtgcgacaagcaccacctcaagtgcagattgaggtgcatcctgcttttgctgtccgcttgtatgacacgtcctatggccagcaaacgctcaagctgtcgaatggccgaaccctttctagcctcgcagctgtcattcttgcgcagggtcacgtcccgcttctgctagatattgaacaactgaaaatcaatgcttacgcagagctaaatggccttcatcatatcacgccctcaaacccggcggatgttgatctttctgttattgctcccggagagaacgttttcctgcgtggtcttggtctcaacttcttcgattacatggccttgttaacattgtcccggggtggtagcttctccgaaactcctaacggcttgaaataccacccatcgggcaatgagcctcggatgattgccggatctcgtcgtggcattccataccactcccgtggcgacaacggcaaaggggcatacggccgccacatgcccctcgtcttcaccgaagaagtaatcaacgctttccgcaagcattctgatgctggaaaagccccagacttcctccaggatatttggcctctcgtttccaaagaagtggaaaccgtttattacttgactttgttgaaacgcgataagttggaccagaccgacttccagaagaggttcctagaaactgagccaaagagcccggaggaagcgcaagtccttcgtgactttggtatctcggaagagaagtggtggtcctgggagcgtatccagcgcccacagggagatcaggtcttcaatactaccactgagtggcgtgagtggttgatcgcctaccttcgtgaggatgccaaggaggccgcccttggaaatctgaacggtccactaaaggcagctttggatgtgatgcgcgatctgagaaacgaactccgactcatcgtggatcacaatggtttgaccggcgcttctcatcgagagaatctcgaccgctggtacacacctctgaatgcctatgtgtcaattggacctcctcgccaacgtattgagcaaatgattgcgctcatggatgcgggggttttggaagtccttggtccccgtccacaggtaaaggctcaggacgaggcttggctagtccacccccccgcggggnnnnnnnnnnnnnnnnnnnnnnnnnnnnnnnnnnnnnnnnnnnnnnnnnnnnnnnnnnnnnnnnnnnnnnnnnnnnnnggctgggctagtccactcgcctgaggtaccaggcgagccaatccgtgttaccacattgatcgaagcccgcttgccagagccgaaactccgaaacacgggagatgagcttctttcccatttgttcaaaactggtcaatgccgcgctcacacaattgacggatacgagactggtggtcttgatgtgactcaaagcccataccatctcattgacacccatggccgtgcgcacccaaagcgatttgctgtcggtgttccaactgaaggagtccactgggtgaccgctgctggtgccagaccaggtgtgaactcagtcacactttgtgacactgatgccgttgcccgcgctgctcttagcgcagcagctatcaaggctaagatcactcagaccaagattgatgtgaagacatttccctgtattgaggtgtccaagctccgtgtccatgcttgaagcgagtgtggttatcatgtgcggagaaaaaaagagagggatatattggtgaaagtgacgaggaaagcgaggaatataccggaatggaaagggagaatgtgacatgccataaattttcaaattgatatttttatgtatttgtagttcaaatcaatgtttggtttccagagatagcctgatcttattgcggagcggctattaaatgaatgatcttaatatacaggggtatcccgtagaatgaatgaaacatatgcacaactgaacatataagacaatagtaagacaacagctatcgatatcgaagagatcatgtacgctcaatcgtgaattgcaaagacacctcccatctttgacccccggtgccatacccaccacctagcctgttgcgaatcaagctagatatcttctcccgtagccggacaagattatcctcagatccgttgactcggagcttgaggtttgccatgcacagcccataatggacctgccagaatcgagcgtcgtcaatgccgaacacagcagcgtcggcttcaatatccttgataacatcagaaactccttggccggagtaggacatgagaagcatggagcctagagttttcaccaagcgagttcccaggaagcacattgagaatgcaatggtaccagataagagcttatcgagccaatcatagatccggatcgagaccagaggtagaagcagcagcagagctgaacaagagagggtgagaaagtgggacgggttgctcaagaccgatggaagagattcgatgtacccaaatcgcatagccttaccgattcgagcgtggttcttgagaccaatggctgacacgagcgttgatgagatagctagaattgcagtcacatccacactacccagagaaatccgatcatggtcatgggggtgatgaggctcatgaccagccttctcgaggaaatgctgcaaattatgggagattagatccatccccataaataaaagaagcacagccatagcgaatccggctaaaacttctgcacgttcaaggccaaacgggtggcggatagttgatctcttccaaacttcaaaattgccaagcacatctaccgcaacacataatagagccccgagtgagtcaaatagaatcagatgtgacagtgctgtcatggccaaggatccatgtgcggtccagagcgtgtatgccgcaatgaacatatggcacacactccaccagaagcgggtcttttgttccttcgacatgctagatcggcattctttcagtgttggcatgggcaaggagttcggaagggctaggggcgcgcgaggaggaggctcgaggaagatctggtgcgagatgctactgtgcttgtacttgtggccacgacgttgtcccatgttctgaaacacgagggaataagttaacaatgccgtcgtcacaggtcatcagcgcaattcaactcaccgatttgatcactgggctcttcgccattacagtagtattgaaattgaatggcccggcggatgtgtcgcccaagccattctcgatcggcgtctctgcatcttcaggcgaggttgctagattgaaagaagactttgtggggctcagagtatttctgatttcggcgtccatgataccctttgtaaaggaagccttaagcggtgatagggaattgcgatcgatgggtatccccgagttgatctgggaggcatgttcgtcgtccgctggtggagtgggggtgcgcggggggagagggagaggaagattcgaagccatcgtgctggctttacgaatataatgcctttatgaattgatgtttcctatatacacatgagtacatatataagttcagttcggggctatcactccccccggacgagctccaatgtttctgccgaccatcacgtgggcggcctaaaagcaccctgaagtctgaattatgagataggttcaagggtcgtttggacaaaaacaggtaataaactagtctcaatgtttattctagctgggctcaagtcttattcgatataagcctatgacctgcagaaacatgcacaagtacggaagactttattttcattggttgtgataccataagcgggcgtggggccttgttccataccgagaggccatttttcggacttcatctcaataacagctatatatacagatatacagaggtataagtagttgctgtctagcatgtgggcttatgggggtttaggcgaatgagtttatcgggggagggcccgggtatgcatggcaagcactatggactaacagacttcgatgtaattgttcgaagaaactagtcatttgaatcggccaggatgaaataggtacaacgagagtaaaatttgatttgtttgaaagaaaagtcgggttcggacctggtatatgaatacagagtcatgaaatcagtttgcttcgcaacgctcgtttacactatttcaatatatcgcttcaactccctataaccgagttagtcttgcgtttataggttgcacagtattttcaacttaccaatcagtcacagcttctctccaaagtcccaattcgtgctgtcttgtggctgtgaaaaagtctacaaactccgagctcaaaatctcccgcgcaatacttcccggagctgagaaacggtccaaagccttgtccaaagtattgggaagaagttctggacggtcctctggcgtgcgtgcagacatcggtgggaccttgatctcaagctttttctgtacacccctccagccggctgcaaggatgacactcagtgcataatggggatgtagatcagccccaggaatgcggacttcgaaacgcgtggcacctggcttgcatactggtggcgtgataagacggattgaggcaatccggtcctcgagtccccagctaatgtgcactggtgcccagtagttctccacgaggcgcttgtatgagttcacagtcggcgcaaacaatggcatgatatctggcagagcttccagaagaccagcaaggaaatgacgtcctgtttcggagaggtatgcgatgtccgaccattgagggttcgcctcgggtgtctctcttgcaaacagattgttcccatccttgtcagaaagggagatgtggatgtgtccggagctgcctggcatgccttgcataggcttagccatgaagcatggtgtaatgccgtggtcaacccctaaggacttggttaagagtctgtcgacttgttagagctagaagcaacatttgcggtatttgcggcactcacttgaataatgccactttgtctgccatttcactaatttcggaaaccttcaaggcctatgtagagtgtcagagtagttcacgggatgacctgaacggatgacatactgcttcatagacaccgggccctccctcagtgtgccatccttcaatgccacaatttatctgcgcactggtattgaaaatatcgtagaagtacttcttgttgacaaccggtcgcgttgaactatagcaaaacatgccagctgtaattggccgcaaggcactaggggggtttttctctaagaaggtagcgaggttggggtgctgggagcctgcactgccgtatccatcttcggaaggagtctggaagttcataaattcgagttcgactgtctgatatcagctttttagactccctcgccaaaatttcccgtgacttacctccagctaaagcatgaagcccttcccccgcaagcctgtcacacagactcctcaacatacttctcccatccgcagaaaccgggcgtgtatcatcaagaaaacgcactaggaagaaagggatattttcttcccaaggtagacggcggaacgagttcagatctggaacagccaggaagtctgcgtaccctgattccgggggcgcgatccgagtatcagttgtccatagcatatcgtgcatgtcccagccgaaaagagctgagctgaagccgaatcccttttcagcaatcccaaggaacttctccttggccataactttgccacgaagcactccatcgctgtcgataccggcgactttgactttgatgtcatcggccagaaggctggggagtgattcgagagtgattatagtgggcgtagtcattttggagaaatccaacaatagcagcaggactaactagccgagttcaacaattggggtgtgaattaaaagagacatttcgccggcccctgtggctttatacaattgcgtgaattgtgggttgttgaagttgcgggtccaacatgtggtcgacattaatgccgcgcatcactgagaccgaaaatatccccgcgcggtgcagatggtagacaatagcgcgtactctctttacacgcaactttggaaaacaatggtcataggtgaagctatgatgggatgtgagatgctccgcggtccgcgctgtggggttccgtagatagcgcgcttatcctgtcgaaatgatacagagcttgagagtccggctttggattaaattgtattaacctcatgtgttcattgttcattctgaatctaaagtggaagtacacattctccagtatgataccctccattcgcattcatatcgccgttctcgtgtgtgacacgcctatccagcctattctcagaaagtatggcgactacttttcaatattccaagaccttttgaggaaagccttgaaagacttggaaatatccgagaagttcaaagatattatggtggaatttagtgaacatcagatggtggacaacaaccgatttcttgatctagaggacgtcgacgccattcttctgactggaagtagtatgttaccattcactttgatatccgaatggggcaactaacactacttggtagaacacgacgcctgggctgatgaccagtggatccgtgacctcaccggcaacgttcgtgagactgttttaaaacacgaaaagccggtgattgggatttgctttgggcatcagattcttgctcgggcgctaggggctcgagttggcagaaacgaagctggatgggagatttctgtcgagaagctcaccctgactgagaccgggaagaaactatttggaaaggatacactggcaagtggagaaacatctggacaagctcggttgagggaaattctgattggatacagagcattcaacaaatgcaccgggatattgtctttgatgttccaatcggttgcgcaaacctggctacaagtccaaaatgtgaagtccagggtctttacttgcccaatcgagtgctgtcggtacaaggacacccggaatacaacgaggctataatgtcgtgcctgctcgaagccagacatgagaatgggatgtttgacgatgaattatataacgatggtttatcccgaatgggtgattcccatgatgggtggttaatagcgaaggtaattgcaagattcatagtagattcgaaggccaaataacaaaacaaaatgatattgttagaagatcgagataaacactaaaagtgcaagaaaaaataagtgagataagctgtcagatatgcaaccgcgccggctccgcgctataaattccacctctcccaccttcgggattccactctttttctcaccagatacacaacctacgctatgtcaaaccagatccgtacagtctgcccctcaacgcacgaggtcatttttgaccagcctggcacttcactcaaagaagctaccaaagttgctgctgcctcaaagcaagcctttgagtcatacagaacaacctctctggaggatagaaagagcattgtgaaaagagcattggatatcattgaggagcgtcgcgatgacctcgccaaagaattgactgcgcaaatgggacgacccatccggtactgtgcatcggagatcaacactatgcgtctgcgcgccgagtacttgatggatattgccgaagagagcctatctgatctccctggtcggccagaagccggcttccgccgaacagtcaagcgtgttcccgtgggaccggtacttattgcgggtgcttggaatgtgagtgagcactgctattgaagtatcctcagattagctcatcaatatgatagtatccttatctgactactgtcaatgcccttgtcccggcacttattgctggtaacagcgttatcctgcgcccttcaccacagaccccgctatttggaaatagactactcgaggtctttactgaggcaggacttccgcctcaggtccttcagatcattcacgttggagatctggatgtcttggatcaggtggcacagattttcgagatccagtctgtctcattcaccggttcaactgcaggtgggattagactcagggaggcaaccgcccatcacatcaagcctgttaacctcgagcttggtggaaatgatcccgcatatgttcgtccagatgtcgacgtgaagcatgttgcagagcaactcgtcgacggagctgttttcaattcaggacagagctgctgttccatagagcgggtatacgtgcatgaaaaaatttacgaggaatttgttcgcgctgtgcaggaggagctgaaatcgtgagcttgactacgttcgaaagggaatatctctctgacattcgaatcaggtataaactcggtgatccacaggatgaaagcacaactacaggccctgtcatctcaacgcaggccatggagaagatcacttcccatgtcaaagacgcgattgctaaaggagccgtcaactctactccccagaacctaagctttgaggtagcaaccaaccctcaaacccaaaaaggtaactttgtctctccggttgttttgaccaatgtcaaccataccatggctacgatgaaggaggagacgttcggtcctgtgatgccaatcatgaaggtctccagtgatgacgaagctattacattgatgaatgacagtgagtatggtctgacggcgagtgtctggacgaaggatatcactcgcggagaggagttgatcgatcgcattgaggccggtacggtgttcattaatcgctgtgactatccaagcccggtaagatattttgacaatttatcgacttttcgatggctcactaatgctaatattgcacattaggaccttgcctggactggttggaagacgtcaggtttgggatgcactcttgggccacggggatacgatggatttgtgaagctgaagagctaccacatcaaggatggctcagcatgagtaggcgggtttgaagatgattaaataatgttgtgatctagaacaattcaagaaatctcaataccgttatttattggatattgtggcctttggccgtcacttgtatgcctcagccatagacggcatagaccctcctacgtaggacaactctcaccctcacacagtagccccgcaacagtttcattcaactattcaactgtccgatccgagcatgtctcctacaatttgaacacaagaattcaccatagccagctcatgaggtttgtaattggtaacccccgggcctgtgagcatccgtgggatgctttatccaaagagacccccactataggtagcgcggtcccggaccgcgctcccttaggcccaagacccaaccactaccggaaaatgcttcatgcacttgaacgcgtgaagatctatctaacagctacccctcatgccccgcatgttgagctcaccgcgccatcgggtggggtagtaggagcgcgatggagctttgaacttgtaccacatttgtgtgaattgagatgactcgaaaaagggaaaaggggggaatatagcgcgttgacccgcgcgggtggtctaattaccatgtggacttgatatcggttggagctgctccggtatggagattgtacaatgtggactggagattggagaattggagataggaaatgctataaatccaggccgttaccaagagccctctgcagtcatttttattcattcttgtcaaccacccaaaccgttccattctccctagctccttcaatcatatcacacacacaaaatcaaaatggttggacgtcttgaaggcaagaatgctatcatcaccggtgcagctgggtatgtacctctatcccactatccaaccgaacaataaaagacagaactaacaaaagcagaggtatcggtctcgaaaccacaatcctcatgctccgcgaaggcgcctccgtcctaatgaccgacattagtgaagcaggcctagacaaagcactttccaaggtgaacagtgtcgtgcccgcctcaacccgcaccggaaaggtcgagactaaagtcgtcgatgtgtcaaatgagtcccaaatcgaagcagcagtcgctcatctcgatgcctggggtggattagatatcatcttcaataatgctgggatcatgcaccccaaggacggagattcggaagagtgtcccgaggatatctgggatcgcacaatgaatatcaatgtgaagggcgtgtggtatggctcgaagcatgctgtacgcgcattccggaggcatggcaagaagcgcgctagcgtgattaatactgctagtatggttgcgctggttggggcagcgacaccgcagttggcgtataccgctagcaagggtgctgtattggcaatgacccgggagctagctattgttcatgcccgcgagggattccgattcaattccctttgtcctgcgcctctcaagtatgtgatatcttggcatttccccgttcaaaccctttgatggaactgacattcagatagcacacctttgttgcaggattggcttggtgacgataaggaaaagcgcttccgtcgtgaggtgcatttccctaccggtcggtttggcgaggcgattgaacaggcccacgctgtgatcttccttgctagtgatgagagcagtttcgtgaatgctactgacttcgtcgtcgatggtggtttgacaaaggcatatgttacgcctgagggtccggcgacggaagcgccgaagaacttggctgcatgaacggatggtgactttgctaggttgtacataatatgagtaacaggatgacgctcaacatcatgcaaatgagatccatatttggttttgctgcattgcccgagaaatattccatggcccggcctcggacgcaggtgattcccacattgcttcgagcagtagaagtgttcggttcatattaccaagaccaaatgtctcggtcatggcattcaatcgtcctcgtaggcaattctgttggtcggggttgagaaggcatgagcccaccacagcgatcggccaacagagcccggagttgatgcgcgcactgggcgacagctcatccaggtatgacatggcttctgtcacgacattttccaccatgcctttatacattccatctctggtgtattggaatccacctaaagaggtgtacagatagacgagtatggcttgttggaaaattagcccagccagacggacctccgtttcgacattgggataaggtgaccagcgtagaatctgggcttggatagatgcaaacatggcaatatcatcagctgttggaattagcgcctgcgtgtcgtccatgatccactgtcggccaagatcgaagatacacgggatcagcagcaatagctccagccagcaaccgcacaagttgcccacgtactgagtctgaagtaattcacgcgaccgttgttcgagatccaagtttaagaagatttgcccgctaaagcgagcatcgattgagatcatgctgacggtcgcagtataggtgtagtattcgatgacgaaatctttcaagtctcgtggaactgccgagtcactctgggcaagcaatttgactaacaacgagttggcggcggataagtggtcaaatattgtcccgttcatatcaccctttgctgtctgtttttgtcagattgttgaacccactacttttgaatcatggatttcctacctcggtaaaacacatcagaagtgccccaactaggagcacgagggggttcgattctttgccgttgataaagtctgttactccacggcggaaatgctggagggcttttgagtagtggctgtgggcaattgtatccgattcatctcgtgaccgaaacgcgcggtgagcggcgctttgagtgattaccagctgcagcagcaaatcactagaaaatgccaggggtacaatctgtaccaggaaggggttgacaggcgtggagccatttgccatgcagtcggctgttgtggccacgtaatgactgagaagctgataagactcagcatcatatccaggcatcatggataggctgcgcggcagcacgtttcctattgagaaagaggcgacaagagaatcactggaaatggcagtcctggtagacgttgacacttgtcgtcgattatggatctcctcatgcagcgttgtgtcttcaaattggtctccggtagtcaccgagtgccctgaactcgaagaaatcgatggcgttcggtgagttgagggactcctaggcatcgccatttcgtgaatttcttcggaaatattcgctcggcactcatctacagtaggtgcttgagtttcgtcctcatggctgggatctctcttgccaggtacatctgggggccactggcagcccaggtcattgcgctgacagccagcacagattggatgtgtctcgtcgcatttcttcttgcgacgcctgcaggtcaaacaacctgttcttactcggacaattcgctgcacacgtcgatctggcggcatctttgattagaggagatcaaaagaaggcaggagattaaaggatctcagcgccaatctaacggttatctctgggtagagataagaaagtgtggggtaagccgagccggccacttctattcccgagcacgtttagagaggtttgtacaaaaatgggtttgatgggcttgatggtttgaatggttttaatggtcttgatggtcttgatgttcttgacaatctttctaatatgaacctctttaactgtatatcgagcttcgttcggcagcaaatgatccatcgccacagtattgcatttatctagaaagccccagacctcagcttccttatgccacaaatcgttatatatgcagcactctagcacggactttcacagaacatttctggaaaactccgagtctgatcctaagttattccccggcaactcaagggtcagccacgaactataaaccagcggtctagactcgttaatataagaaaaatgtaacgtaaatcggactaccgaaaacgatcggaaatcggacatccgaagatacataaacaccggcatatattgtatagatcaatcataatgtctccagcaaatctgcgtgatcccgggatagcagcctgtttgtatcggacataaaaccaacacaagtgtcagccaatgaaaaatatcccggaaccgggagaaccctataccggcttcccaatgtggcatatggtattggcgatcagccatcgcacgtgacttatgtgccgaagacccgacaatcaacacctgaggctgcaaacggagccacgaaataccgcttctccccacatgcacactgccttaatgacaacccaagacgggtcaagccgccggtattcaggaaaatttgtgataaacaaaggggcaaatggggtctggccaggggtcatccgtgtcaagctttgggtaccagccaatcactatgcacaatattccaaactggagagctgtgggttttcttctggcggtgttaaggtccttcctgctttatcaccgttcgcaatggttggaatatgccggctttctgcctgatggttttttattgtggctattgatttgatataaaaacgttccccgctgttgcagtctggtcctttttctctagggaatcaatcagtgtcgcgtgcccatctagttggcttcatatattaaaatttttcagtcctttccccaattattctcgattggttctccgcatgagcatcgataatgtcggaccataaagaatctggctcgactagaccacagtcggcatcaatatccagtaccgattccgagtttcaggcatcaagaacgcagtcacgatctcagagcttggctggttctctacggacgaggctacggtctctgtcaaattcaggaatgacccaggtagatcgagtttattcgggtcgacatctcaatgaccagtcggtataccacagcgatgagttcgatgggtccgacgatgatgagccgtctgtcggaaacgagcatatgcccgatatcattcaggaagtacggaacgggattgtgaacgaacgcgatttggatctagaaagagccgatactgcacagcctgaactggagaaatcaaggacatcaaggtcgaaccggtctcgtcacgacccaaaactggtaggttgttccatgttcctaaatctgcattcgatattaagttgtacaggtacaatgggatggccctgaagaccccgagaacccaaaaaactggagcagcaagaagaaatgggctgctgtcatcaccgtatcactattcaccttcatctcgccggtctcttcgtcaatggttgcaccggcactgccatcactggtagcggacctcaaagtcacagacgaagtagtttcacaacttatgctctcaatcttcgttctagcctacgctgttggcccattattcctcgggccattttcagagatctacggccgaaccatcgttctgcaactcgccaacctcttcttcctagtcttcaacatcgggtgtgcggtctcacgaacgaaagtccaaatgatcgtctgccgattctttgctggactaggaggcagcgccccgctagcagtaagccaagccgcaaaactccgctcaagaaaagcttatatctaaccacatctagatcggcggcggggtcctttcagattgcttccgggctgaagagcgcgggaaggggattgcaatctacagtcttgcaccactcctaggcccagcccttggccctatcgcaggaggcttcatcgccgaaaacacaacctggcgctgggttttctattcaacctcaataaccgacggcctaatccagctaatgggcctcttcttcctacgcgagagctacggtccgaagatcctcctcgaccgcgccgtccgcctgcgcaacgaaacgggcgacgaatcctaccaaacagaagcagagcgccaaaataagaccttacccgaagtcctgcgcagctcgctcatccgtcccttccgcctcctcctcacccagccaatcgtccaagtcctcgccctattcatggcctacatctatggaatcatgtacctcgtcctctcaacatttcccaccctctggacaagcccaaactattacaacgaatcaactggcatcggcggcctgaactacatctctctcggactaggcttctggctcggctcacagatttgcgccccgttaaatgaccgtatctaccgccgtctcaaggcccgcaatggcggtgtcggaaaaccggagttccgcgtcccgctgctcttcgtcggcgccttctttatcccctctggcttgttcatctacggctggactgctcagtaccactgccattggatcgcaccgaacatcggtgctgtactgttcggtactggcaatattattgccttccagtgtatccagacttatatggttgatacctatacacggtttgcggctagtgcgcttgctgctagtgcattcctgcgctcgctagctgggtttgggtttccactctttgcaccgtatatgtatagtgctttgaactatgggtggggaaatagtttgttggcgttcgtggctattgtcatcggggtgccagcgccagtgtttttgtggaagtttggggagacgttgagaaaaaagagtacttatgcggctggctaggtccttctgagtttttttaacattattatgcttagaaggggtttttcaatcggctaactcaatatttaattcctttgctgcgaaagtaagaagctatggcgaacacggctgtttttttggcatgtggccgagattgtcttcatgaatgcctcgggccctataactgatactttatacccctggtttgtttgattcaagacacggaatttatgccgaagcacatgtaagttttccttggtttgactctcctagactttctctagtcggtgctcgatctgcaggggtttccaaggtcctcgttagttacgagttacgacacacaaattggaggttgaatctgaatggaatgccatcgttaattcgaccagctttgcacctaaaactcagtgtagaattatatatacgatattgtcaagccttatttactttccatcttcacataaggagacactaatactatactgtgctgatggtagactgtaagggcaagaggggacatcaaaggtatttagatccgttacaacaatgtttagataaaagaaagattttatggtaaaaagtatgtattcaaatcgaatgaaatgtcgagaaaagagaaagagatcgtagagcagactattcacatactagtctgcccgctttcccgttagacacagggggggtatagagattctatggtcacatgataatatgagatccgaaacagatgattaattcgattcgctccgcgaatctcactcggccgacatcaaccaagggcaactgacgattggagcttttactcctcgtgcttggtatcgccattcttggcctcactgctgctgctcatggcagtctcggccttctcggcctcagtgttgacctggaggtcggaggtatcgagacccagttcgttctggaactgggtaatttgggcaatggtgagcttgggcatctcctgtgcgacccggtaaggccacttgccctcaacgtgggccttggcgaagatgatgtcaacctcctcgagatcacgaccggcggtctcacagtagaagaaccaggcgaaggggatggcgataaagttgataagcgcgaagaagaggtagataccccagtcggactggttggagaacacaggagtgaacatgacgacggcgaagttggtaatccagttcatgcaagtggaagcggaggcggccttcgtacgagtacggagggggttgatctccggggggtagatccagggtagaggcagcgtagtaaaggcgaagaagcagatgaagaggaagataccgacaatcgcacccttggcgttctgcgagttcgacctgacgagacaacccatggtgatcatgaagctgagaccctgaccgaggaaaccaatcaagaacaggttgcggcgaccgaccttctcaatcataaagaaggatgggatagtggcaagagcgtagacggtggcgaaaacacctcctagaaccaggggaagcttgccctccatgtgcaagttctgctcgaatagcagggtcgagtagtagatagcggcattgcaaccagtgaattgctggaagaactggccagagcaaccgatcgccatacgctggaagtgctgagtcttaccaccagtgaagaggacacgccagctactagcctcaagactctccatggccttgagatcagccttcatcatgttgaaatcggcaagcacatcgtccgcatcgacagcactatcgttgagctgcgcgagaaccctgagggcctcctcatcgtgaccctgcatgacgaaccaacgaggcgactcgggcagcataagagcaccaccagtgacaagcgcggcgaacagaatctggaaggcgacggggaatcgccactgaacggagctgtcgacataagagagaccgaaatcaatccagtaggcgatgaaggtaccgacggcgatgatagcaccctcgaagcagacgaggaaaccacggttgtgagcgcgcgaacactctgactgccagacggggatagtcgcggtatccatgccgtttccaagaccagagatgacacgtccaataacgaactggcccagtccccagtggggaccgaaggcagcagtagagataactgtaccgatgatcatgaggataccaccggctaccaggagaggagtgcggccaatacgctgaccgtacatcattgtgaagatagcaccaaagaaacaaccaagttcgtaacaggcagtgactgcaccgcgcaggacggcgacgtgttcagagtcaccatggagaggggggaattccttggtgaactggtcaccagagatgataccggacatcaaaccctgatcatatccgaaaagtgagaatccaacgacggatgtgaaggtgatagcaagatggagcttcttgccccgtaagccggaggttgtggtccacatgatcaacgtcctctattagatgagagggaaataccaaagcgacataagaagaaaaaggaagctcagacaccggggggaatgtttctgtaccttatatgcattcagtgcgcatgtccattgggttagtgccaagaagagaaaagttcggagtgacatcggcggcgcttcaacattggataggcaagtcttgcgacccgccgtgggggcccaggaggggctaaggagggggccaagggccaaatgagtggggttgcggggatgcaacaagcaaatctcgcggtctgccaagtgctccgagcggcgtgtgtttaccgttttgggccttgggttatctatctcactacactaactgagcaacgttacatggaatggcgtatattcgttaagatagcaggcttgctcgtcttcttattttctcgtggcttttgtggggggtggatcacaattcccggggggcgtctggaggcgtctggaggtgagcgacgatacttagccggaaagggaatcttacccgaccctccacgacctccgcggccaactccacgacctgcaagtactgggggaataagaaattagagggggggggaaggtgggtcaggggccgaggatttcattgaatggccattcgtcgaccgcaattggcagtccattggtttttctttttcgcacgctcggtgccgattggtgtggcccgaatattacgtattcccatgcttccaacgatctcgtgaaagtttccttttttcttcggaactgcgtcgtgcccgatgccccggccggttacggcgacgggtcagccgtggactgcaataatttcccggggttctgaggggatgccgtcttgagcaatgatcatcgggatcacgagccatattcttctccatattctactccatactctactccatactccgtggtcacatgagaactgtgggatgtagactaacggcttgcggactcaacaacagaacgtcccatctacggggtatgagtatgcccgatgcagcccttcccgaagacaccatcccgaagaagcatcccgagaaccatatcaaagagagtcaaaaaattggggaggaaaagtgggcggacccattcgccaagatgattccgcattaggaagggataaccatgtcaaagacagcggatttcgaaaacttttacaggtcaaccacacttccaagatcaggatatttgcttactccttcttggctcatcaaccaagccttccaagtacatttccaagaaaattccaagaaagcgaagcatttgacaagcatagcttggttatatgcctattctggccatacttcatacgccgtatgggagaaaaaaaaaattattcacctgggcccacacaagatttcgggaaaacactgaaagtcaagcgggcattatcgggcacttcacctccgatttgatatcttcgccagtaaaatctctgctcgtcgggatatgaaaataatggaacctggattggtagacgtgcatgtgagcagggaggtacaagcctatattaattttcctattggaccaataacacaattccccgagtggttgtacatgtaacatgggcgagacaaccctcggtaccttcgcgaatcagaacatgcgctctgtccgcgatgatgccatgttagatttgagtgcaacgtacatatctcttggcacccgttaggcgtcgtcgcttaggagggtccccgacatattgtacgagacgagggggagccgatacttcgcgggagtgcagatcacggcaaggccgttcatagtccaaagcgaaactcctaaaacgtcatagtaaagcgccttctaagtatgtggcgcttcgagggccttggcgtgccccctcaagttcctcgtgggaatcatgggaaacagattgccatgtggccagcaactctccgcaaaacttccttgagatctgagagacctcgggtgttacttggaaatgaatcccactatccctgattggtttgtgtaatgtcgatctccgttgagatctggcagatgtgaagccagattgatcagggtagtttgagctatagcaataatgtctgtaattggattatggtaaaaagaaatcattgaaatacagaggtttgatcgggtcggcattcaactttgggcaatgcgtcaaagagtatttcaatagtagtttcagcactatctgaaaagtatcctgccaactctacatgagggcatcggcggtgtgacatcagtccataaacggtcaacgcgcttggactgcacccgcccatattatatcaaaagcatatcagaaaggagaaaaccagctttgagatagagggtcgtttctacactgttgtactcattttattatcgatctgtctatcttagattctgtcgttcaaaaatcggaggattattagtggagattgtggagatacatatttcctggggtagaggtaaactggggatgcccccatactcatcaacatagtctgtagatcgtacattggaagaaagtcacaacattcggatccacaatgattgtgacaaaatcgaagaactattttaatgtggtagaacaacatagtattcaatcaactttttaaacactagggtaactgcttatgttcacatctgacacggtgacagtgtatcatatatatatatatatatatgtcgattattggttcccagtgataccagactgcttcttaccgtgcttctgtaaattattagcattagaatcatcagagggaagaatgggaaggcttcataccagagtacgcgagtacttgatgcccaggttgtttccactggcctcgtcatacggcacaggactggtgtagtcgcgggtagcgtgaagaccgtggtaggtcttcttcacgaccttagcaataccattaccagcagagcactcgccatcggtgagaggaacgggccacttggcggaataatgcgagtcagacagggggccagggtaagtctggttgaggtaggcactgctgagatccacttcccagttgacgtagccggtcctttcagcgacaatgtccagcaggttggcgccacaatcccagcggccaagcgatggcagaccccagttagcggacagggaggcaatgattgagtagtgtgtgtagaaagtgtcgtcggtggtacccttcaggtgttgggggacagcgcctccaaccaggacgctgaagacccggttggggtgggtgtagttgcctgactcgtcaaaggtgagcaacaccaggctgttcttgctgaagtattcgtttttcaacaggggaggcaggaagctttcgacccagttgccggccacaccgatgttggtatcgtgagcgtcgttggtcatgttcggtgtgatgaacatgtgttggggaaggcggtggtgttccaggtcatcgtagaaagtggtgaaattcttgatttgacgcgggcgcacggcgtcgttggtaaccgagtcatacagaaccagcgggttgtgcttgcgcacgtactggttcgcgccgctgagggggtaccgcatgccctggtagccggcatagggcatgtcctcttgatactcaccccaagcgatatgcctggtatcaaacagatcggcaatggttgagacattggcggggatctgcaggaagtcgtcactgtccatgccaaatgtgtcaccaccggcagaagcacagtagttgggttccgaggggtgagtgacggcaaagtagttggtcaggaggataccctccttagccagcttggccaggttcgcgtctgcagcagcggtttcgtagtcctgcaaaagggtgagcacgtggtcattgctcgttatgcaagggggggacctaccgtgttctcgagccagatgttcacaaatcgatcaaaaaccaagcccctcacgtttgacacaggagagtaaggccgggctgtaagacggtctgcatcgatttctgcctgagtcgggttcacttcagtggtagtcttggccgcagccagggccagggccccgacgaccgcgagaagagtctgcttggtgaacatatctgggatcgctgtgatgagatagacaacaaaggagcagatcggtgggtcgaacacgcgatcttatactccagccagcgtcggaggcatgacattccccccatcggcaaaaatgcgctatgttacacggcactcttaaccgacaccacgttgtgatcgatgcagggctaactggctgtatttccaagcgtttttttctcccgagctgtcaaggcttgaatagaactgacctgaagaaattagagtccgaaatcaagttgatttgattggatgaatggcagatagtggaccgggtacctgcccgccgctggtccctgcgttgcacgttgttactgttcgtgccctcactggctgaccccctacgctcactggcccgccccggtcaggaacagctctgggctgaccatacactcaccttccttgagcaacgtgatcactatatattaatttgtatagtaatttctagattgttaataaaagcttttgccgaggagggacatatgcttacctcttcttggctcagaactacataactcaagtacggagtatgtgtagtattacaacaataatgataatttatacttactgaaggggagattatcatagacaccagcaacactcatgagtaattcttatatttcgtccttgcttggtaaaatgactgatatttaaggtgagctcggtatatagtacaaaaagcacttggttcgaaaaatagacaattcaaagccggttagatatatcatctagatgattcgtggatgccacgggcgaggaattatgccatttggcacttaattttcactggttaatactacctgaccgtatttactacgaagcattcatggatatatatatatatatcaggatgcttatcttctaagttggctatgataaatatgttaccaccatatgaatatactctttagaagggttttggctaacctctgtggtaggaagaatacttctacattaaaaagacaactagaacgagaaggccgtataggcagccgactatttttgtacccgtagctctcgcctgtacgtgcaaagatcgcgtgagtcgggaaggaccttggatttgttttcttcctttgtttctccatgaatataaggttcgaggctatttggtaaccaatgatacgacaaggaagagaataagagctacagtttgtgaacgaactgctctgatttaagttaggcctgagacaaacaggcacataaactttaatccaacctctaactccgtaattatgcgtgtatgccctaaaaattggtgattctggatcttctcattaacccttaacacagcgcaccacggctgtcatgccaatcctaagactatgggcaatttcgatggctctggtgaaggctatgaagccgaagcattgtagaatagctgagcttttgcttagacccacatacttttcatcaaattcaaatatatggtgctttgactttgacttcctttcaactctatccaagtagagctatggtggagttgctatgtgtatggtgatagggagctatatgacactaagagaagattcaccggagtttgttccttcggtttcaaaatacttataatatggaagggaggatagattgttttctcttgcaggtcacaatagtccgtatagcttctttgctgtcttaatctaaacgagtcaccgaggttcgcaaatacttgtagctttaacagcatgtgcgccgcgaatatacagagaaaaaaattcacataaaaaagtaccaatcctttgctcgttattcttgactcaatgactattacattgttatcttgacaggtaaaaaaaaacaacagaaagaaaaaaattaatggcaccatcaattaggagaaagcggcacgcggctcgttctccgccgacattgggccagacttgagccaagaaaaatcccctggtgacatgcggagggtgaaaagaaacgaaataagatgaggacaccagggaataacgtgcacgccgggagtaaatgtttttttacacagaaagaccgctaacaccgttgttgctcaagatttactcaggcttcttgccaaccatgaggtacatgggggtgaagaggtttttctcagcaccttcgaccagacaatcagcagccaaggccagactgtcggcggtcttctgggaacccttggggaagagaccgatggactcgccggcaccgacgaagcggtgggcaaggccacggccccaccaggtcatgcgagcgatggtgaagaagtcccaggccgagcccatgtgcttgaaggaacccgccagcgggtagtaccagggaatagggtcgggacgggcagcgagatcctcgtgatgcttcagttcaaagccagcgttcttcatggcttcgagaccctcggagatacggaccatgttggagataccgtcaccctgctcgataccgagacggatgcgacggtgctcaggatcatcgttgttataatcgtcggtcatgagccactcgtacacagcgaaggtaccacctggcttcaggacacggaaaatctcgctgtagacaccgacaagctcgggggcgtgaacagtggcttcaatggcgtagacggcatcaaagctgttgtcggggaagttcatctgcatgaagtcgcccttgacgaaggccatcttgtccgaaagaccctgcttttccgcgtagtgggtagcgcggtcgatctggtagtcgttgttgttcagaccggtgacgtgagcaccagtgaacttgaccatctcgcgagcagggccaccgacaccacagccaacatccagaaccttcatgtcctctgtgataccagcctggagggcaaggtagtgctcgtgacgggcaatggcctggtggaaaggctcaccgtaggcgaaacggcagaaatggaacgaagaaccccatccgtactcgtagaagtcggtagccaggttgtagtagctgtaagagaatcattagtatgagtcgcgttgatcaatgggggttttccaaacgtactgtctggtcaaggtagcatattcagccttgcgggcctataacacagaaaaagttagcgataaggaccaattgttttggatgcctactgccatacctcacgggtctcgggtgtctcatcagcggcattctggttgtcccaatgcttgaagtactcatcgacggcggccttctgggcggcggcgtcctttccgcgcatagcagcaagaccaccctgggccttggctgactttccatgcagagccttgttgaaggcagcgtcacgcgccttgtcctcacgttccaatacagagggagccatgttgaaggaatgagtcgcaaagattaaaaggggtagagtaaaaggaggcaaaggcgtcaatttccaagaatttcctcgagaaaaagacaaaaagacaaggtaaaccgagattggaaataccacaagagaagcgaagcaagagagcacaattgaagggaatggatagcgacttggagaagtaggagaaaggggaaataaataagagtcgaatcccaagcaactttttgacaatccaaagtggagagccaatcagggggttcttccgaacgactagaccgagccttagtgtcctccggggggcagattggggagtggccacactctctttccctcgcgggacagcaagttccggcctgtggctgagtcggacgctgtacctcccggtgggaaaaagggtgacctgaggcacataatcacgtgatacactagccacattgtggcacacgccacttctatcaatcttgatactagccttggaagctctcacctctctccactgacccatactgtccgatatgcctcctcaaatcaagcatgatttgaatcgatccggctgggagtcgacagactttccctccgtttgtgagaactgccttcccgaaaatccatacgtgcagatgatcaaggaagatcatggcgcagagtgcaagatcgtaagtcttttttttctgctcccccgaggctagttcataaccacatactaaatatttagtgcacgcgaccatttactatcttccgttggaaggccgatcggacctcccgccaaaagcgatccattatctgtctcacatgcgcgcgcctgaagaactgctgtcaatgctgcatgctagatttgtctttcggtcttccccttgccgtccgtgatgctgctctcaaaatggtcgccccaggaccggaaagctccatcaatcgcgagtattacgcgcagaacaacgagaaggaaatcgaagagggacgcggcgctattgaagaatacgaaaagacagacgacaaggctcgtgagcttttgcgacgccttgcaaacagcgaaccgtattaccgcaaacccagacgaatcgaagcacctgccgaggaggagaaagcggaggaaggcacggcgacagatcaaccacgaacaaacagtcggtatggaaatggaccaggtccggttcgcaccagtgaaagccgcgccggaaaccgccttccaggccggggaggacgaggtggtggccgtggtggccgcccattccccagtaccacccaattaccgccatcggctgcagatattcttccccctaaggatcccaacgtcacttccttgtttattacaggcgtggaagacgatctccctgaacatgcgcttcgcacattttttagcgaattcggccagctccggtcgcttatttgctcccaccgctcccattgtgctttcatcaactacgtcaaccgtgcggatgccgaaaccgccgccaaccactgccaaggcaaggccatcattcagggctgccctctacgtgttcgctggggaaagccgaagccactggataatttggaccgtgaagagagaatgcaaaatgcccgcgagggtcgccagaccgtggcatcggttgccaagggtaagcaagcagatcgacaagccattacctctgcaggcgagggtgctagccaggagaaagctcagcctcatgttattgcaccaccgcccggatcgggtgagatccaatatgccagcatgaatggcgattgaacagacttgggcggataccattaaattaaattgagggttcggagcgggcgttaccaaggattgttattctatgcaaatctatgtacttcaatcgaaaataccccgaagacgccaacgataaaagagtcgggtatcttataatacatgtccggtcactgtcgtagcttattttactgtttcatatgccgtcaatttgacatatggtcgtagacttggcttcgactctgaatagactcggagagtgcgctcaaattcaactgagcatgatggcaggaagtagaatcctatcatgacgagcaagccttgtggattttcacattctgatcgccgattttgacagagtcgttatcaccgcgttcaatctggtcgtgaatattgagttctgtggatcaatcgctcgttagtaaacagtttgaatgagtacacaagtaccaaaccacgaaatgcaatcgcgagattaagaaacacctaccccacttagcagcttcatctccctgctctctcgagccctggacgatgttgtggcgcaggatatccgcaacctcaatcccgtgcttaatttgcattccagtgtcgacagcggaccgacggttctcctcaaacttcttgcgaacttcctggcgcgcagcgatgaaaattgggggatcgtctatagcggacgtcagtatgaacagatgcctcagtgacggttgtgttggtcaaacgaactatggaaggccacccgggtagaccggagaagttgccgatagacacccttagcagcagcggcagtggaggtggccatagtgaaaggcggaattgtcacagaagtatagacgtgggtgtttttaggaacaggccgggaagcaggtggcaaactgctgtagatgatccgcacgaacaatgagataggataaagttagagggtggtgctgtagatgcgatgtagaagttgtagttgtctaaagaagaacgcagatcgatcagaccagaaaatttgaatgtacaagtgaacagagaaaggaagcaaggccgggtgccatcaccaatctcaaaactctagaacatccggcccgtgattggctggaggggcggatatttggggcagaaaaaaaaggtatgcaaaaaattccatcgcgggacccgacgccctccacacacaacttggtaccgtcaccaataccattacacaatggctgctgctcaagttgttgacattaccctccctaccttgcctcagggctgggctggtgagaaggatttcaagattgtcggtgctctgtccggtgccaccaagcgcaacgtggagcccgttggcccgcacttcctggctcacgctcgccgagtaagttcttcaaattcactcattcttgtttcgtcagaattaaccacattctagtctcgtcacaaccgtactttctccgaggatgagcgcctccaggcccagaacaatgtcaaaaagaccgagactgaggaggatgatgatatctctgaagatgaggatcctgtcatgcttgcccgtgaggccaaggactggaaggtcagtaatgtaacatttattctggctggtcattttctaactcctagcagggccaggatcactacgccgtcttgggtttgaaaaagtaccgctggcgtgcaacccccgagcagatcaagcgggctcaccgcaagaaggtcctgcgtcaccaccctgacaagaaggccgcccagggtaacagcgatgagaacgacagcttcttcaagtgtatccagaaggctaccgatctgcttctcgaccctactcgtcgtcgccagttcgattccgtcgacgacaacgctgacgttgagccccccactaagaagctcaccggtagcaagttctacaaggcctggggccctgttttcgttgcagagggtcgcttctccaataagcagcctgtgcccacactcggagacgagaacagcactcaggagcatgtcgagactttctacaacttctggtacaatgttgacagctggaggactttcgagtaccttgatgaggatgtgcctgatgatggagagagtcgtgaccagaaacgtcatgtggagaagaagaacgccaatgcccgccgcaagcgcaagaccgaggacaccgttcgtctgcgtgagctcgttgacgagtgtctcgcttccgatgagcgtattaagaagttccgccagcaggctcgtgccggcaaagacgctaagcgtctcgccaaggaggaggagatgcgtcgtctcaaggaggagaaggagaaagccaaggccgccgaggagcagcgcaagaaggacgctgaggaggccgccaaggctgaccgtgagaagaataagaaggctaaagaggccgctaagaacgcttccaagaagaacaagcgtatcctcaagggctccgtcaaggatgtcaactacttcgccgccggtgagcccactcccgctgatatcgacaatgtcctcagcgatgtcgacctcatcatggccaagatcgatgttgatgagcttgccgttctggctgagaagctcaccattgccggcagtgatggcgctgctgtcaagaccgcttggtctggcgaggctaagcgccttgttgatgctggcaagctgaaggccggcgaggccaaggtcttcgtttaaatattcttgtctacccgatagatgaggggtagcctatatacttaggctttcctgatgatgattattcacgccacatagagtagaaaaatggatggtgctcttatctaaatgcagtgtctacctatgtatcactcgtagttcttgtcctcaaatccgcatgacagaacacattggcttcgagactacgctccaactaacttccaaggttactacattcagccaactgcatgtctgaccactcccagccacgtgattggtcatggatcggatagtgcgctttttcatcatttgtttctagggtcatgttctgattgcggggtcacaagcagatagacacgatggatgtctctggcgaaggtcggtttgtttaaaagtgatcccatatgattacaccacgttgactagtgaaggcacttagagcgaccagaactcagtctccggaagatcattcgagttgcccaagacagattacttaaatatggaccctcccaagatatagagcttgaagccgagaatatgcgctatatctccgaaaacacggccatcccgatcccccacgttcacgagacccaaatccatgatggtggcgctaagtctatattaatggactatgtcgaaggtcagacgctgcaagatgcctggtccagcatgatcccatcacaaaagatgtccgttgcgcaggaactacgtggatatgtacagcaactccgggggctaaagcgcgaacctctggaacctttcagccataaacatatatacatgcggcgcccagtctaccttgacgagtatctattttcaagattgaggacctctgtcccggatctcctgctcaattgtacgggaaataaatggccggaggataagttggtcttcacgcacggtgatctggcaccgagaaatatcctggttgacgaccatggtcatgtcactgcagttttggactgggaactttcaggatggcaacctgaatggtgtgagactgttagagcgtatactttttgcaacgatattcctggctggaccgcctatctatccgctgttttcccaccgggtgatgcaacggagtatatggctgtggcgtttgctagacatatgaaatgatgagaactggatgcgatatacggatttattcatacatatgaatttattttgctatgaatgcacgcctggcattccatacctcggactgaaaacaagccatattctgggaaaaaagatgcgaataatggctaagaacaggccctaaaatggatacgagactgaattcactagagtatgactgtaatattcctctgtgataaagaagattcgcagggataagttggaattactatgaaaatcgtcgattgtggtgatactacttcggcctgtatgtagtacatcgagaatgagtctagtgatcaaacccttagccccctaggacacatgtcactcctagcttctaatatgttccgagatagtgtactcccaaccccgcgcaaagcatatgttgaccgcggctcaatttcgttgagctccatgattagtgatccaatctgcatgcccaagtgaaagccgaggcggactgacatataatttgcgaacataagtagattccagtctggtttatctttagtgaccacaatgatttttgacccagacactatcgaaattcccaagtcttacgagattcttccattgacggatgtcaatgtcccaccacccagccggggccctcgaagctacccctgtcattgtggtgacgctaaaccgaccagaaaagaataatctattcactctagagatgatgcatgtgtttgagaagatattttatatgtttgatgttgacgaacgcgtcaaagttgtagtgcttaccggtgctggcaaaatgttctgtgctggtgcggatcttgagcgagggtttagtgaaatgaagaaggagaggaacaaggatcatcgcgataggtaaaccatgaagctccaaccatagctcatatatcaattccgctaataccgatatcaacagcggcggccgactcgctttatccatctaccgctgtcgcaagcctactatagcggccatgcagggctccgctgttgggttgggcatgacgatgtccctgccggctgccatacgcattggctgcgagaaatccaagtatggatttgtcttcccgcgacgaggtctaacgatggaatcaagttcttcattctttctcccgcggttgattggttactccaatgctctttatttaatcacaacgggcggcaccttcccgcctacgtcgccgcattttgggaccttgttccaggagacataccctgatccaaatcaggtagttgcgcgtgcgttggagcttgctacagaagttgcagagaacattagccccatggcatcatatctttcgcaggaactcatgtggcgtagcccagggagtgccgaggagactcacctagttgattcagcggtgttgtatcatatgtttagtgggaggtatgctctctccgtctcgtttcatttagccttcttgggaatatttgcattataagaagcaataataaccgtgttatagggactcaaaggaaggcatcaaggcattcttcgagaaacgaaaacctgttttcaatgcaactcttgaggttgatgcaccgcccagctttccttggtggtccaatgttgatatcgggagacgtccgaaggcaagtaagatgagtaaggcaaaattgtaggcaagtgccactgccttcaaccagcccagaatgtgcacatttagaacgggggacgagaaatgtgattctgtggcacaaatgtgttctgagaaagcaaccttgtaagcgggtccgggatgtggcggagcatccctgagataaagttgaaacggaatctgacagccgctcattacggtctccataatttccaagtttccagctccatccagctgtaggtatctagctccactttcttgtaactcaaccttatctcatactttgagctctacaaaagttgactagtttgtagatgttgatcgctcaagaccacatgagacgaatgttgctatcactacagtatcggcacgagcgcttggtgtataaatagtataaataggcaatctaatttgatgttgaagtatctagatgatgaattgctaattatttacgaactctgccatggccttctttcggtcacttgagatgcggatgcggtcctaaacacagaagtcgacgatggcattggatgtagggacaccggttcctgcagattgccatttcgctgctcggagcgctctttaatccaaggccggaggttgaaaataccgccgcagatgaatatgcccacccaaagggtcaattcagttccataaataattatcccaagagcagaaatagtcgatccaaacactgcttgcatattagccgctgaccatctctacctaacgatgaagttgacctacagacagagaggagcgaaaacaagtccccagcagcgtcaataccgacaaaaatgaagctgattcctcggacagtccggtggacatagatatcccagtaatgtctcagtacacctgctgcaagtaggcacgcactcaaaactgccatcaagatgagaggccattctaatccgcgccttttcgcagcttgcaacgcaaatataagtcctgcttcaatgccgccgaacagcagcagaagcgaagtgactgcgacacagcatttcatgattcggtatttctgagtttatatgagtattatgaggataatgttgaatataaagcaaagtgtttacctttccatagtagagacactgcgcccaagtaattaggctgagtgtcgttaggatttgaggctgaatcctcagggcaatgttgaattcttccacaatgttgtacaccccgaggggaacccctgcggtggcccataagagcatcattgacccttgtaggccttcagtgtcatgtctcctgtaattgatgactatttgaggaatgagctgtataatgtgatcagtgcgggctcaaaagtaattggcacacagcaaccgcatacttggacagaccagcatacctaaagaatagttagtccgctctaccaatcgggaaaatcgggaaatagaacccactgcacccagggtaccgagaacattctctgcaactcgattgtccatttataagaggcttcgtcgctagagcggcggacacacagactgagaacgagatctgataacggggctcctaagtttgcagggtttgcactattatgcctgaggcaacaacttggcgatgacgcacttctcccgaagtcggcagccgcagcgcttgctaactaggcgtgcatcagcgaaccctggacgatccttacctatagatgtcacacgtgaaggtgggctatttcttgaactgtctatgaaagtggatcaaagtggttcgagtgatcattgactgacaatatactatcgtgtttcctttgtcaatattaatacagacaggttatgtagctagtgttctgtgaatatgacccatctcatatctcatagccaaattctgtaatgttccggagtattttagcgacatgtgtgatcgagaaaaggtacacgcgataactcagggtaaaaaagcacgctccatttaagaaccccctatctacggagtactccgtactccgaacttgatttgataaaagggctgtgcgtgactagaccctgaaagcattcaaagtccagggatcgatggcgatcggaattcaagtccggtcactaatagggaagagtcaaccaaaagatgggttagagaatttacctttgaagtaaataactgtacaactatgttggccagggtggaagcatttggctacaagttacctagtagtttagatgtatgacaaccttgaaagaaaccctaagatgagatcaaacaacgtagaaccatggacatgaagatatcaagattccagggtttctctgccgatcggataagaaatttcttttcttcccaagtgatttaccttgttttttttttccctgtcggctgggaggaccgcatggttgccacctgtgccacctttttttggaaatccagccaccatatttatatcaaggtgtagtcgatataaatagaacgagtctcacgaacatagggagtacattataggaactggtggtgatttagggacgagtacgtatgcatctgcgtaagagggggtcccagcccctcccacttacctgaataggactaaatgatcatcgactggggatgatatcatcaggaatgaaaacccgttgtcggggaggttccacattagtacggagcacggggacggaggatgaattcctgataggagatctatattatatgcatgcatggctgggttcgaccggagtcaagaagtatacatgtggatgcccggacgtaattgatgcttggcaccttgaaacatattctttttctacttcgtacttgcggagtataggtaataaaggaaattcctaatcttaaattcggtgggtccatcataaattgtggactttcccctgtcagtctaaaaagacccttaagaaaccagccctcctttctccttgcgctttttcaatcgtctaccaaacacgccttctacagtcgtcttcaaggcaccatggtctctactcttcgcctctgcctcttggccgtgactctacttttcaacttctcctccgcattccccctcatcagccgcgacgtccaatggtccttcacccttttcccgtcagcctcatgcaacggaactgtcggtgatcctcacgtcggatctggcagcacaggctgtcgcgccgatctctacagcgttgcctctgcctacactctgaactctctcgctgagggctgccgcatcgagttgttcgataacactatgtgcgaccagaacgaactctccgacatcgccagccaagccaatgccacccaaacttgccgcatagctggaacgagacgccactacggttcatatcaggtcacctgcgcctgaacatcttcaaacctcttttcgaatgtcgctgtttgaaacagtgaagggtctctggcgggctcctagatcctatgcgcaatttttttgaaagtctgaaagatcgattgggatccctcggtgggaaagtataatatgtatagactttttaatgatacccttagattaaatgaaatgagtttacgatcgtcgatataagttgcactcttttcctgctatttactcgtcgatgtccacaactgccggtctgcgtgttctgttatctgtcgtgtcgggcggcttctgtcaataatgcaccatggagattataaaaatagagaatttgagctgtccgagatctgctcactgtctcactcccttcatagcagcgaacatcatacgtcggcctgcaagccaggatcagcttgatgaaatatgaggacgcgcaatggcgggtaacctgatacactagggatcattttccttgcaccgtttaaccatgaaacattaaaccactattcattggaaacactgttctcaaaacacgtcatataacggtcttgacttccaactccatggttgatagattgacggatatatattctcctacgccaataccgcatttacggatatacatattcctgcgccacttttctcgagcgtggcgaggtttataccccggaagacaaacgtgcagactcgtatgcgtggctctcattcgctagaaattatcagatcttctcggtcttcttcggagttaaggcatgggctttccagaaatggataaactccgagggatatacgccgcaagcggatggacatttttggacctttattaaggactattcgcgcttctttttttcatagtcgcatattccctacaatctgtttgattatgacagtagtaaaaactgagttggaaagcgacaccagcccacctgcggctgtatcattctttgatccatctctcaatgagattcgaaagcgggtattctaccaatgggctcgcacttgtaagtaaagtctagaatacggcaactcacggaatgcaagagaaattaacggaaaacaacagtattgattctgtgcgtcttcgtgtatgccgtgctatctctcttctggggagtccagtacggcactgaggacaagttcccagtgctgaaggtatgggttgtcgatttcgacggccaagttgatccataccgctccaatgataccatcgttggtccagcagttacggatgctgccaagagaatcctgcagtctgacagcctccacctcggctacactatcaaatcccccgccgacttcaactatgaccccttggccgtacgccagggcatctatgacgaacatgcctatgccgccgtgatcatcaagcctaacgcaacaacgttgctccgggatgcagtcaccaatgacaatacaacctacgatccgactggcgccatcgagacagtaatcatctccgcgcgcgatgaaacaacctactacacctatatcatgcccgacctagtcatcctacagggcatggtgctagcagagttcggccctcaatgggtccaatctctcacttcatctgtcagcaacctgtcatctgtgcccccgcaggtgatcaacccggccattgggttcacgtccatcgatctacgtccttttgccccggctgtcgctacgcctgccgtcaccgtcggtttgatctatctgatcatcattgccttctttaacttcccctttatgatacctattcatgctcagttcatgaaaccagatggccatccaccgttgaaggtgccacattggctcctttggcgccttttctcgagcctggtggcttacttctttctttcgctgtgctactcactggtgtctctgactttcaagatcccattcagcaatgactctgcgtctgatgttctatccgcgaacaatcccaatggctatggacgtggctcatttgttgtgttttggatgctgaactgggttggcatggctgccttggggctcccctgtgagaacatggccatgatcctcggcttcccatggagtgctttgttccttatcttttgggttattacgaatgttgcgactgggttctatgccattgatttggctccgaggttctatagatgggggtatgcatggccgttacatcgaagtaagtttccccctcatcgtgatcgatgctctgttgctaatgatcatctagttgtcgaggctctacgaaccatccttttcgatgttcattcgcgcattggattggactttgctattttgttcatttggattgcagtatccttggtcttttatcctgtcgcgaccttcatcatgcggtggaagatgctgcgagggatataaaatagggctaaaatatgaagttagcaggcagtaaatagacagtgaataggttgggacagtctacggtagccactggccgctagtgcgctcaggttgtgcctgcagtacatatagtatagtttgtaatatcaggtatcttataagattcaatacttccacctaattacatgtattatgaagttatgactaccgagaaatgcgaaagtgatatcttcaaagacagcgatctagccgcagagggagcttcttggctcaatcattgaagcctgctgagtcgattgaggtctcaactacaagtttcgttgaagaaaggtcttgttttattcataaattcagtaatcctcgccttgtatatcaatagccaatggctacctgttcgctgtagcttcctctctggttttagcttaatgtatgtaaattccaggtctgtctggctattacgatatgttgttaattttccatatcactccttaatttcagttaggtcacgatccatttcaatcaatcaatgttgtttgcttccctgacgttgccacgacaaacacacccatcccaccttggcagtcctcgcaaaccttccaacctctactcattgcttacttctacctattgataattcagcatggcgcgtatggtcacaaccccgttccctggagaccattctacgaccacaaagccaaaagacgccgttgaccagaaacgggccgcgagcccaagtactagccaggacgtgctcaaccctaccatatctccaggacaatcgactgatgtagcaatcgaagaattcgaaattacctctgcactgaagctcatagccgtctcagtggctcagcagcgcttcctcgccgctaaatccctcgtccttcacccgaccaccctaaccctggtagccgcgagtttcgcatacagtgtcggtgtcatttatcatcacccatcttgctggccctacattgttgttttctgcaccaccgcggtattggccactctaggtatcgtcacacgcttgcttgagggatacaacgatgaggctgagaaggttggaacactgaactggctgtacgggcacgatcctagcagcgataacactactcaggaagatcctgccttcaactcggatagtgggatcacctttgtacttgtttatcgattcgggcgctacattgtcggcgcgcttgtcatgagcatcacctacaacggcatccaaccccatccgaaagccaacgcaataactctcccaataggagaaaactacgatgcctgtgtacgtgcctggacagtccaaaaaggcttccggggatacgggattggcactgcgctcctcaacgaagctattaggatctgctataagcatgagtggaaaggactccggttcgcgacttcccacgccaactcccttcgcgtctttcactccctctttcatagtgacatggaccaggcgtccgctatgtggagctcgtatctgcgcaagcgggtcgaggcttatcgccaatcctgtgctgtttctgagactagagttcttgatgcgtctctacatgcgagtgagagccagagcacgctgagtgatacacggatgcggtttatttgtaccgaggcggagaagctcaaccggatgtacttccatgtacgccttggacaggtagttgatgctcaaactcggtggaagaaaatcttgtaatcggtcacgcttcattgttggcttgctgtttctggatgtggtgtcggtggagttcaggagtattgatgttaaggttccccttctgcaatttttatctatctatatggatgattgttgcaccaggaactctcatagtcttatgaagaatcttggaagggttgttaccacgtctggctgctttgactacagtggtagtgttttgtattggtttcattgtccaagcctgtaggaagaattaggtttcatcttcggagccaatttgtggcggtgactaactagtcctagtgtttgtagtactaattactagctaactagttactcaagcagtttctcaagtggttgcttgagtagttactaaagtaattgacgataaagcagttaataatgatatgacaaaaggcatttaattttattagtggtttacatacaaattgtaggtacctactgccatactatcatatggcaggaaataagcctaattgtgaacgcggtactgaaattacaggcagggggagaataagccagtaagaggggggctttgtgtagcattaaaagttggaatcagtcgtttcgctctgcaacgactatctggaggccttaggctgtcgagatcactagtatattttccttcacgctaaattagcggtcccatttcgacattcgctcagctgacggccgccaaggacttgctcgagtacttgggagcataggcgcttgaggcatacagcaagttatttgcctcagccaccgagaggaagcaaaccctgcaaacctctcgggagcacagcggggaggaaaaagagctcgtgacggcgtattgaggagctaaacctcataagtcaagaataaccagaaaaggtaattcacagatgcgccgtttacagctacaatatgagcaccagggggattgaggccagaaatggctgcctttccacccgtaattttggacgtccagccgccccatgaccgccataacgtgtaacaccactattctgtacctacccagcacttttagtcaccctccggtcctgatgttgaagtatgctggctatttgagcctggaaatgtaaagaatgtaatgcagaatatctgatatcgtccggttcacgaagtaagctagggaggcaagatttcatggcaaaggagtgagtccaacgagattgagacccgctttggttatgatctctcggagggacgcaatgtcaaattcaagccgatcactgccctgggagcttgaggcaattgcgccgttaaaaatgtcgtctttggtgagataaatgggcagttcaaacgccccatgaaccgggaaaattcggttgctcgcaatcatgcatgcactgcctgtagaatttcgcccccagagttcgattgttccagcaacaccttgtctgcgctggaaaaatttcacaagaagaaccttacacacacccactccttccatcaaagtttcgcatcatcaacgaggcttcgatatgtctgattgaagccaacctcaataattatccttggttcatgcaagtaaggaagtctgaagcaagagatgaaggtatcgggttctttttgatcaccggtgtatggagggttgctagcagtaactcgcgggcttgctgtcaccataacattgagatgttcatcaggcataagttgaccgttgatattccaacgggtcagctgttggacaaaccacgcatgcggggctgaatcggtataatttggcattttcagtgttataactttcctctgggagaataatccttttcgaacacgggggaactttgcgtcgagaagttttaagatcaattgaaatttcatgatccaccgaggtaaggacaacaaacgagtagagagactggtcgaagaatccactgccttggattatcgccaatgcctcgtcggcagatttgattttgtcaagggagatttctttgtcaagggcgtagtcttcactgccagatgactgttcggaaatctcgctattggctggcgtggaatcgattggtgaagacatgatgtgcaaaagaaaggagggtgcttgaagatggaaagtgcaagtatggaagtcgcgaagtgaagtacaattgggacacgtgatcaagggaagcactgagattctattgggtagtcgcacggagatgtactctgtagtgtacagtaatataacccttgatctcttccctccttgcttgtatgcaaatttacgtatgcatagtacttatcacatgcacttgatcgcatatattctgtaaaacaacaaaaatacataagagagggctgaaatcaaaggtttcagcccgatactaagtatagaaatcgggccaagtcacattccaagggaaggcgctcaatgtctcagatagattgacccatcttacctctttgttttgcatttgctttctcgtcagactattcaaaccctctttcgaattcaccaaatttcacggttcaaaatgtctacgacttcctccactacctcgtccgtgagcacaaccagtactgcctgcggtggcagcgtctggcaaatcccaacgacagactcagcttgtgcggccgtcatcagcggaaatatgaccgatgtgatggatgaatgctgcaaggacgcgaaggtctccaagtacgacaacgactgcggcatctactgcctcgcgcaaggccaaaatgtcgacaagcttcagtcttgcctcactagcaagagtggcaactatcacgatgtcttttgcaacgccgctctcaatgcgaccgctacagccacagcgacgggctcaaagtccacttcctcaggcaccggtagtagcacgcactcgtctgctgcctcgacttccacaaatgccgctatttccaaccagcctatctccaagtccggtgttggaatgattgcgctccttttcggctctgctttgatggctgttatctcttaacttggcggatgatttgatgtttcgtttggggattcaatgcctgtcccgataaaatacaatgtttctttttctagcgaacaagcgaccgtgttttcttactcgcatctaatacgaagtatgatttgagatgcataatggaatttgcgcactgcaacgatcaggatatattgagaaacctcatgacgtcatcgggttgcactgaatcagcatctgtttatcctgcccctccactgaagatcagaatatcactactccgtagatacaactgtgttcgaaaatgtcatcaatcgcaaaaactgtcatcgcgacaggcacctcgtccggcttggtaagaattatatgcccttggaatattcaggaatattcaggatcctaacatcggtcatagggatttgaaacaatcaagcagttactccagcagacacagccgtacagcttcattctaggcgttcgtgacacagaaaagacacgagtcgcgtacgatgatctgaaattcgacacttcaaagcacagcgtctctatcttgcccctggatcttctgaatcttaagagtgtgcagagctttgccaaacaagcactctctgaattgggcaaaaggccgttgaactatcttttccttattgcggggttccttgccagcgctgaagggccggggcctcatggctcacaatggtgcgaatcatacgtggtaaaccatctaggtatgtcaaaacgactcatcggctactaaaggagtctaggaggctagagctaatcattcatctatcgcaacccagcccagcattacctgacacacgaatttgctgagaccctgtctgcctcgcgatcacgtatcgtcattgtatcttcgggtgcaattcgtaatgtgagaggaggcgatccaggtgagtttagttccattctcccagttgtgtcgctgtccgaagcaaagttgttcacaaggctgacttcatattagccactcttgacattgacctaaaagcaaactccggtgcaaacgccagagtagtgtatagtgcatcgaaattcactcagcttctgggtgcacactactggcgtcgtagcctcccaaattgcacagtcgtggctgtctcgccaggtctcatccctaacaccaagcttgcccagcattcgagcttaggattgtccatggatatgcccgatgccaagaccgtgccagagggtaaggatctttgcatttggatttttgatttgaagacgatatctaacaattaataggtgcccagaatatcctccgcgcggtcacggtcgagaatcttcccgctgacccggaacagattttcttgactagctggggtgaatggtggcccaaggatgtctatgcgttgagtcttgatcctgcgctgcaagacaagtggtgtttgagcaaggaggatatcgagaagtccgagcctgtgttcaaggaataaggagcatagtatgcacattttacttcaacgggtctgcaaatagtatatctcacatggagtctgttttgcaaagatactgttccaagagcaatgctattcactcactggctcgcgaatcggagaaaatacgtagacatgaatgagtcgaatttatccctcgtgtagcagaaaagtcttaaagtgggaagtttccttgcgtacatctcaagccaaggcaagtaataaacaacagaaagtactacaaaaaggacatacatattgcacaagcgccgacaaatcgagccagccacaagatcattatatttgcaaatatagaacagcatctatgtgtatatagtatgcgtaccggaatttcccgaccggtcgaaatcaatcataatctaaaatccagtacattacatcaacaagaaaactcgaacctactcagcgttcgcaagcttgcgcatggtagcaaagttgggcgacccgagaccagaaacagggtcccaacccttagtagcgttccagctagcacctgggatcgacggaccaccgttattggcaccaccgaagcggctcttgccatcgcaacccgtgctgccgccatcgacaatgtcctttaagccggcgcgccctgtcgagtacagccaaggattaaggaagcccattggtggtttgttgactttgaggcgagcgtcgttgaggagggcgatgactccggcgaaggcaggtgccgagcaggaggtgccgtcgacgctggtcaacgagcccttatcgtatatagcgtaattgcgaccttgggctgtgacatcggggaaggcacgacccttagggttgaagaggccagaccagcggttacccaggatctcgaggtactcactcacggcctcctcttgccatttcgggcgagcccagagatcggaaaagccgccggacgagaagtacacggcctgttcgggcgcggtgtgggttgtcgcgccgactgatgtcacccacgggcaggcggcggggaactggggtgggaagcgggtcgcgttcctgccgtcgttcgtcaggcacgcggacccaacgccggagtcgccagatgagaaaatgacggatacaccacggctaccgagctgcgagtacaagttgcaaacactgcgggcgtacttctcgggaatgctctacaggttgatattagagaccgacaaaatcacgaacaaagggggggtgggtgtcatacctgctcgtcctcaccataggaggtagaaatcacctggggaaggtcctttttgtccagcttgagcacgttctggaggaattcaaggtatggctcgttgttgttatcattgggatcaggctggtcgagatcgggaacaagttcaccacggccgccaacgctaaattcggtgacgggaacaggagagctgactccaacaatgtactgcaagtccaggttcgcctcgctgctgctaccgctggaactttgatcattaagaccgccgttgtacctggtgacggagaagttctggcccttggcagagggcgcgatatttttctcaaatagtgccagatcggagtatcgtgcatactcctctaggtagctggcaaacccgaccttgttcccattggtatcattggcctggtaatcaccgatattatatatatccttgagacactgaggagtgatgatactgttgcaatccggctgagcggacacggcgtttgagcggaaagcctcgtcggattccttgacctggccgtgtaatatgccccgatgggcgcgcagctggccgaaacgggtggttggctggatcatgttgatgtgtggcaccagagccttcgggactgagtacttgagtgtgcgaagacgctcaatgtgcctgacattactgacgtagaactggaaattggctgccagcagctcatttgccgtctccacggtggtgtagaaggtcatccaatctgcatcctgttcgatcctggtaatacccgcgccttcgagccagtcacggattgactccgcggactccgcactgggctgtagcatccgcttcatttcttcgtgggtggtgaagtggtgcccgtagctagggtgatcgggggttgacatctccatcacagcctcttcgaagccggcagtatccccctgtgtcagagcgatctgtaacttcaagggctgatcagcacgcggcctgcgagaatatctccatcctaaggtgggtcagtgaatcaattccgtcggtttcgtttcgaacgcaagttgctcaccttgaggaacagcagacaaactctcaaatacatcggctgcagcagaggacgcgagaagcgacaagaccgcgagcgacaatgctccacgactaaatagggatgcaatcatgataaaaaaacgagcgatatgaggacaccctatcagtctaggcctctgcgcagcgaatacagggagtataaatagtctaacagaagactatcaaatacaaaagaggggtaaagaccgtaaattggtgtttattatggttgcattggcggggggaatgatggggcgacaaagaatgtgtgttgaagaagtccaggataaaccaggacaagacaataatattgacaatggagttctttgatcgaagtttcacgtcattcgcttggcacaacagtggaccctttgtggatgcccgcctggtgagactattctaaatcaataatcgctagtagcggtggctgggattgcatcttccggatctggctccatactcgcatcgtcgcgatatcctttcccaaccggagagcgaatgttactgatggaatcggtatagaagcaagccctctatcccattgtgatattgggcctccgtcgggggcgcgtttatgatcggcaggggttgacccactgtgtttgaaggaagcaatgcgaggggcgtcagggggcttgtattgccgggtggctggatgacttggccctaaaacgagatcagctctgattctaatttacatgaagcccacagttcatctgcgatcagatctgatcgatgggaatccgctagaggatatgttcatgatcaaaatcattcttctcctgccaaatttgggtcgtcatgcaccgttgcaccaggcaattaggctatctcatcaaatttgaagataagcttggagggataggtgctaggtttctgtggcgttgtgatgtgctgtcgcaacccgaatgaccatcggttttatttgcattgctgtgcgtcggggtgcgtcgggagtgcgtcggaggctggggtcacaaaattccaatttgctagtgccataatttaggcactggagacagatgtggctggtgatctctagttatctcccttcattattcgacgtgacatctcagtctcgggtaaaaatggctgggcaagaatgcgaggtgagatgagtacagagtacttgcgacgcttgctttcgtgacacctatcaagggacgagatgatagttcccgttggccccggactgttagcgattctatgtgttgtccgagttatattaaaatgttgacttcgtcgcagacaaggttctctggggttgcaacagtctccatcgtccgtcggtactccgtaccccgtgactttccgccaagttatgtgttttttttctttcggttctctttttttaaagagatgatgatactacatacggagtatatattaaagccattgacttcgattatctctagattttcattataggaaaacgcgacaacctggttacaagtatacaaatccaaccggattatggtgatgcatatgtataaatatgtacatgcctgtcggtccaaaaaaaagtatagcttctatacacaaaagatgaaagcccatggtattatttataatcaacgatgactggagcttgaacaacaggaacagagccatcaacacccacctcattcaattccagatggtgggcgtagaccatcgaggcgatggcatcttcagtctgaagatatgttcggttgcctcggatgaaccagaatgcaacagcgatgaccagcataacgccaaacacggcaatggcaaagttcatatcactgggcgccgggttggggctgccagggaacaggaagaaaatggtagtgatgatacagtagaagatgctgacccaattcaaccacggcccaatgcgaccgagcttgaatggacccgggggcaatttatcacggccgacgacgagcaaggcaagaatcggcatggcgtaggagacagtcagggcaatagtgctgacactgagaatcgcctcgagcacagtgttggcgaataggtataggatgccgacaataccgatgacaatgctctgaccccagagagcgcgagcagggacttgccatacagggtcgacgtggctgaagtagttgctgaaaggcacaccgccgtcgcgggaaaagccccaggtcaaacgggaggcagtggtcaggatactgatgccctggcctagaccattgaagatgaacagtgcaaggagtacagcggctcctttcaatccaacagtctcgacaataagctccatgaaggggaggtcggcgttaacgacattgtctacattctggatgcagaacagacagaccaccatgaagatgaatccagtcacggcaccgaacaaaacggccatccagatgactcgaggagcattcttccgaggcgcagggatttcctccaccatgtgaataaccgaatcgaacgcggtcaacccgtacgcggcctgtaccaagccggtgaaccaaaccacaccgtcgccccagccagtctcattcttccaagcaccgaacacgaaagaagccggctggaatgacagattactcttggttccgaccgagataagtagcacaagagagagaacgatgaacaggccgaagaaccagactccaacaaagttgttaagccagggtaggatcttctccttacggcagctgacgacgttgatcagggtcagcacaaagaccaccgcgatgtacacaacaaaattgagccagcccttgttggctccatcccactcggggtcaaacatagttttcatgcccagcaggaactcagtcatgaaggcaacctgcgacgcagtcaaggtccaccatccaaatacattgatccatgcgcacatgtatgaattgaatcgacccaatggtgtatcccacagtcgatatacccagtaggcctgaccgagggcggtcggcatgctgctagtcaactcgcccagcgagagcgcaacacagaggttgcatgctgtgactagcagcagaccccagaggatagtaatagcaccaccattggtcagaccgctgctgagatcttgggcgaaggtcgaataggttccttggacatgttagcacacattcgggctccatcgggtgggggaaaaaaccgaaaacataccaagtacacagaaggccagcgccagcatactccacatatcgaacttccgcgtcagggcctgggaatgacccagatcagcgagatcctgtgcatcttgcgcatgctgatccgtcagcggtggcttaaggggttgcgaattgtattccaaatccatgccgtggtatttcagccggaggtaatatatgtcaactcagtgggcaaataagagggaaatgcgcccattttctgattgaagatcaatgagaagcacagaggggggaagcatgatttctatatatctggcgtccggcgtatttggttcgccttgacacctcgcggattctgagataaagctggagaccaattgcgagtagccaatgacgcggcggggctgatactaggttttggttgaatcagaacgattggtcatggacttgggagatgttgataatagaaacgatctagttaactaaaatttctggtttttgcggggagtcgccttcgggaggacctcctccagtgggccgtcatccataatgtccacagaaatgcactccacagataagaactggggtataattggaattgaatggtggaattgacgttggtcaagtaattgaatatcatatccaatccatggatgtaggtatttcgcagcttgttcacaaattccatccgccacacgtttcatagctccgaggtccgaccgttgtacctgaacagcttctcttcaatatccattgaagcctaacaaaagtgcgaattccagcaagaaccgcatgatctcaacaactatcttcccaatataaaaatcaatagcattgtaggttaacatcaaaatacagtcagtggcaacggctgacccaaaacggcaagtccatgcgtggccgataagaattaacgattagcggtgcggctccagtacggtttgggtgtcaattcattaaacatgctttggtgtgtaaatagacatcataatagaaacggtagagctgcatatctgcgtttcatatgagacattaagctgcatatatgtggagtcaataccacatgctccgtatgcgccatagccatggcttgaccggcggaagccatcgtgatatcaagatgtatatggggcaacagcttgaaacatctgtcaacaatcagccgagggtcaggtggcaggctcgaggatggctcgtgacaagattctcatcgaaagcgggaaattggacacgatggagtcggaatgcactttgctttgcaccactgaagcagcagctttgagctttgtccggggaaaactgccatcagggtccacttcttcaattgttgtttcgtaatgagaatcaacagccgtcgctaagattgaggaggtctcctcagttgggcatcgccgtagggtcctctcgatccgtctgaccccaaatctaaatcttgcccagctcaaccccacaaaaggaaggaaacggaagatgcaaacaccgagacacggcgacgtagaccaatgaaggacagaccgtagacgcacggtttggaaacagccccgtgaaccccagaatggttcaatttgattatcgccatggtggactcctacccgtgacagaccgacaagctcactatcgattgcatattctcaaactcagttcacgagaagtgtaaagtcgtctgatggcatccgtgcagatgtgtggttgctgcgatattaaggcacggcgcagcctagtcccaacggggagtatgacctattcaccctgatagggccacggggtttgatgagtggcttcaggaatcattccagtctctgctgcctgctataattagcatagtcagccctctgctgtccccttttcatactccttgctcggaattataggcaatctccggtgctatatttcgcttatgctatccgctccccctgatcaaaggccgcgtgccgagtacgtctctcgaggcgatactgtttaacctgctttgtagactcatcatttccgtcgactctaaacccgagggttgaataggctgggttctattcaatgcgtggtatttgccaggtcgaggcaatgttgaaagcgatatgaaagccggatccaggtcacgatacaaaacgccagcataaagtttggcagaattcaccttgctaaccaagagtggccagtcagtccagcacaggcgtcaaagatcacaagacgaaggaacattacttacactgcaggtatatatacgtggatgggaccacccaaggacaactatttccatatcgggaagcatcaggccatacccgcacacaatcaggaaaaagagaaaatttgagcaaaatgaatcatccgagtcttggcaattatattaatgctttaggacactatccatgaggtattccgtccctgtaggggaatcacaagtcacaaaacacttttgtggtcgccaggacacgaaaatcaaatcatgtctgagaagagaagagggccacatgagcccaaataataacactggatccggaactccaaaagaaataaaggaaaaatcaaggaaagaatatgaacgccgaccgggaccacgttgaccggctactctaagaatacaacgctcgtcgcggtcatgagaacaacaaagggaacaacaaagatacttgaagaagcagcagcatcactgtggttggatcggtatgcacctgatcaaagtcgggggtttttggtctgacgccagattcctcccgccggtagcaggttttgcttgagcattgcgagctccttgtgcaaggcctggttctcctgctgaatgctatcgatgtaggtgagggcattgctgaggatctcggacttcttgagagatcccgcgccaaccttggtatgtttttgaacccccgagggcgagatggcctgctcgagagaaacaaatttggcgttcatgttggtacggtagcgcttctcaatgatgttgtgggcggcacgcttggctgcattccgcatttgagggtcttggccgccggttgaggagtggttggagtctcgggagaagctacgggtcttgcgggatgtggatgtggtgggtttggagggtagaggagtagcaatctcttcttgcttcatctctggactggatgaccagcttgctgaagatgagcgagtcttgctctgtgtttgaggttgagacgaggtgtagtttgaagtcaactcggtctcgaaggcgtttgagtcaatggattgacgggcagcagagggccatgtttgatcgtcgctttcgaactcctgtagaaagattagcttctgtgacaaaatattgataggaagggtggacaatcgtacagatgagagagaagctgcgtcctcgggcatggagaagccactgattccggagctggcaaaggggtcgttgaagagatccttggactcgatgttggtgaggctgtcggcgaagtcgaacgagacgggctccatgtcggaggggttgatagagaacaggtcaatcgcgttgtcgtagctccagttggcagcgagagggtcaggtctttcgaagaagtcggctggtcgagactgaggactcaggtgttggctgaggtaggtcccctggtctatgcagagattggggatctcattggatcggttgcaagccatgatacacatcttggatcatacgttggcctcgaaggcaagtttggcagtagggtgatatagtaaggtgaaagagttgctatgagcaaagggtggcgaaagaatcgagtatttataaataaatcggaactgaagatatcatggaacaggatatgggtttcggccgcggggcatttatataaacccagagtaagccccgaaaaaaaacaggggtacgaaggtgatccggaacagattacgcctgtgtacgaagccgagattgacctgtgatgtcaggtttggaccagacgtatcgaaaatggcttagcctccggctggtcactcgcttgcagggttgtcgaagccgagttcacccctaagatctcaaacggccggctccgacgaggatattttccgatgggctgtaacgtgtgaaacggttgaagttaaaaaccgtgtgggctaggccttggcccaagactccgccggccgagtctcggacccgatattatgtatttttgtgtattttgtgtattttgtgtaatttatgtcttttttaatgtattctgtacctcctttcttgttttcacgggctttgtgttttttattttgctcttgctgctttgaacgggtggtataattgagacctggctgcccagcaggctatctacagcaacttggaagccaatgatgccgagtctgaacacttgccagtggttcattagaatgaggagatttccaactatgcctgatattagaagatctataactatgccgttaaaaaatcattctttcatcatagacaatgatactatacttccaagtagtcgactactccgtacctattgaccaattatatcgcacaaccaagatctacccgtactgcgttatacggacaacgcagccctaaattgatcctcaaccgtcttagtaaaagcggcattgtcagaacctatcagtatagtcatcctcggctttgcatcttacattccttacccctacggtaaaagttatatcctgtttcctcatctcgcgtgctgattgcttgcctcaccattatactttttgatagtcacctgtcgtcgactccatcgagccattaattttccgaaagacggattgatatgcagctaacccatgccatgctgcacaaagtctagaagagacgagagatcatatccgaaatagattgatacatctactaatgcaatatacgaatacgtacccgctcaatagtttgatgttcagagtttcttggaaaggtcacgtatattcccgggcagtgctgtcggtttccgcccgcttgtggcaatgtccacgaggcgtactccgtggtatcagttgaatacggtactttatgccgcaggtatttttcacttctgctccgtacatataaaactgatatgtcacagtcagatgcattaaacaacgatgcctattggataaaaaagcgagttggattccgtcgagtacctccgtagtgcctcgatcgcagtgtcgaccagtcgcgaagcagctaaaccccgcttattcacttttttccttcccaaatcggtcccacctgcccttcggagtggggtgactcggaagttctcattcccttgcccttcttcgccttaccctcccgatgtcgaccgagacgatacgagaagctcctgtctctctccatatttttgacctccggtcaacgtttccgcatggcatgagggttcgtctcctgatactcgggtgaatccttttggaaggtcgagtgtcgagggttcttgacgggtagacggaggaaacattgcatttgttagactttgtggcacatctgtggctaatggccatctcattctgatatctcagatctatcacaaccttaaaaaatcttccatgcaccgagtcatctagaccgaggctagcccgttacactctgtgttacggctccaagatgacctcgggagggtcagtccacccggcacgccttgacttagtggagaaataacgggcgctagacctgtcatctgcacagaatgtgtacacggatcttgactcgattccgggcccgactgtcctagatcttgattcgcggcggatctccattagctaggatctttccgaggtttacgctgggtcgatatgacgcagtggcttgatggctttgaggcttttatgttggtatgacccctatatatatacacatcatgaacgtccaggtaaccggactttcttgaaattcggttctatctccgaaaacaatcgattgagttctgaagcatacatgtctaaaaaagctcatccaatcaacgccttgagagtagtttcgaagctctccggttcacgccctaagatctcacgtagagtcggggtcacaaccgcagtctcaccccgtcggatagcctcccaagccgtagcccactccctcgacagattgacccccctgtaggtaagatggtcaccaatctgaggaagattcacgaactcatcgacagagatctcacggatcttgagcgatttcccaatcgcccgaccgataatctcaaccgtctccgcaagagagatctcccgaggcccagagagcagaagagccttgttcaaatacccaaagctggtcgggttcttgacatacgaggcaatcaacttggcggttgcctcgcccagctcatcgcgcttgacccacgccacacctgggcctgtacccgagtgagggatcgtaacctcgtccgttggatgcttcggatcgaagaatgcggtatatatcgggaaggattcagtgtagagaccctcgcggattatggtgtgggacactttctcttgcagagaagagaggtatttctctgtctggatatgggcgcccatcacatgagcgacactctggtcggttagatcaccgccgaatccaagggaggagtaaaaaatgtacttgacgccacttttgacggctgcatttatagcaagaatgtgtgcctggttatcattatcagcccaactcctccgtacttaggtgagctatcacacttgattttcttaccttggtcctgtgatctatctcgaatgatgcatatgaaaccagcatcaagacatcgacgccttcgaaggctgtgtctaatgttgatggcgcatcatagtcggccctccgtatcgtagcaccagcttgctcgaggtcgtgcagtttctcggggtgtcggccaaccagaacgagatcggattttgggactagttttgccaggtggttcacaatgcttgatccaaggcccccggaagcgggaaagacgccgattttggtacccattttgatatgtggcgagaatgatagaagggtaactcagtagtctgtagttgggaaggtatatataaaacacttgactggaggatttttcgagcctcttatatcctacatatcacatttcatgatcaaatgcttacaaatcgatatcagtccatggcaacaacgaccggatgcgatgattgtacaatattctctataattccatggatgtcgatccgttgccttttaaacaaagaatgttgcgccaaccttcagcgctgcctggaaatccaagtaaactccacccaactgagaggagtcacccaactgagaggagttatcccctttaaaattcattgcttgctcagcagatgggcaacctttaagcaaaggatcttgtgacttctttcattcgtcaatcgtaatttgaaatttcaagagatgagatatgtacttctaaatgcgaaacaaataacggccagggaagaaacaattagtctaattctaatcatactccgtgctcaatgaatacctcccgttccgaacaattccatcttgatgcgatcggcactcacacccctggccttgagactcgactccatatcgatcatgaactttccgggtccacagatatagtaatccgtcttggcatcatccaggaacaagtcctgatccttcaacttagtcaagtccacccgcccggcatggtcgtagtccacgccctccacctctccctcggaaggatgactcgtgtaggatgtggttcgaatggaggggaattcgtttggaagctcggagatgtgcaacttgaaagcacgcacgcgtgatgaacgtgcgccatgaatgaaatgcagcttgcgcgttgcgggtgatttggaaatcaatgtgttcagcatcgacgtcagtggtgttagacccacaccggcggagatcaacacgattgggttgcctgcttccgactcgacagggggaaggaaaaagtcaccgtagggatgggagacattgagcttgtcgccgatgttgactgtatcgtgtagcagatttgagatgtaacccgggtgagcggcggcacctggagcggctgggtcgaggcccagttctcttttcacactgatgcgatagtagtccggcttcggctggtcgctgagagagtactgtctggcctgcaagtgcttgagagccgggacgtaggtttggatggaaatgtactggccgggctggaaggccggcagtggtttttcatcgacaggggcgagatagaaggatgtgatttcctcggattctttgactttgttcacaatcttgaattctctccagtcagtccagccctcggcgtgttcgtaaagctgcttttcgcggccaatcatgatatctgcgagctgccagtaggctgcaccccatgcgtcgtggatttctggggtcaatgccgcgccgagcacctcgcccatggcttcgaggaggtacttgccaacaatcttgtaatcgtcgggcttgatatacaaggaggcatgcttgttgcagatcaactcaaccgccgagctcagtgcgccgagatcgtcgatatgcgatgcatatgcgtagagtgcaccggccaacgcacgaggttgatgcccattggcctggttggtactgttgaaaacggtgttcagctccgggtgggcttcgatcatgttgcgatagaagacagtcgtgatggtgttgccatgttccacgagaaccggcaccgtcgccttaatgagcgcgatctggtctggagtcattcccggattagaagccattgtgggtggtcgagtaaagaaaacgtttgatcggtgtctgcactgtggcttaattataagtaacagatcagaatatgtgagtaataggaaactaattgcatttggttggttgtcaagctatttatcttcaccgtaatcggattactaacagcaagaaaccgagtttagaaaattcggaaggcgtctggcatgatctgtgaagattttcagagatatctccgcggagagcaccaccgagaggcatatggcaacgcagcaagggataaagtcggtcaatttttgcgacctgcaactttagcttgtacataaaattgtctcgcatgttttatattcctggtacatgcagaaagtcatccactatgtaagctgtatgataggtgatgtgacccacctttagtcctcgtcgatctagatcctaatatttgcgagacgaggtgatgagtcttcgtgctcatgaaaatgaagtcgataatgaatagctctctgttcattgtgacattccttccatcttcctgaaggcagactctgctcttccgtctcaccgcttgccatgatctggcagaacacgtcttgacgaggacattcaattcattcaagatgcccaaatgcgacctctaaacagagagacaaatatctacgtcgatgagggtctttttttctctctgtatacaacttacaccattctgtatgttgagtcgtcatacacgtggtcaggccacacgcgagaatgtcgtcggctccaaacggcccggtttctgccgagccatttaataaacccgattgtccaggtgaccttgagagtcagaagatccgcctggatacttccttaggactatccaacatacatagtgttcaaaaagtctgttcccactgccccacttgctatccccctaacaaccatcgtggttttttttcttcttcctacacaccccccaatgacatttgagctatctgttactcagcgctcagctattatttatacccaccaggccggtgccacccagtcaaagctagcactcgattttaggtactcccgccgaacgatttacaatactttgaaacggttcaaagaacacaatactgttaaatctctcccttgaaccggtcgcccaaggatctttagtgatcgaactcgccatttactttttatactcgcccgccggcaccccttttggtcctataaaacgctgagttgtgctatacctggtcatccatcccgctctactattattaacgttttaaggctaaccggtcttctaaaatataggacaaaaaggaagattctaatcggaaaggaattagctcgacgacgatatcgttttattcaaaaatggcgctctgagtggtctagaaataacgtttaaaactaggtcttctcggatgagtattctatataacgaacaataaactatggaccacaatggtattggcgctttcggtcggaaggctatagaaaagatcttataaatactaaggcatacgttaaagatatttcataaatggtttagggtataatctggttagggagtcgatcagagttgattattatgaggcgggagaatattattaacctggaatcgaagaagataggatatactactatttcctatatagatactctcgaagaaggtctacttctattctatcgaccctgctctatcttttagcaagataacgctcggatccatactgctaaaatcatataggaatggtttgaaactcacgggatatatgtggaggagtagccgccgcactcactggatttaaacccgattgaacctatatggcggtggctaaaggttaaactttttgagttatttcctgagctgatatatataggaaggtctgaggaggattggatagtattcaaaaggtgtataaagatagcatgggatgctattccgcagtcgaagattgattcattgattttaagtatggggcgcagatgtatggcagtacggaaggcaaaggggtattatacaaaatattaaatttaaattttacccgagattggcatagggttcaaccctatttaattcgaagtaaattgagtaaagtatggtagtgctatgcatagatatgtagagatatatatttcaatgttcatgggtgaaaatgcgggtgggaacagacttattaaaccccactgtactacggagtacatgatatgaaatacacggattaggaggcaatgccgttttacccgttctgacactgccatcaaagacttttccctcctttttctgccgtcaacctggaaattttcacaggggagaagatattacccaacgaatgacagaggccacaaacacagactgtgcttgcctctaccatggtagtccttcatcggcgattctaattcgccagctctaacgtgcatagtaaattccgatctgtcaaaccctaaaggcgttcagagatctttcggtcgatctagatctcagacgctagcccaatcagagaagatcgacacctatactccgtacggagtagatagaccattggacaatccattgaaaatgacgtgtgggaagatctagacaccagactcccgcagccgtttgcggaaggcatactactctcgttcaacgttgactccaccaaaccctaaccttattattctctagctggggaaacaggagcctatcccacctcacttgggaaaagggacggaccactgccataaataagctccgtcgcagttgagtcaagcgctaatcgatcatacatggtccagttgcgacgcctccgtattgagtagtgacgtctcgatttacaatggttgtagtgcaaagaaagatggatagtagaagaggctgagattttctcattctgatgagacattagtcaactccgacttcaattagttctcttcattccggctcccttacccttcagaatgttgttcaggaaacgccactcaaccgaagcctcgacgctcaatgggacatccggttccagtgaacagggccagctgcccatgctgcggctcccagacaagctgcggtacaacttgctttgcatgctgggcgagttcgtggggactttcatgtttctcttcttctcttttgcgggtacacaggtgtccaataccccgatgccgccacctggctccccgccgaatacttccaatttgctgtattcagcgctttcttttgggttcgctttgaccgtcaatgtctgggcctttttccgagtcacgggtggtctcttcaacccggcggtatggtcatcaccatccaggaatgagaagatttgtagctgacattcaccaggttactcttgctctctgtctgagtggcggcatgccccctctccggggattgtatgtattccctgcgcaactggtcgccggaattgctgcggcgggcgtggtgagtgccctattcccgggcccgctcaactgcgcgacacgactcggcggtggcgcatccatctcacaaggactcttcattgagatgtttttgacagcgcagcttgtgtttgtcattatcatgttggcggtggtgaagcataagtccacctatctagctccagtaggaattggtctggctttctttgttgcagaactgattggtaagtgacggtcattatcggattactccacaacgtcctatgctgatccttcacactaggtgattactacaccggaggatctctcaaccctgctcgctccctcggaccggatgtaatcaaccgctcatttccggggtaccactggatctattgggtcggtcctctgctcggatcccttcttgcctctgcattctaccgactcctttgtatggtgcgctgggagatgatcaatcctggtcaggattataacgaggaagatgcggccagaaaggagtcgttgattggttcagatagtaccatcaacgccgatgcccctccaacatctagaagagataatgggtttgatgagcatgtctagcgctgctccattgtccgaaagcctgctccatggataactggcgatccatatcaaaccaacgttgggaagtactgaacaaatttttctattatttatatagtagaggccctcgatgttgccaccggattggagtcaataattcaaactggcaatgaggctgatgtataagtgtggatattgaattggaagcagatgcttggcatttttggaatacgagttggaagtggtcggcaaatgcaatcaagctcaagttcgctggtctacacgatgtacatagcagctacaacctaacagacatggtcaacgcaggtgtgtttggatgatttttactctttgggataaaagaagtgtattccccacgtcattttcaccattcccatctttaaattctggtgaaatcatgttatcgtttctgtaactgctttcattttcagctggctgtcctgttcggactctagcatgtctaaatggcagcagccttcctcaatttgcacttcttgagacatttcggacataatttggattcgacacggctagcttgattattccctcaatctctagggaggctgcatcggaggcaatatttcgcacaattcttgaactccgtcagaagtatggaatggacactgatattcactgtccctatcggggcacgttatttgtgatacactatatcggccatggtgtatctgaaacagaacagaagttcgggatatggtatggaccctaataaaacccatccattgtacctatagcattactgatatccactcccagtagaacacgcagtcctgatgcagttataatctcgtggccttccatctatcttaggatgaaggcagatgtcctcgttctcatggataaatcctactccggagactttcttcagccatgtcacagcttgcaaagaatattgtaacgcagtgagaattacgccgagtacctgttcgcaacaggcaacgagatttccgatcaaaacggtcccacttacgatgtaaacaacaattttacgacccgtctgacagaacttttacacgctgagccaccagtatttcgtactgttgtccgacttcacgaagctctctgtacccaagccaatgatccaagtactaagctgcgctatactcctcaatacatgggctgtcgcaaaccaacaaccatcctccattgtctcagtaatcacgggataatagagaacccgacaccacagagacacttttaagaataggaattataatttcttttccggctgcatagcagattttaattgaacaaacacatataaataaatatatatatatatattacttacctacgtttcgggtccttatttccgtgtctgttcttgggaaaacagttcgcggccaggtcggagagtggcagaggtcgctatcagaaatggaccccgagttgaccatcgaaggtgtttttgaccttcaggggtgttctctatgtcttctatcaatgccgttgtcgttatgggatagttttatacacccagcgtataaattcgtgagctacgtggattctcacaacgtcctggcatcgggtcccgttgctgatggcctctcagtgaccacgctaccagagagaccgaaggatcatgcatatgttgactatgtaatgctctctgacacggatgaatgatctggtgacacgatatgccggtgttttatctccatatttcgagggatatccctgctgtgatgaggggaggggtgtttctgtctttttagtctaaaccgtgaaacctgtgcaagattgtattcgtcattggtatcctttattactactgcttactctaacttccttattcgctcttgacctttactctaatcgcatcttaagttatgtctttgttcactctatataacggacaaagtatgctagggagtgggatcaataaaaaatatgttcaattggtaataaaatgctcgccatgagcatattaaaatgaatttgtggaatagccgaggtatttgtacagcctcagaacgccggcattaaatttctgtccccagatgctaggaagaaaatgacgagacaactaggaaaatcgtgaaaaaaggcgtggcggatatcatggctgaaataaaatccagaatcaatggagcgaggtatcaacaatttacagtgcaatcatgacaccaaggacaccggccataccagcagcaacagcgccgacagcagtgggacgagcgaaggccgcattgtcagagacagaggaagagctagacggagacgcggtggaggaagagccggaagaagactcagtagacgaagagccggaagaagaatcagtggaggaggagccggaagaagaatcagcggaggatgagtcggaagatgtggtggacactgcgctggtcagggtagtggactcggtagcggtggccgagccggcggagtcggtaagagtagtctgagcagaaatggcggtggcaacccggctggtgatctcagagccgatggagctagcatcggtagcgacggcagaagcctcactcttgatggatgaggcggcagcggcaccgccggtgctcacggcctcggcgatagaggtcgcctcgcttttgatggatgagatggcagcggcaccgccggtgctcgcggcctcggcgatagaggtggctattgagacgacatcggatccgacggattggccaccgtcgacgacagttgagacgacgcctgtgacatcggagacgatagagttcacgtcaacaccgtctggggaagccatggcagtggtggccaggaagagggcggaggagatcagagtgaacttcatattggagaaagaagaacggattggaagggtgttgtgtgatttaggaacaggatatttagattgtaaattaaaatgataaactggaaatccggggggaaactactgcttcttatatttggtcaatgggcactagtctcctatagatagaaacatcggagattgattgcgcctggatgctaggcagccgaggtggcagtggcgacatgagctcagccttgtgaagaatgattctgatgtcgatcgtagggtccattcagggatagaggggctatgtactcactccgtaccgtgttagagacctgtacagggtatcccaccagacggctttgggcaaattatatcatcccgaggtcctggggtccactttgtaatgaggcgcaagcattggagccgtttcaacgccctagtccctttcagtccctgacccccggaaaccaagagttagacgtgcatgttctatgagcttgattctcatgttctcgcgtgagcatggtttgtcctactcgtgagcaattcaacaacccacactccggaaaattcacatcgcagcaatgtttgggtattttgctgccttagcgatcccaacaactcgattcgcaccggagacaccggcaccgtccccgttggggtggcttggagatcaactgcccacaaagtggtagacaaatggtatgaaagcgcgtcttaccgatacagtgggtcaactcctgctcggcgtccgtcattatgtataattgtgacaatgaatcccactcgcaatttcaaagtatctcgacccctgtggcatttttggctagtcaaagatagccaagggatttcaatgacgcgtcatgtagcaggtttgagcgcctttaatattgcaaaggggcagcgaagaagccaagtgaatctgaatcataactggtcatggacgcagttgccgggggcgatgcgggtcggaatctatccaccggtcggcctgaggcagcacataaactcacgtgccagtgggagagatcaggtcatgtgggcccgcctgagacctcacgttggtcaggcggtcaatgctcacgttgatacccctagtttaggcttatgtaaatgctgtttggtctggaaatgtacggtatctttgattagatcatcccgttttggtatgaaatatgtggtatatttacaagggatacattcttgtatactagttatttactagttgtttactacctaattactgataaataactctacatcgaatatatatatctttggatatgcacgtataactacttacaaaccattgttccaattcgtttactagtagttaccatggcgcattatcaatctacctggtggaaacaccgctatcataagcttgaagagcttataaaggccgagcctattcctgaaccagacgagcctgcagaggcagatgtcgagctttacaatgcatccgatgatcggatcctgcatgagcgcaacgaatacgaggtatgtttttgaagaaatttactagtttcctactggtttgttactaatatttttcaaatagggaacggaagatgaaccaactcccctaacagaagctacccacgacgcaatatctactacagagattgaatatgtacctctccttccagaatatccgcgtactcatccgaaaggctatgcatatgtggttaatctccgacatctctcttcataagagaagaaaaatgcacttaatctagtaagttgttatataatcatcgatattatactagttattaactattttactaggtccagtacgctagtaggcgtgatggcggaaaaagtgatatttactgctccttccttggttgccaagtcacgaagacagcatcttactattccggcatgaagcactgtgttcatcttaacgactatctccgtaacctctcccatacagaggttaatgaagagcttgtagggcgtatgttctctataaagagggatgctcgacagtcataccaatattcgcaaccctaacgtgaagcggtagcgtatgcgacctattttactaatattttattagtagctaacaactatttagtttctacgatgctcttcgacagaaatttttggagagaaaagcttgtaaaaaagcagacgctacctgcgaaatggtctacggaaaattcaaccaccaggtaagtaaattcgttcttattctttttactatatctttactaatatatagcctctaataactagaatgtagtaggagaggaattgccattcgttcgttgttctaacggctcagctagtaaccacacgaatcattactttacaacattatatacaaagcggaacaggctagatatagggcttctgattagtcttcttcaaaaggaacagagggaagttaccacagaagtatacactgcaatctaccaaactagctcacgagcccaattttgcggtatgaattcatattactagtatattattattgactaactagttttatagatgttgtgcacctaggcggacgcggtgcgatccagagacaattcccacaatgcacagttaaattccgtacatttgtgccaaaggatatagagaagcatccatatgctatcttttactctgcagggatacataaccacccgcccccgccaccgagtaagccaccatacgaccttatagaagagctttggaatctcttatctcggggacaaacatcggatcttacacttagtaagtaaccttactagtattataatactattttattagatactaattagtatctataggcgcgtttcttcggagtgatggggttcgagacctcgccgccagatacggcgctcaaaccctgtctgaactataccagagctttgcaaataaagagcgattttctgtggtccttacaaaaaggagagcaattgactatccaatgggtagacatttagtaggtgtttacttcgagatggagaaaaatccggctataaaggtgcgttttactagtatattattactactatgctaattatcctttagctctatgtacgcgagattgtgtataatgaaaaaggtgcctttatattttgtgcccttaatgaacagctcgagatccttgcttcattacattcattcgaagttgatatgtcatataagcgagtgaaaggcgtttttaacgaggttatcttcgcaacatttgtcccaaagcatggaaaaagtttgttttactactattatatcagtatccaaagctaatatcttctagttatgacgctattccgagttttcacagatcaggagactacaaaagcgtatcattttatatttggaaatgtctttaatctcgtcgagcgctgtataggtaagaagatcaagttccactatctacatggtagtggaataaggtctattatcactgatatgtgcccaaaacaaatgacaggtaagtattataccttttactactattattacagtaacttactagtattagggcttggaaaaatgctccaggagactgaccagaaaaccaataaccgggatcttggttggagatggcatactatgaatgttcttatcttctgtaagatacacttcatacgtacaattaacaaattggtgccagcaagccgggacccagaagatctctcacatatagagggaagaagtcgactagccagcttaatggactgtaaaagtcgacagaattattaggagttggctgaccttattatcggtatatatttccatttgaaaaaactagtattttactaatatttatagcgcataaccctgagcttaagggttgggctgagcataagaagatcgatgttattgcagctgggctttgtaatgcatgctcgccaatagactctatgttcttcgaggaagcgcgaaagcatacaaatgcagtagagcaaagccactataaatcctatcatatgggtacacaggatacgctccttggtacagtcacgaagtgagtgaatattaattatttactggtattctaccatttacttacattcatttaggtcaaagatcctcgacgaaaccgacgtacagcaataccatagccgtgaagctttcgatatcagacattcctatcatacagatgatatgcagacacggtttagtaagagtatacagcgagagggtatgtatatttactacttatttactggcatctaactaataataattagaatctctgcgacggaaacgttaccaagtcctagatgatgatgtggcccctgaggataaagagctttatgagtttaactcttcaggcaatcattcaattcctcgggcaggatccaaaaaggctaaacgcggccgtggagcaagcagctcacaaggtcgttcaacaagtcgtgcaatgtatgtactctttactagtatgatactaattactgactattgatagcacacccgctgtatctaatcttcggcatactacgtcagtcaacactggcaataacagccaggatgagaatagcattgagagtttagaagatcagaggaaaaaggttaaaaaattgagggaggatcttaaacaacaagagagacagttagtactacgggaaagggaaaatactctctagagatagggttgcgatagggttacttcatatacaataatgtttaatatcttcaatttaccagttttatactacttttcactatagggttatggcaaacgccatgttttttttattttttatacagagaaacactagtaaaaagcaggataagcataataacaacctttcgcaggaactccaccaatagcagccaaagtaggaaaatactagttcttcaccagtaaagaaaggaaggctagtagtatcactcttccatttcctctccctcttccatttcgtctccctcttcgttatcctgttcctcatcctcctctacagcactagttacaaacagctcaaaattatcacaccggtcagcattagcttcacggcaacaacctaatactagttaataagtagtaaaaagatacatttcttgataatatcttaccttgacgatcatttgcatccttacacggctcacaaggaacctgaccaccaagctccttagataccttacgcatattggtaaggtgaagctattccaatattagtatataatcaaaactagtaaattagaagtaactcacagtgccatctgccttacgaggaagctcaggcttcacttgtactatagcagcaacattcgcgtcatactcatcccggatcgcaatgtagaactctattagaggtcagaatactagtaaaaaagtagtagaagaataccataccaacggcatcatgctcatcctgtaaagttggacgaccacccgaactcgccaatttcatatcagtatgcttgtctgcataatgcttcctgagattgttggtagacgtagcaggagtctgtaaggtaaattagtattagttttttactagtactttaacaaagaaatgaaggaaatgtcaaagaaaacccacatctttcgggcagttggcataacgacaaaagcgctcgccgaggaatagatcgatttccccctgtgtctattctctattagttttattcattttattagtagataaatagtatgctcacattgggatcgtttagttgagggagatctataccctccctcgatttcagggtgcagtaccatcggtatgcagtctgaatgcgaataactgttagtttcatcttcaatctctggcccgcctgagacctcacgttggtcaggcggtcaatgctcacgttgatacccctagtttaggcttatagaaatgctgtttggtctggaaatgtacggtatctttgattagatcattccgttttggtatgaaatatgtggtatattttgtacatatactagttacgatcgtttagttgagggagatctataccctccttcgattttagggtgtagtactatttgtatacagtctaaatgtgaacaactgttagtttcatcttcaatgtatcgtattttcatcttttctaggaccttttcatattatcttatagggttatacttatatacatcgcgtacttcactatggtagcggtagttatatgacaagtgatgttggtggttatataactaataaaaaagtagtatggtactggtaagagagaagtgggtaagttagttaagggaagtggtaaggtactgaaacccttaaggcacacaagaactcttggctggtagcctcaggctgctaaccctactgaactctcaggcgggcccacatgacctgtggtcactgccagtggcgatccgctaaaaaaagaaacaggggaaatgccatggatggaacatgctggaaattggaatagagaagcaatgactttcattaattattatctgtggtttaaattactaacaaaatgcatatgtccagtgatgatgatgcaatgagacgatgtcacgctgtaaactggccgtacacctggatgatggcttcccacccgccttggtggtctgattgacggggattgctctttccatcgagcaccattacatccgtcttgcgcgtgctgatcgagtaccaaaccaaattctgagggtcattcgtcacccgcatcatgttggtttggcagttcccctcgcaaggcatgttgtacagaccattccagtacccgtcgaaaaacgcccaggcagctgagttgtacagcgcgatgttggatccgccgtcgacgttcgtagctatcgcggtacgacacttttgatcatctgcagcacaccacgagaaatcagggtcaccgtatttggcgacagctgtccatggcgctggtgcggcctggtactcgccttggccttgcatatacggtgtttctgtttgaagaagacccgcaaagacgttctgggctttgtggaagttgtagttatacagccagtgatgctcggaaccggttccagtcagccaggtgcccttggtggattcgaccaagattccgcggcctgttgagataatagtgagagctgactcgctatcaaggttgtgatcggcggtccatccccagaagttctcaatatatgcggacgaactgttggtcaggtgcattaccataaacgcagccatacagtccttggggttttgcgacgtgcaagcactggagatacttgtgtcagcggtcccgcccaccgtcaccatcgtgttccaaagaccgatatcgccgggctgagcacctgcggcattgatttcaatgatcttggcccctggcaggatttcgccaacggagaatctcatgtcctgaatctcaatcacaccgacgtcgccaggattgccaagttgaacgacaggtctcggattgccggaatccttgaacttctccccatatccagaaataacagaccatgcttctccaacaatgcgagttccgactgggacgaagatagtgtctgagactcgatatacaccaaaggggatgtatgtcaccttgcacgaatcggcattttcagccaagatagcgttcaggcctttggtgtcgtcagtcttaccgtcacctttcactgtgtgtccagatacggtcttcacatttacaatatccgctgtgctgtaatcttgataggtgggctgggccttcgtaaagtatttgtctccaaccagcaaagcggccggccgctttgtttcccagctcaccccagtctggtaggtttctggaacaacagtgccccagacccatgtgtcgacatgagcattagcggccaatgccactttgccctgagcgtcgaccgcgatagcgttcgaagtatcgtgcttgaggttctgaatgagaaactgactattttggtttcctgaatcatgggacgagtcatagaatctgactactggtcccgtgttcgtggaagtggaatctagaagcactaggctacccagtccatttccagtcatatcgataccagtgccgcagctatcaaaagttgcttgttggagcaacaccgtccacccacctgccgcggagaatgctgttttgcaagattggaaatagatgttcttgaagttgacctgttggttggagttcttgatcccgatagctccgccaataatatcctacgctttgttaggctgctttttcttcttcttgggcttctctgaattacttaccacatccgtgacggcaattgttgacccggcattgatatcaatcccagtgtgacccgtggaatcttttggcatgcgaatcttgacatttgtcaaccccgacccttgggcaactccccactgaagagcagtgaagtggcggtccgggctgagggctgtcgtatcaacgatcacattcttgacaagcgttgcaaagctggtttctgggttgccattgtttgaatcgtaccccatgatgagatagtcaccacggaaacctggtgcagctttgatgatgggtgggttcaacggattgccaacaattatcgtaccaacagtcaggttgagagtggtttcaagctggtacacgccgcctggaaggtagacctgggcaggataccgcgtgacaccttgacccttgcgactgccgcccgccccatcatcgtctatagccttctgtaacttcggagtttggttaccgctgccatcattgacgaccgagtagtccatcacattgcgatacaccgggtagagcgacgttttggcgtagggagcaaatcctgctccttgctgattgtggtcctgctcgtccagccagtaggtctccggtgatttggtggtaggggcagcacatgtttttgtcgcgggcgaatgatctacttgagatattggactggacaggttgtcagcaatcaagtatcctatgagacgttaaatgacacatacgatggggttgaagcactggctgctgtcgtagtagcctgtgccatattcgaggaggagccagccacctttgtggccatcaaggtatcgtcagccttggatggagattgcacggtcgtggaaagagtatttgctataacagacgaagccttggtacatgcgcagtcatgaacaataacagtggatgatgtcccggtcagacctgccaaagaagatgcaagcgcccaatcaaaagggtagtcattatttgacggccttgcatgaacggttggagatgaaagtgcgtgcgatgaagacgcatgcaccaagtctagaggcacaatggcacctgatgttgtagacacaaccgctgcaattgcaaccaaagaagagaagcccctcatattcgatcgaccacaaaccacaacctcaatctcgaattagacagaaaagagaaaccaaaaagggaatgaatggatactaataaaaccatcgcaggtcatatgtcaggttttcttgcaattagcatgccaggtgatcttggaatgcacacgatcaccttgtatgaagaatgtatgtataggctttgttggtacatcttggctgaaagggccatgggtgatcgacgccccttgcaagactcgggattcgcaaccttcaggcatactatcgctataactccccttgtatcgccgaatttgttgatttcgtggaattctaggcttacattataatatgctgcatggtctccatcctacaaaacagtattaaatagcttcaattggatttacaacattgtgtagctcgaaccgttaaaggatctcatgaatatataccaaactgtacactatccagatcagacaaagtgatgttctaggttgtatcttgactcctaccatcgttaatgcctagctaacactcacaattggcgtcaatgtgatattggaaaataataatcagatgtgttatatgatgtgtttctaatgctctagactcgtgccacgtggtaaccggtggaacgtcggcacaatcaaggttcctcacgacaccccttgcattgggtcgaaggtccccaggtagtattgatataaacttccatgccaatggtagctatgcagcatgaagtatgcctccttctgattgcctgccgatcttatttgttagacttcatctccatgagtattacctcggcaggttctatacaaaattatacatgagtcatattcatgaggccgtcaaactatgacttacaataattccagctttggtatgtctcttacttggaatcttgcgctttctgcaaattgtaactataaatggagcttaaagttgcgtatctacaacatcccatactgcaatcgtcggagacagggaattgccaatggaacaaaatgttagaatctgttctctagggctgctaatttatctttctaaagcaactgcataatgatatttaggatatgtgaggtggcgagaacctacaaggccgagatttgcgtgggatagatttccgacgaggcgacacccgcaaacaataccctatgactggcgggaaaagggcttagagtcccgttgagttgatgatttcttcctttgaactgcatgaaaatgaattccctgttgattgccaaccgtggttcacacgtctaccccaataacgtctctgtgagctcatctagcgattatgatagcccaatttggcacgaagatcctgaaagcattagacgaaagaccttgtatgattcaaaagcttcatcgaaaagaggttcacaaactacaaactcattcgtccccgaacgatcggagactagatgttggcgaaggagtgaaaaccacgcgttgccttcatgtcggacgcatccatcagcagcttcaatgatgactcggacccagacaatacaacctcgtccgaagtttggcaggatgcgccccaaaccagtccacaagagaaagagtcatcaccccatattcgatttcgatcaaatgcgggtttcatacaggaggccaagcatgacgaaccgccaaaagtttttcgcgaagaatgggatttggctcaccatgaagggctgcctcatcggccgacaatgccatactcccatgagtctgaggatattgccgatacaccacagcgagatcgtgagccacagtcgagtgagacggacagcgagtcaggtgtccaaaggatagaccagaacaagcgaccgggaggtgagaagaaggaagacgagaagaaggaacatgagacttctgaacagcaatccacactggagaaatggcgaactgcgaccaggaatttcagacggaaagcatcagagttcggtgaccgtctgggtcgcccacaggccgagggagacgacttaacatccgggagatatcacgcggactgggcgaccggtggtgcacctccactctctgatgtgacagatgacaagcacaaaagtgtggaggcgaagcagcgcgaccagaaagggactagctcggaagcccatcgtctagtgcgagatctgacgcaagaccattcccaaaaacgccgcaaaggccgtgggaaaccttatcctcaccccgacaacgaatttaaagacgaagagaatgagacaggagcagatgcgagcttgagatatcgctctggcggcggcgggatcctgtcgcagttgatcaaactgcagggtggtcagcaacaaggtgctggaggccagtctcgaacatcaactgactcatctagcagcgcagaatcggcccccagcggggccccaacaccaaaacctaagaagcaaaagccagtgaaatggtacaaaaagcccaagaatacgtcgaactcgaccttgattggtgggggcgcagatagtttcagtggtgcaagcactcctgtttcaagcgaaatcctatcgcaagcctcgaggcgccgtgacaaggagggtggcggtggcggcggtggtggaaatcgcaatatgcggcttgaggatgagattcgagtgacagtgcacattgcagaaattatctgtcggcagcggtatatcatgcagctctgcaaagcattgatgttatttggtgctcccacacacaggcttgaagagtacatgcagatgaccgcaaaggtattggaggttgatagccaatacctgtatctgccaggctgcatgataatgtcgttcgacgatccatctacccgcacgacagaggtgaagatggttcgagtagcccagggagttgatttagctcgcctatcggacacacatctcatctacaagaatgtgatccacgatgtgatcggcattgaagaagcaattcaggaactcgatgcggtcatcaagaaaaagcccatatatcacaagttcatcgtcatcttggtgtacgggttggccactgcaacagtcgggcctttcgcttttagtgccaggccgattgacatgccgatcatttttctcaatggtatacttgtcggtttaatgcaacacgtcgccgcgcctcgttccgtgttgtattcaaatgtctttgaagtgacatcgacagtggtgacgtccttcctcgcccgcgctttcggtagtatctcccttggagtcgtgaatggcaagccacaatacctcttttgcttttccgccatcgcgcaatcatcgattgcattgatattgccaggattccttgttctttgtagtagcttggaacttcaatcccatcagatcatcgctggctcgattcggatggtctatgctctcctcttctcgttgtttattggatatggaattaccgttggcacaaccatctacggtctgatggacaaccacgcggtctccgacacctcctgcccagacaagggagcctttaagaatccatatgttcaacgtttccctttcgttgcaatccagacagtctggcttttgatcatcaaccaaggaaaatggaaacagcttccacctatgatcatcatcgcaatggcgggctacattagcaactacttcagcacgaagagactgggatcaaactcccaggtagcgaatacagtcggcgcgtttgtcatcggcatcatgggaaatctgtacagtcggctctggcatggccatgccgcgaccgctattctgcctggaattttcattctggttccatctggacttgctgcgacgggatctctgatctcgggtgtacagtccgcggatgaaattcgtcaaagcgtcgggtctcatggtagcagtagttcagcgcccggcgctggcttgcaatccaattctatattcagtctagggtttggcatgatccaggtggctattggcattacgattggtttgttcatttccgcactggtggtttatccatacggcaaggcccggagcggactatttagtttctaggctttttgtcacgccgttgacagttggtttctgatgttgatgttgatattgggataatgtgcataacaaaaagaagaaataaggaacatattctacgatgatgagtactgtaattcggcccatgtgaccaagcgcctatttagggaaagtagcatgatgccctaggaaacttcaactgtcccatggattgtactaatgctacatacatccgtatatgtatgattgaagtcagcgcactctcaaaccagccgtcacaactcagaaacatacaaaattttctacgatgctattcttctcactcaagaggggattcggaaaaaggagcgagttcttcagacacccccgaagtccccgcgagattagcagattcacagtttggtcactattttggacccccttcatcctgggtaatatctggactgcgaaagtaatagagcaggagagcaataccgacattctcattcggcgagagtaaatctattataatacccttacggaaatacggcgtgctttctaatgctcagatacctcccatactcgagcgatatcctgattattcttcaaattgccggccggtcgctattcccgaatgcctatatgagtcattatcgacgaagaaagctcaggttaagagcataagacagagaggggcagatgggatagaagaaggggactatgctacgtgggcgtgttcggttgcgcagaaatgtgatgagaaatggaagggagaagtccagaagagggaagagagggatatatctagttgggggtttatagcgctttaagtttcttcccaggtagatagctatcgtgggaatgaattgaaccagccaaggcacctttcccgttgtcttttgtgagtgaacgaaagcatgatatgaatatgaaggttatcaaagtgaatctccaatgtattaggaacaaaatacctactgtatgctaaagaatcaagtctagcatttctaggagaatagtgaacgaaatccgacaacgcaatgcaaatatgaaataacataagaattaaccggcgaccagtcgccagccagctcgctttaataccataggccctaaggtgggtcggggagcggcgatagaatcatgtttcgaagatattaagcgtgctctattctgtcatcttgcgtggttgttatgacctttttgtgatcttgagagatagcatgacccagaagttcgagcaggtgtcgttcgcgatatgtgaagacacgaacaccggttgtttgtaggaatcgctttgcatgctccaggatgagctctagatggatgggaggaaggcgaaagagggtgtcgagggagacagtgatttggtccggagaggtgttgagagatggaaatgaggcaagaagatggtgggtggtcttgtcgcgggcgagggactcgcagtatttttcaagcatattttcccggacaatgaagtgaagaatcgagtccaaggagccgggatggataatagcctgcggtagggaatgttcaaggtcggcgagagcgcgctgcattacaatcacatattgcagatcttcaatgagcggtagctctgttggtgatgtatgaccaaagagtgggcgatcatagccgagctgctttcgccagaaatagttgcataggattaaagaaataatacacgggatcaggacaacgtatccccaccaacgctcggcagtgaccattgaagcggcaccagcaacaagaccattcaacccattgacaatggcatgccattggaatccacggaaccgggtatgtagacggcgacgtatatcatcactcggctcgcgggcaaaaacagcagcgttgtacacatggaatcgatggaagagatagccagaccagatggcattgaaaaggccaaacactgcagcgagaccattcccaatatatccagacagcagattactagctttgaagacatgggggttggcgccgccaatcgccatcaaagtgccaacaccgaccaacaacgagccgaaccccatcaacacatccatcacgatccggtcaatcacttcggtgccaatttcacggactccaaccccaagccggctgtcaatgagccgggctagttctgcgttcttgcagtggtatttccgcaaacgttgtaggtgagcccgctccgctcgcagcagcttgacattgatccagctcagccgaaaatcatgaatagcaaccaacaccattcccaatgctagtgtaccaccaattcccatgagcacagcggcaaacttcggaacgggggtctgattccagacgttggcagcgaagtcaccggcgttggctagctcaaggtacccgacactggcgagcaagctgtttttgaattgctgctggtgcagtagacggaatcgaccacgtcgccggactagcacaacctgggtttttttggattccagggattcctgccatgtgatgtcactggcttcacggatgagtttcgggaccacgggtggtggggactcggccgttgatagtaagtccatttccgtggccatcgtcgtgggcttggaaattgactgtgcgaggtgaacgggagatggaggggtgaataaggtgtcagaggaggtggtaggggtcaccattgtaaaagtcgtatgcgggtgaccgtaggaaggagaagctcacacggggccatccatgccgatgctctgtacaaccgagtttagagggttgaatgaagattaaattgacagcaaggagggggagaaagacaggaggagatacaaagggacaaggagacaaagtttcgaagaagaaaagacacgcaagcacgtaagaccagggaatcatccggggtcttgagagttcacgggtggagcaagacacccgccttggcgtagccctatagggctgaacatatacttcggtttgcaggggatcattgtccgtgaacgtctacggtataatattgtacaaaaaaacctagctagtaaataaattgagtggaaatgagccacaggcatgatccctcaactcccaatacttacattactgggtgatacagcccaaccaatccaaggacctggcgatctttacatagaaaatcctaggcagcgacctaatgtaaactgtaaatatggtctaaaaatacataggggcgagataatctatgcctctttcgaagatttaacatcccctgagtggggtgtgcttaatgcacgtattagcttgactcctgcgtctgccatatccccggaatgagcgctccagaactgggcctcacggtcggatccacgaagcacatcattccagggctcttctttggtcggagagggagtgccatcgattgacggctctatttcattcgagctgtatacattgactcgttcgttgaaacgcacccgatgacgagtgcgaccgttcggcgagccctgggagccggaactgagggaggagttcctcgccagactagcagcaagataatccttgcgcactgcataccgtatagcctcttctcttcggatcgaatccgagaaaatcttctcaagggctgtagaagcagtgaatcgcatccccagatagacctgctcggcgacgaacaaagtcaacagaagcgaggagagccggacctcggaaataggaccccgatagacatgcacaattgccgctgtagatagagtccccagccaggccaagaaatctagccccaatagacatgggccgatcgaatccgaccggatgggtggtggtcgttggcactccagcgtgagcttgaagaagtcaccccgcagctccaaccaattattcaacaggaagccgagcggaaccagtggccaggcaactccaaataatgcgagatagccaaactgtacacacatctccatgatgtcctcctccacatggtattcctctgcgccggcctcgctacgcagtcttttcataaatgctgcttcgtctggagagtcaaccaagaacgagctagttgttgcggaatgcttccgtttgcggctgtactcggcctttccatcccgatagttttgccacttctgattcaggacatgcttcacatatggcaggacaacttcctcgccgaagctaagtacctgagccgtcatggaaagatatatcacctcctgctggaatcggcttgtatcgacctcgaatttcttgtgcccgctggccatatcggccgtgagccccgttcttcggaggatgtcgaagtatggaacaatttgtttgccgaagggaacatagacataggcggtcaatatcgtggggaggaaggaagtgataaaattcatgacgaaattcttctgagtcagggcaagatcgtattgatcctgcgttcggtagttctcgtacttagtcaagcgggttgcgatgcttgtgagaaacgaggtgatggcgggcaaggatagcgaaaacaggacggtcggtacgaattccagatactctttgaatggaccgtcgtatacctcggatatgaacacctccgatgcgaaggaggcaacgatcaatgctccgagggccacgcttgcaaccgaagcaaaaggaaccaaaagcagctggcgtaggaactgcttccaacctgggaagacatatttcacttgaccactgattgggtccttgacctctttctcccagacgtactgcttgcgatttaccttgagtcgcccaacacctttgacatcccatctctgactcaaatcggcctctcgaatcttccagtactcgacgaatacaacgcaccaggcacaaagtacagttccatacacaatggagtatggacctagatacagccacccaagaatgcccaatcctgcgggcaccacgaggaataacgaatagcaatggataaaagcgtagtagaaagcgacctgcacaaggttagctgtttgtcattaaaccgagccaaaacagtcacggataccttttcaccaaacaatgctcgaatcgcatccagatcgctagtcgtcaatacagtttttcgattccattgacgaagcatttgcgcgcaggcctcctgatcgtgtaagggaaacgaggcggtgatgttcttccattttccaaaacccggcgtgatgcctgcgcctcctattttcttttgccaggtgacggcatggtataccgaacgaatctcttcggctggtgtatcggcgtcggcgatagctgtctcgtcgccgtccggtaaggtatgagtaattccaaacagccaatccttgattctgtgaagtgttaattgccccaaaattcaatcgtatgacattcaagacccccaaaccccacttaccttgactggtgtactaaattcccgagatgatcccgcggaacccgaatgcagactaatagcgcttccccgtggccgtgacgaacctgaacccgaaggccagcctcgcccaaatcgtggatcagcgtccgaaactctgtaatagcttgggcttgatctgaggatcattagtatatatgcaaacggccaaggggatcccacgcgatttaccgacgtcgccaaattcatattgtaatacccaatccacgcccaggttatcgttatcatcttcgtcattgctataggccgcgagccaggacatgttggctaggtgtggcctattgagaagagcaattggagggtaacaggtggtcagagtggttcaagtggtcaaacacgtcacatcaaaagttgaaagggaaaatgtggggagattgcccttcaaggttgtcaccattacattattactctagttagttatgtatttttctatttccttctattttggttccacccgggtatacggtatatcattgctgaccacacagccctaccatttcaactcaactgctacctgaacccccgaaggactacaatatccagttgagattcctgaattgcacaattgccttccccagttcccatccgactcctacatacagtcgttatgctaccggaaatacgagtcagccccacaagtcaagcttcagccctatgagggagatttcatttgcatgaggatccagtttgccatccaatgataagcaacttacgatcaccatttctcaccatttctctgccatgcccccttacatgttcaggggaatcgcaattgccttttaagccaaaggaaatactcgaatgagttaatccggcactatataggcgacttaaaggactcccctgttcccaagggatgcgctgtggggtccactgcgggcacgtgcagttgtcggattggcgggaattggctagggctgaacaggagagagagagcttctggttcattaacgccctaagaaagcccccgtgaaagggccagttctctggtccagaaccaattcccggggtatctcctctcaggattggcagactgttgggtgaaatgctgttgcctacaaaactccatgccaagccactaattcgtgatttgcgacgattccaaggaaaacccacatttcattggagatccgctatttgcggtgaaagttccccaacgtatctgaacaatattggtgccaagagtggaggcgggaaaacttgaatccatgacggcgatggcgcaggcatcaacaatccgcaggtacgggctattacggagtacatacagctttctgctgaaagaggtgctctcagccacaatgttggggatagtacccatccggcgcttcccatcgtggctataagtacatggggtaacatgcacgaccgagcgccatgagatcatttcccacgaaaaaaaccttttctttcctggcgattattcacgttattcacgtccctagcggcttaccgtatgtactcgattctcgagatcatggcccgtcggtttcctcgtgggcagaatcttaccctcgggttgagtgtcttcctctttatcttcatgtttctgcctacctttgttattctgctagccgtcatcgtattctttgggctggtgtatccgcgattacgcaagtcgtacagccttgaccccgaaggagagctggagtctcggcagtcggaaaccaaagattgaatgatcggagcatggtatgaatatatgcaatgtgctcggttatgttcaatcactaacgtgtgtaaagataccatctgggtgtaatactattaaaccctgctaccgagtccacgaaaatgcattgacgcttcttttttttttttgtcggattgtgcaccaagcacaggatttcgagggcgttttgggtgtatcttattgagttcaagaatctgaatgtttcatgttatttcaactaaatgaagatctctagtcataagatcttgaatagagaaacatattatttcttgcaatcctgctgtatattaggtaaaagataaacctgaaacaaatgcctagcaagtctagaacgaaaatcacaatgtcttacatatatgtacagtcatgtaactaaacattaactagtacaccattcgtaccatgactctaacgggtagggctgacacggtacatggttgaagggctccttcctctttccccgttcctcccgaggtctctccgttcctctttccccgggtcatctccttcatgaatacactggatcaaaatccccatccaatcccatctccttgagagtcctcttcgagaacatataatgggctgaacagattcattatcttcatccatggaagctggatctttccagaaaacagagcagcaccccctaaataacaccccgctcaatatctgatggcatcagcccaaccgctcagggtattcatcatctcacccgcctctattctgactcaggatgcacaacaaacaagaaaagcagctggaaatcgaccagccactgcctgatcggtttagcttcttttcgtcaaaaacccgacaagcgaccgcctcgtcgacatgggatggtcttttccccaacgaaaacattgaccatatcttccaggagaagcttaaaagtcgcccagatcccaaccagccaatctggtggattgacatatgcgacgccaccgaacaagatgtcaatgccatctcacaagctttgtctatccatcccctgacggcagaggatattgctattcgtgagccccgggagaaagtcgacgtccacaagaactactacctgatctcgtttcagaccctcgtggtaaacaaggtcaatgagcgaccgggaattcccgtctcggctgcattatacattcttgtcttccaatatggcgtggtcaccttctcgcctagtggttgtgggcatgtggctcgggcgcgagagcggattcgcaaaatgcatgatcccactattctgacgagtaactgggtttgctatgcaatgatgtgtgttcaaccattttcccgctcagcaacccccttttcaatggatgcacggctaattgatcttcagagacgatatcattgacagctttgggccatttgtccgggaggtggagcgcgagtccgaagcaatcgaggatcaggtgtttatcagtcgcatcgatgacgctcaggctcttgttccgcagattgactccctccggaagaaaatcactcacataatccgctgcctcagcggcaaggtcgacgtgttgaacggattcgtgaagcgctgccaatcccccgataagaaccctgttttccctgaccgtgatctacttctatatctcggcgatgtccaggaccatctaatcacgacgttgtcgacacttgggcacatcgatgagatcatcggtcggtcccaggcgaattatttagcccagatgagcgctacaaatctccggttgagtctgactattaactctggtttgagtaaggtcactcttctggctacgatcttcgtgccgtgccacctggtcacgggcttgtggggaatgaacgttcctgtcccgggacagcatgctagtgggctagggtggttttttggtatcctcggttcttttgcggcattcatggtcatttgcatcgccgcggctacgaagtacaaacttttgtagacgttgaccgatggatacatttggcttaggatattttagtgctaagagacaatgtattgaatatttttgctcattccttctctaattctaggcctcgtttttcaaaataaatcaatggaagttattcacaggtattgcaaagctttcgtagcccgaatggcgacatatcgatgctgatcaacaccgatattcaacggtcggagccacggcattgacttagtcccaccatcgttgatcatcaattcaatgccatagattcaacagtgggcacttccggcttctgcgccgggtgtgccgtcagctacacacttctgagcaggcatttcttcctagtattttgtggcgctgcttggaggctgtgtggtggagtcggaatcggtcgtcggcccaagttcgtagctgaaccagagttcggtggtcttgatggtcttgtatatacagcatcaacaaattctagacaggcgaagggggagaagaagagttcgctacgccggtcaagatctcggctgatagggcaggcgctctcttcaaacaggaaagatcagcatgaactttgttatacacaccatcaactgtcattattaccctctgcattccgtactcgatagctgcttttcttttggcttgcctattggtctcttcggtatcttgcatattccgtgtacatcattcgtgcataatgtactccgtactgatccgaggatacctgatagggtcttacctctgggtacgtgcagggccgacgattgcgtaatgtggcaggcgagttagtttgttagttatcggtgtcaaccagtgagtcagattcgaaaaacaccagtgggtccgacgatggcagattgtggcaatagctagtgacacagccacaacagcaagtacctgtggggcggaaactccacaaaccaacgagaggcgcagcagaccaacagctgtacatccatgtatcgagagatacggagtatgtgttgtactccgtaggacagtcggacatgggtggagccgttctgaaaatacttaatgactagtggtcaatgaagcacgacagcgcatacatccaacgcacattgtacattgatgtactccgtgctccgtagagtgtacagaaagcgccctaaggtgtgacgagcacccgaggagaataagcgaaaacaagacctcagtaccaataataagagcacccaaatacggggcttgatggtcgatcccgacaataattcaccaatgatgttgagattcgtggatagcgcgtcattgctggattaaattggtccaattggtccaatacagagtaacccctgcagcattcaggattgacatcatgctagggatagtatagtatagggtgacgaaagacaacgcgaggctaggaatgtttgcataggttaacggttgtcaaacattccttgaaagagtaatcaggatctgcagggctgagataaaaggacggaaaaaggtgtggcgttggagaatcatcacgccaagctgccaaggccataagtctggccccttgagaagtcaactgtcgacttcactcttcgctctttcctattttcacctactcctactatcttatcatcatcaaaggcttgttgccttctttcatctaactttttttctctgaaatacatgcgtaagtagtttcccagaggaggctcaaagctatagctgtagctatagctaccccgagatcttgtctccactcctatgtatctggctaacgatgttcccttttgcagaccggattcactcgtgggcgaaagctcacgcgtcttcaagcggcctgccagaccagtctccctccgaacaggccgccgaccctgttaattccgaaaaaccttctcaacatggacaagtgaatgtacctgtggaggaccccactccggggtccgtcacggaaaccaacaccaaaccgggtcttttgatccgtatgcgaaacgggtccggccgtttctatcaccatactgcggatgctatctgccacagctggattaatgtcttgctgatatttgtaccggtcggcattgcctgtgaggccgcgggtctcaacccagccctcatcttcgcggtgaatgcagtagccatcattcccctggctggactgctcagtcatgccacggagagtgtcgccagccgacttggtgacaccatcggagctctgatcaatgtcacttttggaaatgcagtcgagttgatcatcttcatcatcgctttggtcaagaatgagattcgcatcgttcaagcttctcttctcggctcgattctcgctaacctgctcttaatcatgggcatggcttttctcgctggtggccttcgcttccgagaacagatttacaacagtactgtcactcagatgagtgcttgtctgctcagtttgagtgtggtcagtctcctgctgcccactgctttccacgcctcatggtcggatagcaataatgccgatcgcgagacactcaaagtcagccgtggtaccagtgtcgttctgctgttggtgtatattctctacatcattttccaactcagaacacactcgtatctctacgccagtatccctcaggccattattgacgaggaatccaaacctggtgttttggcagaatttatgaacagctcttcggattcgtcatctagctccagtgatgagtcggatgacactacaacttcctggaccaccgccaaacggatcaaaagagcaatgaagtatcgcagacaccgaaagtcaagtacaagctcgaaagggacaatctctcataattccttccagaagagggctatggcatcgacttccaatgagaatcacggttccatctccaattcaattggtagcaatgaacacgccattgagctcagtgatgagattcgttacgatgccgacgacgacatcctgccctcttcggcagtccgttctcgcgactttggtttggctctgagccgcatggacagcaaagcgagtaagaagtcgaagaaacgagatcacaagaggcgcgagacccagaaagcagagaagaaggctcagatcgaggcctccgaacacagcggtccctccgatcaacgtccggtcctcaagggattcccatccgcccctaacgttgttggcttggaaagcgtggatgatccccggaaacgccggtctcctttcggacctattccgtctctgctttccaacactgttttcagctcccagtcacccgcgggctcaccccgtatgggggccacttcctcgcggccaggaatttgtcgcagcaactcgctccccgcacataccagtcgtcctccgctggccggaaacgcagtacagttcgcccgtggcgcttctcgtctaaccgagcataatgatatcgtgggtccggagatagcttctcaggccccggaacccacaatgtcacgtaccgctgctgttgtcatgctcctgctgtccactgctttggtggccgtttgtgctgagttcttggttgacgctattcccgatatgatcgctagctcaaacgtcagcgaagctttcattggtctcattatcctgcccattgtcggcaatgcagctgaacatgttactgccgtcagtgttgcgactaagaataagatggacctgtcaattggtgtatctgtcggtagtagtattcaaattggtaagattccatccgttttgatgatgtttctacgtgtgcacattctgactatgccaacagctattttcgtcacacccctggtcgtcatcctgggctggtgtatggacaaggacatgtctctgtacttcacgcttttcgagacaatttgtctctttgtaaccaccttcgttgtcaatttccttgtactggacggccgaagcaactacttagagggtgtcctcttgattgcagcctatattatcattgcgtgagtttatccctgtcctcggtctcgcttcaatgtgctaaacatttcttcagcctatctgcgttcttctacccgcctagtacgaaatcaagtgttatcgcaggctgatgagcatatttatgaacccgcgctgatgggatctcgagcgtgggttggttgcgccgtcaaaggtctgtccgctgattgatcgcctttgatcgccagcgctagagcgccattgataaatacacgcctttaattccactctttcctcgaacgatatgttattactggtatgcaagtcggtagtagtgcacgtagtgtgagcaggaataatataatcgatgtatatccccaagatctcgtattgctggctgggaatcttctataattaactgctctagcaacgcgcgttggatgaatcacgggaaatgctccatccgtggccgatcatcgcggtgctcgtagagcccctggctgcctgctattatgcgacctgagtgctttagttactcaacagaacgacgaaagacagttcggcatttccctcggtcccactgatcagcctacaagaatcgaaagagtatcacttagactttggccttaggaaacggctcatttatttccaagcccctgacgatctcaggctatgacaatattcacactatcctgtgcgtagcttaggacaatgcatatccgctggctcttcttccgctctacggcctactaggataagcacttttctgcctctcccacgcgggcaatgcccacttcaccatatactgggacctgaggagttggtccgcctgggtcgttccgcaggttcaaacgtcatcatagctctgaggaagtcctccaacgcacgtagttcaccacctgcaacgtcccattgacacgtctgctccgtctcgccacggcccatgtcccaaagtcgctgacgcagaggccggaagacgggagtgctgatacggcggaagttagcgacccatgacccatccttctcgaagagttcggaacgattcgcccaagagtctcaccatctcatgggcggttggtccagcgtattgaccatttcggcgataatgtcatctcggtcccaggcaaatgtttcgaagagtacgcgctcgcctaagagttcatacaagttaacaccaagtgtccatatatcagctgcggtgggttgaatgatgggttcattaaataaatcttctggtggagagtagagagatggggtatggagagttggtgagggagtctgtgccacaataaaggacgtcccgtagtccgagatgatgatttccgggtcatccaactcgttggcaggcatgctcaaagccatgggatagatggcatagggtggtgcgtggggttcaccacgctttccacccagtcgtatgataggagcctcgtggttgtaccaaaacgcttgtatagctcagatgtggttaggccgtcgaagttcggtatgcgtaagagaaaattgcgcaaatgaagatctgcttgtaattagtatgcgggatcagtaagccgggatgcacaacctaatgacccccacctccgtggaatatgccgtttgcatacaattgagacaaccctaagaggagctgggcggcagcagatctagcagcgtccggcggaaacatgaatttgggctgtcctccttgggattagcaacattggcaccagcaggctctccgaccaagcaccgatgatgtccatttggaccatgaaacgagaattgacctagtagcgatggagtgaatcgctttccagaatgagcgaggtcgctcttcatcgggaagtggttatctggcgatgctcttgcagtcagtatctttagggatacatagcgctggcgttggtgatcgcgggcgagccaaatcgttgaatatccaccaaaaccaagcttgtggacgacggtgtaacggccactacacaaggtgtctccgatgagagttgggtggtatccgccgggtacatagtcctcggaattttcaacatctgcctcaggatggtatatatcttccacttgtatatatgaggagtcagtcatagcatgaaggcatcgaaatgggtgcggtgacggagggactctgttacgacggctggtctttggtgtgaatggaaaccggcacgggaagatatcctgattttgtcggcgaattatcgcgaattatcgcgaattggaagaatggacgagggagtctccagccatggttcaatttaatcttcatgtctttgccgggatcatcgagtcgacgcgctggcagtactgaaagatggtgtgtgactgaggcctatctccaccagccacgtgtgtgacagtcagtggctgtgttttccacagctcggttgtccgagccacaagccacatcgtggcttggcagtagcacacgacatattgattttaccgcaatccttaatggcccccctatagaggggaactctccactgcgggtgatattttccctggacttattattatttggttgtatacggagtatggagcacggagtacatcgttatggacccctttttatacgaattatccaaaggccgaaccgtggaaataaatagtcaagctcccgagtggagcaaagtcgctcctgatctgtaaagcaacccctctactccgtactccgtgctctgtacggagtatgtatatacggcttattgtgacacgctaacattggataggggtcacttggcatgctgaaatcgaatcggtcatttggctgagccctgcaaggcgatggagttgtcaatctggcctgtcagctccaggggctcgtgctgcactttatatcgcatctgcctaatcggagtagacgtgaacttgggcgctaacatgtaactcctagaagtgggggcatcattctagtgttggacagatttgtggagttgtctctttcggttctgggcggaaggtgatggtctacaacagttcgcgctctttcccataaaagccctgctcgctcccccatttctaagttatcctcattttctcttccctccttcatctctctatcaccattcattatgtcgtacgctccaccttacggcgatccttatgctcgccctccctcagatcgcccaccatacgacccctacgggcgcccaccttctgatccctatgcgcgccctcctcaagatccatataaccgtcccccctacgacgctggtcgcccagcatacgaccgaggcccatacagtgcacccccgcctcaagcccgtccccctccaggccccccgcctcccctgccccagggctgggtccaggaatgggagcccagtactcgtcgcgcattctatgtagagcaggctactggtcgctcccagtgggaggcgccttaccagcagcctgcctactctggttacaatgatggttctcgcagtgttcctcctccccagccccaaggaggctactatgcgcctccccagggccctccacctgtgtcttacgatgatcgtagcgctggctactatcagcagcccgagcctgagaagaagagcagcaatgctggcaagtatctcgcagctggtgctgctggtttggctgtcggcggtatcggtggtgctttgattgcacacgagcttggtatgtgatctctctgtttgggttgaatggcttgtttttgcgcatgctaattttttatttttttagacgaggactcggatagatcagatcgcgaagatgcttacgagcagggccgtcgagatgaagaagaagaggctcatgagtcagacgatggcggttggtgattgtgttcacccatgggctgttgcttgaaggtctttcatcggtccatcgtttttctaagattcacaatcttttttgctgggattgaggcttgcattttgcgaaggtttacatcattaggttgctatcacttagcattgcatcgagatatttctctactatcattttttgaaaatgcgaaccacctttaaaggcaacaattgttccatctttacttccaacacaatatctccccatgcaacaacccaaaccaggcatcttcatcttccacaaactgtctccatccccttgcaataacttccaaatcctctgactctgcgaagccctcctcgacaacattcttcgcaaacccagaagatctagccctttcctccatagatccaccccaatacaccctctccccgtcactcccaaaacaccaagcccccgcactcttcttcactctttccttgtcaaacccagcctcccgtgcccaaacatgaatcatcctcccgggatgtggatgaccacctttagaaatttgcatgcgctcggtaatctcgcgccacttagcgatccccgcagactcgggataccagctcagctctgccgactcacgacatgcaacaatgccgccgtccttaacgacccgcctcatttcctttagcgcatgaactggatcagcgatatgttgcagaacctgatgggcatgtaccacgtcgaatgtattatcctcgaatggcaggtcgtggatgttcccctcttggaaggtaatgttggacacgccttcggcttgcgcaagggcacgagcgccttctagtggatcaggtacgtactccacacctatgacatgtccggatgggacctgttttgccagggaaattgtgattgagccaggtccacagcctacatccaggattttcatgtctggctttaggtgtggcaggaggtatggcgcggagttgaagactgtgcgccagctgtgcgtgcggaggaccgagactgaatggtctgttgtgtagacttgagacatattcgatgggttgtggagttgtatttgtgattgtaattgttggttttgttgaaagagcgttgttgggtgaggtcggcagtggattttatagttgcgggaatctagacctgcttcggagttccgtaatgatcttcaatatcagtggccatgccttttaaggttaattcaacaccttcaacttggagcattcaattgtttcttgtaaataactcgtgaatgataagagtctaaaccatgagatcaagtactaggcaacaagaacctgactttagcgtcacacagtaagtgcttgagatacacaaacaatgcgtgtttttcgaaaccacatacccaaaagaatgcaaagtgacctgtgtacatagttactgttaagcgttaactaagaggtgcccagcatgacttcatagcttggcatttagtgcggaactccgaaaaccttgccggaattccgaactctcctgggattccatttcatcttcaatatggacgaatcagatagatacgagccattaatccctgcttcacctcgatttctccgcactgcgcgaagaaaggcatgccgaaaatgtgtgggagctaaaactgcctgtgatctcggaaaaccgaaatgcaagcgatgcagagatcgaggcacgagttgtgaatatccaacacacgtcaaatcaagaagtgctgctagtgcagagaatcaacacgccactgtgaatgtctgccctctcagtaccatttcttatgcaatatctccggattccacattgccagagggtttggtcagaagcactgggaatatatctcacgccccgagttaccccattacggataatggaccaattcgtccagataccactgctggcctggacttccatcaaattgatctagttcccatgaccgatgcagaggaaattcgcgatcgctggttacgcccctacatctcgagttcgacgggccaagaacccaagcagttgaatgctcacaccatacagtatctcacctgcgtgttgaaatcgtatcttagaaatctacttaactcaaaggcaccgccttttgttcattcgatgcagcagatggggacttgtccgcctgtcttggcttattgcttcaccctggttcggacatggttgactcggattcctgggtgtgaacctttgattttgaggacgatgcgggaagagatgaggaatattgaaaaccaagtatgttggcaccttattattcgttgcatatctgcctaatattacacaggatgccattcgaagtgactttgatagcctatgctcgttccaggcgtatctcatctactccatgacaatccatttcttcccccgcccagacaccgtcgaagaacccaacaacttcgatacccaaacgcagataaaattacaagaaattgctttccggtccgccaaagcaggtctcacctgcagagcagaagaatctcagacccggccgagctgggagtcatggatagtcgcctctgccaaacgtcgtaccctctttactatgtatctttttaccaacgtctacaatacccagattgggctgccaaacttcgttgctgaagaattgagagggattatggccccggaaagcaaaatactctgggaagcttcagatcgtgccgtctgggaaagagaatacaatcgccacttgtctcgctgggaggatacgatgctcgagatatcagagctgtggaggtctgctgatactggaacagacgcccggcgggagagaattgagcggtggctgcaatctgctgatgagtttgggatgatgttattttctgtttgtgcacatatccatggttgctagtcacatatttctgtgggcctaatttgagagagagcaaggatactagataccgaataaatttagatcaaaaccttgcagttgcttggttgcattgctctgtcacaatatacataaatcgaatcgaaatgtccaaatcacttcacttcttcgacatactggccatctgctcatctgcagaatccagaacagccttgatgggctcctttgagatcatgcgctcaagccactgcttctcgtttgggaactcatcaacgtcgaacccttcatcaacgagtactgtatgtgccgccttttgccaaggaatgaacgctatatcagcgtatgacatcttgttgccaaccaaccagggaccatccccaacatgcttgtcgttggcctccttctgcttgcccaaccacttgtcaagcacacccgtcacacgtttcgcttcttcaacatagcgcttcactgcgctagggagcctctccgcgtggtatctcttgaaccaataagcttgtccgtagtacggcccttgaccagagacttggaggtggagaaacgagcgtgcaagctcggcttctgcgctgcccggtgtaaagctgagcttgcggggttcgttggtgtcgtagcgctctatgaggtattcaataatagcgccactctcccagatggtcaggttggtgtttgggtcatggatcgaaggtaggcgcccatttggattgatcgcttcgtactcgggttccttgacttgagcgaagccgactggaacggattcaaatggtacttcgaggagcgtgaggatgattcccactttgaggggatttgggccaagaatgccaccatagagctgaatgggtttgattgtgggtgacatgttgtgattcaactgtgattgaagctagaattgataattgtgatcatatttacagtgacgggtttccattttatatgtcccaggggttacgttcaatttacttcttctcagtcattctttgtgattcctattatcaatcgctgtggatagttaacctgttggatttgtaacattgtccttagagttcgtccgttgtttgtccgatcttcaaaccgcgtctgaatattaagtaatcttcggactcgggcaacttttaagtccgaagaccgcaccttcggactttcgttattccgttgccggattactcaccagtgggccttccaaccttggaaggttcccccggggccgaggtcccgagatcccgagatccaaccatggattgtaatgaagtcaaagtcgatcactctatgaacatcctcgccatgaagcgtcatgctacccgaaatctgatatatacttgcatcacccatacgactattttgttaattcaatcttgaccaagatcactatcatgaacgcaatcctataggctacggaccatctccttaaatacacatccgcactcagaagcgaagtgcggccacggtaggggcagagatcgcgattgtaatacttcgggtcttatgtctccttggaatttgcagtggctgggtagtaactgatggtgaaggcgaaggagtgtacggagtagacgaggtgctcttcatgtctcattcctgagggcacacaatgccgagaccacaaccccgcactcgtgacatgaggttcatatagagatgcctccgcacttttcattttttctccttgtccatgtccatgtccatcccctaaaatcaatctctctattacacatagctaaatagcatcaaatattcttctaccatcaaatcgatcaaacatcagattagtcaaactctcccgaaacctcttgccgactcttgcgaggagctaatgtgcacatgctggcagccccaatcccatatctaccgaatgtgtaccaattccggtctgtttcatacttttcctaccactattgggtattaaaccccgacgacgacaagttcccacattctcgcaaatgtgcgggtgtcgatcgttgtttgcctctagatacccaaagcaatggcgacctttacggcatgttgacagtttgaaacctgtctacgtgataatgaggtctcctacattcagatacataggtctcgaacacatcaagcagtatatattctcaatgtaaatatcatagccaaatccaattcatcatttaggtacatgccacaaagttgttgccgctggcaccggtgtgagtaatgacaccagctagcttgtcggcgctgttgaagataacacggtccgcaccaggagagctaccagtatagaccttgccactgctaagaatggggaactcgtagtaggttcctgaaacgggaaagctgaagccttcatagttgtggtactcgtgagggtagctggacacagcatcattggcgctgtagagtttgtatcccgctgcctgggcggcactgatggcactgctggtgtagcagactgtgccgcaagtcgcggcacatgcgcgagcttccacatccaacggggcagcgaaggcactggatatgaagacggaggccaaagccaggagctgaaagttgtgttaatagctgatggttgatgctattgatctggaagagggtattaccttggtgtattgcattttggcgatgtggttggataggaaatttgagtgctcggctggctatgaatatttctggagttgtagaccttcaatgtttctgggaaaggtgatggtttaaatatgccttgtcggaagtctttccgcattgtgaagagagtctactcgctatcaatgcgatgttacattctgtgtatccagccgtcttggtcttaattggcaatcgtatactgcaggtccaaatgatcaattgacaacaaccataccgaatgaggtacatccaccgagcggtgaccatgaagtatagaggtcaaaccgaggtactagatagtcccgattggtcgattggggacagcgtgaagaatcgagtggtgctaggacttccggagtcctgaagatacgccctatccgggcaggtgatcgacgggcggggactatgtgggatggagtctcttccttagacccatgcgcctgagatgaacagggtctctctatcgggccaatcatggcggcaaccgtcggacacgatgttgatctaatggtccattactcagccggccatgtggggatagacatattgctgtcggcatttgaacattgagtgagaaacagtggactgcatgcatctagctgtgaacaaaatccaagccctttgcttgtcgagataaggtatttcactcaattgcgcttcgtatatattgttttcccctcatgtgtccccgtgttccgacggtctccgtgctgatcgcttgaattgtcatatctggcccgctgggtgccaactaggcatgttttgtttcttgcttttctgttgtcaatcgcacaaggccacattcggcagttaccctttacacggtggattagatgcaaatgtgtcatatgctagtctgcatataaccgaagggtagcttcagattgtgtatggatgggtatagtataagataaagggtgactggtctaccctataacaacggaatatatgcgagaccaccacttggcaacctttttggatgactcgggctcttccgaatcgacgagctcccttcgccccgtccagatgtccatatcctccagtcggacgacacgggttttattccagaacttgtacacaaccacaaacaatacaaacacagggagcaggatatagttgatcacaaagtccgtcgagctaaagggattgaggaagcaggtgtacccctgaaagaaaacgaggaaaacatttgctgccagcgcaaggtaggttccccatgggtaaaagagagcctggtatgggagctttgatgggtcttggccttgcgcgaccagggcttttcgaaatcgaatatgcgcaactccgattaccgaccaaataataaaggtagcaactatacttcgtcagcagggaacaatggtgggaacgggcaaggaaggcaaacataccccccgaaagggttatcaatgccgagtagactctcccagcactagaggactgttccaaaaacacaatgcatgcgaagacgttggtgaaaactaagccaacccatggaactccgagacgatttgtccggccaatgaattttggcgcttttccattgcgagacatgaaaagcagcgttctagatgccacataaagcgagctatttccagcagaaatgacactaatcacaatgagagcattaatgaggtgggcagctgggaggatcccagcatcctgtaacgagattgtcaagggggagctggctgtcttcgacgttgtgcccaacaaccttttgtcattccatgggatgagcattccaatgaagaagatggtacctagatatagttcagtaatgcttcggtcttctgttttatgtgaactcaccaacgtagaaaatcaggatacgccaaaagacctgcctgatagccttaggcactgcttttcgaggattcgtcgattctccagcagtgacaccaaccctaatttgactgtcagctttcgccattttctatcatcttcgatattggggaatatacatttcagtcccagcatacaacgccattgattgaatctgcgaatgcccccggggcacgccaatattcaaatccaatggcgcgcggtccaatgccacctgcgctgatgataattgcgagaatgaaaaagacaatcaacgccaacaccttgatactgtattgcattagtcagtttcatgcttcaaacgtaagcacgcggaaacgtacagagatagccaaaattccatctccccataggccaaaattcccagatttgacagggtaaggaacatcacccagaagatcaagatccagccccattgaggaacagcatctgtccagtacccaattactagcgatatggcgttatattcatttgcaaggacctagagtgtcatgttagtaagggatgatccataatactcgaattcccaatgtatgccgtacagttacccataagtaccaatatgcccatcccagagcaaacgcaagagagtcgtcaataaagcgctccgcatactcggtgaacgatccagtcacggggagtagcgtggccatctcacccagcgattgcctgtagccattagaatcattcttagggcaaggaaatacaccccttacatgacgaagaagacgataatgcccaccagcgagaaactaatcaaagcccctgcgggtccaccctcatgtagtgcattgcccgagctcaccagcagaccaggaccgataatgcctgagaatactttagtcaacaccaactacgtaaaacaatgtgcaagcccacctccaatagcgatcatctgtagatgcctagacttaagctgccgcttcaatggtgcagacataggatctgttgcaatctcttcatccgatcggtttatctccgatcggaagcctttcgtagtgccatcctgaacaggtcctctgtatgttatggcgctgacatccgttttgtccgtcatattgaggaattgcatacaaataaagagaagatattgaatcagtcaaaacacagagactaaacttttttatttttttacgcaaacacccctagacatgcgcccatgtcaaggaatgtcgtgataaggcacgggagcggcgtcatgggtgatcttgtggggcgatttaggcgggggaagttacaactaaaatggccacatttgaacactaggtgaatccagtaaatgcataggggttaattggccgatccattgacgaaacgaaattccagcagtttcagcatcaaaaacagccttgtcgctaggttcaatcgagtcatctgtgctttgaatagagatctcatggctgcggtcggcgatatttgccatggagaatctctgtagcgatagattttctccaaagaaatccctcatgatccacggagggtatgtagggggttgaagggatgtaagtttgtccggatggcagttgtccggctggttgagtataatacggagttgaggttggagtgtagtctgttgaggttggtgtgtaggctgttgaacttggattgtagtacactgaggtcgggatgtagcctattggacttggagtgaaggctcttggagtccgagtgtgggttgtttagattggatcatagatatttgtgattgtagaaatagggactggaggtgaacgaagcctggctggggttatacaataacaaattgatggataatctgggaacaatgatggtgaggtatcttccatgatcacctcaaaaatcgtgaaaataccaagggttcctttgactttgaggagcaatgatttcaaatgcttggagttgatgcaagtctgatggagatggagctctttgagccgattgaattcgatttcgctagacagctcttcaagagaatagtcttgcgagagcgcaagtctttctaggtggggagcaacatggataagcagagtgatctaggttgtactcatgacataagctggctttatgattctgaaagctatgcaaacgtagaggtcctctaaatcacccagaacggattgaacagagctgtattgctcttctgtggggaggatttcgggggcaattttaccacagcaatcaggattacatgtctgtaactttgtgattttccgattggttccactgagcgtctgcaaaagccttgacgaggctaaagagataatcttgtccattacgcttccgctaccatgaagcggctcgaggttcttactgccgaatcggaagtcgacttgattaaagaggcggcgccagccaagaaatcggactttttcttgtcgcgggtcgagcaaaaagctcgtcgtgtaatgtgcaagtccaaccgtgtgaaggttgtcgaacctttccaagcatttacgtagccgagtgctaaaggcctccaattctagaagactagaattgtctgtaatcaagactttatacgttgaaaaacgagcctttagttcgtcattgaataccgagcgacaactcttcgatgacacggcgaattcggaaatagaactttcactttctgcatgggagccatcgaacacggatggaatcatcgacaactcttgaaatcattctcaaataccatctgtttcggcgagtgcttctagttctttaaggctatcgcttgtcgcaatgaagcaaatgctcttgagatattgaatggaaaatccttcgagggatattctgtgaagtgcgcgacatgagaatctaagcgctcgccatttagagagctgtagaaagctacagactgtcgacataacttttactatgtgttttggggtgcgcagctcgtttaccgaatacgttataggcctccgtacgaggggaagtaatgactaccggttccctaaaattatgagaacggggaaatttagccaagctgaaaattagcgcagtgccaaatccacacaactcaaattttacccttcttttgaagcgaatgtggtgttagttacaacgaacggattagactgataagtacaatgaaggcaaagtgctcaaaggtgtcccaaacaagtgtagtttggtcatcaaagatggtcagtatgccacttttatcatcattggcattaagcaaatcactgatgggtaatagaagcataggaaggaagttgacagaatggcaaaccatagcagcaaggtaacaacaactcaattcttggtattgaagggccaatgggattgccaggatgaaattcatacaccggacataggaacttcgagtacgaagaacttgggaagggttttgaggatatggaggtatgcatttatttttcttcggggctctctttgtttcaccacaaaggacggattcttgataagggaaggctcggatataaatgaacgtccagtgtgggaatggaagggacaaagggctgggagagctgagctagaaagatggaatgatcttagcaaatgtaattcagtaatatgaaatggggttcaaataggaaagttgcaatcaaatgtaggctcagatatgagggttttcttttcttcagtcctcggctttttcttttttctttttggctgacaagaacagatactacacataagccgaggtgtaggtgtaaacccttttcatcatcgccaaatgaaaacaatggaacatagaaatggacttacaattccattagcaagtgctattttagaaatgagtaggtatatcgagtggcgagatagcaatagcggatctgtaaaggcagccacaatattagtaaaattcattcggtaattgaaacgttcaattaggaaggcttctatcaaataagtgtaggctcagaaatcggggttttttcttcagtcttcgactttttccccttttttttggctgaaaagaacagatactacacataagtcgaggtgtaggtataacccttttcatcatcgccaaatgaaagccacggaacatagaaatggacttacaattccatcggcaggtgccgtttcagaaacgcgcaggtagagaatggcggatctgcgaagaaaatattagtaaaattcgattcaggaatcaaataggcgttcaagtaggaagttttccatcaaatataggctcagataggtattttctttcttcattcctcggcttcttctttttttttttttttgctgaaaagaacagatactacacataagccgaggtgtatgtacaacccttttcatcatcgccgaattgagagctggagagtgtagaaatggactcacaattccatcggcaggtgccgtttcagaaacgagtaggtatatcaagtatcgagatcacaatagcggacctgtaaaggaagcaacaatgttaacaaaattcatccagtaattgaatagacgtccaagtaggaattttttcatcaaatgtaggctcagataggtattttctttcttcattcctcggtatttttttttttggctgataagaacagatactacacataagccgaggtgtaggtataacccttttcatcatcgccaatttgagaaatagggtgaagaaatagacttacaatcccatcggaaaatgctgtttcagaaacgagcaggtatatcgagtatggaaatgacaacgggggctctgctaagaaagcaaaaaagtccaaactggtaggtcagaagctgatccaaggcacgagaacagctattggccgtcatcactgttatattgacggtcaccaagggcaggagactagaagaaacaatctcattagcagatgaaaaatcatgattttgtgaatcaggcaatgggtttcaaacggtgcctcagatatagcagtgagttcatcagacatcagcgcacagaaaaagttttgaatatcatcattgcgccaccgaaagaatatgaaacccatgactaaggcaagaggcaagaaggataatgtgagttgggagggggtgcatacacatagatggagttgggtcaaagcaggtaacttgtaggcactagtcaaatgagatatgagtaaaatataagtcacatagcatctgagggaaaaggcaatgataactgtgtcatcttatttcatcgtcatcatcatcatcattgaaccgagagagagtggacatgaagccatggaaacacgtatcaatcggcgcaacaatagaatgctgtgatggagaggatgtagggggtagcaggagaaaacgtaccaagaacaaggtgatggaaacacaattaatagtcaagaaacacaaagacaaaagcaaccttggagaaacttgcgaacgagtaagcaaggacgtcgacgacgaagcgaggtaaacaagtcacctaggcagcgaggtcattgacacacgaagcaagagatcttgagactcaccaaggtacaccctgcaatggtgtagtgtaaacaagagattacgtgcattggggtcagaaggtcaagtccaagtcatgatgcaatgagaaagagtacaaggatggagtctctgaatttggatgcaataagagagacagagagtggtgtaggaggaaagaaagaaacaagacagaaaaattgagttgaacaatttatactcgtactcaatgctgattggcggtgggcaggaggttctgcctccgatcggacgctgattggttggatttagtgagtctatggtatatgtacacattgctcggatgtgatagatgctgtgaggtgacaggtttaaccctactcgcattaacatagatattggcaccaaacttggtgaacttgtagctaggatagtagtctatatttgtacaaactttcacattgtgaatcgatgcagtgcgcgagataaagctagctacaatttgctcgagcatcggggtttccgggccaggtacctagatctattccaactgctttggcattaccgctttgcgctaccgcctcatcattgcggcgattgactccaagtaatccaaatctcagcaaaagaaggaagcattgcccacgacaacatgaggagtccaaaaggaaacggacaactaggcaaaacgactaccgacgagcaaaatagccatcgacaactaagcgaaggaatacggactcaagccaataggccaatatctcaggaaccgtgggcaagacaagacgacaattcattccctatggtaacggcaagcgaattgctttcgacaaggggttgaaaacactatacatatgtccagcagtcctcgacaatcaacatggatccccgggtcgtttacaacggagggctaatttttcgatgaaagtctcgccccatttcgcactgcccaaagttagcaactgacaataggaaagcaggaaagtccttcgaaccttgtgttggtattgataaagtctcgaagatactcgtacttgctccttcgttcggccgggtccagattcaacgcattgaagatcgcctcggacatttccgtcttgtttgcaggatggaacgggatactaccctttgtcatgaaggtagccgcgccagcaaattcggagagaacgaggacaccgtgacgctcttgctggcatgccacatactcgaaggccacgagattcattccgtcgcgggtagaggtgagaaggcaaacatcggctactgagtacaacgcggtcaattcgtcgaatggaacggagcgatgcatatacagcagcggagtgccctcgggtgtggctggctagttagtacaatcccaacatttgtggcaaggtcttaccatgtttcccgttgatcttcccggcgatagtagacagttcggtttcgagctcctgatattctttcacttcctcgcggcttggaacggcaacttggataagaacgaccttgttttgcagttctggatgatcatcgagaaaagcgtcgaatcctttcaatttttgcgtgaggcctttaatgtggtccagtcggtcgacgccaacaattaccttgacgcctttatagcgttctttcaagtttcgaatgcgctcttgaacctcgggctttttcagggtgtcggtgaacttttcgggatcgatgccgacaatgaacttgtttacacagactagccgatttttgtactgaatttggttgggaatttcggtgcgagcgttgctgtggtggtgttagttgatacttcataagcttgtggagtaagggaattagggctattgctcacaggagactagcacaggtgtcgatgaaattttgtttatattcgtccgtgtggaatccaatcaggtcactggacagcatgccttcgatgagatgctttcgaacagggagattcctccaaaagtctcctgctggaaagggcgtgtggagtgagaagccaatggcacaggttttaccttgccgtttgagtcgatcacggagaagctcgggcagaagcatgagatgataatcatggacccagatcaatgtcccagtatccgctgtctcagcaatcgcatctgcgaataactcgtttacccgcctatatgcttgccacggagtttcgtcgaaaactacacctgattgataatggagaattggccagaggatacgatctggcggtcagcgtggatcgcggtgttagggcacggagcttactcgagaacccgttatagtgctcatgggccagggtactatcgaggaatatgggaacggcattatgttctcccaaactctttttcacatcttcttgatcctttgggtctttaacttcgattcctggccagccaaaccattggaacttggtggacttggtcaacccagatagagaagtgacgaggccaccactcgaaatagaagattgaaaggcaccattaacacgtttcacagacaatggaagacgatttgagacgatgatgagttttcgcttttcgtcggtgattgaacccatcctgttacaacagctggaactttatgtatcttcaacaacaaagaacaagtgatgagtcacagacagaattcggccaaaatgatattcagctttgagttgaaagaagcagaaaccaaagaggaaatctggatttatacatcgccgcagaaatggcaaatggcaaattgcacctttacgtcagtatgaaagaaaatgcttccctctcctctttattatccatatgcctagatctaggccacattggcctcgattacattctacctcaaatattccatttgtctggaatcagctgatttaaaaatggttggttgacgatccttccgggttctatacaagcagagatataaaatcgacaccggtcaatccgctttacttgccacagaaattgtcaacatatagataccgtagcaattctccatctttaatcattagattaattatattgatctatttacaaatttccagagctgcttcttattgcaagatttcgtcatgggcatgtcagagctaacgcctcaaccttgttcagcgatttgcctcttttcgttcgatgaagcaattcagtacagatatatacgaacattcagcaaacacaatcactttgaagcaagttctcaagctagtggtcaaatctaaatccttacaactttgcctcttattattctttttgttgtcttgaagcattggctctctgaggagctccattctcaccagttttcatagcaaagtcccaggatttttggacggattttgcgctctgatccaaatgcgcttttgagcctattaggggttttgccgttctacacgttcggaaccctccgtgactggatggagcttggttgagatatatatagatctcaggcaggctaatctcaaccctttttgatatgttctcactcagctgcagggcgacaggaacgcagtcctataggtgctaggggccatatcccaatctttagttaataccgatgccttaatgagccgtctacttagggagaagatatatagaaaagatacctcaaaatatataagaatacatcttaaaaagactactatagagactaccgtcgagataactagatcgtgtcggttgaggctatttttgtaatagtacggagtaagtcaggtggtttaattcttctgctagtcataattcaggcgtctaggcctaaataacatattgaggcatcagtatttagtaaacacaggggttcggccccttgtgtctatatcactgtgtatgtaataccgttcggaggcgaaatatgagatttatactggcctaagtaaaaacaagtacctatgtagtacgtatatcagaggtagagacagcagagagaagccagtatagccccagaattaaatcaactagaaacaaatacaagaaaagaaaacaccataacgatggtatgaaataaaacaccagtgccgggccaaatgaaaatcccaacgaatatgatcccatccccgctggttatgctacaaacccatccgctgtaaaacaagtacgccgaccaagacccaggcccagaaatgagaacagtggcttaggtaaacctgcgcttagttgggctcggtgtccggaggtgctgctcacgctcacgagagcgctcggtgacaaagtccatcgcccgtgtgttttcgagcatcaggggctgatcgtatttctcgtcgtaagcaactccttgggtttgccgggggtcttgctgcccgtagtatccgaaggaggggttatgctgcagctgtgggtgcatggattggggtggtggtgggtgttgcgcgtagttctgttgctgaagacgttgtctcaatgagcggaatgaccagttgctaaaaacggtgacagtagatatggttgcgaggaagaacagctagtataaaagtcagtaaagatccaaaactgagcgcgcagggaaactcacaatcgccttccagctaatggggtcaatgaaactgttgatgataatagccattgtatgagcggagactttggcgcggccaacctttgctggatcacgattcatacaccgttcccagttctcgcatatagtctccagagccgggacgcgactcgatcgcccgcagtcgttgtcgatatagttttttgtgcagaccgccatgtcggccaagatagtatcagacatttcctgtgcagcttgctcgaactcgcctcgaatggccgacacaaatccgaaaaccacgtagacggccagagagaacagcgataggttgaccaccagttgggcccaccacgacaggatggcggggacattcgggtgtgcctccagcatgctgaagaactcagaccaggatgagactcgcgagcgatcctgttcgaatttctctcccttcccttgcttcgtggctttcaccggcttctcctccctgctgctgggccggtcttggtcgctatcgtcatcgctgtcgactcgtatttgccgacctagttccttgtctctccgtcgtttcttttgtatccggtgcaaggctgcgttggagtggtgggttagccgagggatttcgcctcgccctgggctctgcggattccggccatgaaagttgaatagtgacgaagttcccttccctgacttgtattgctgctcgggcgtgtcctcgttgtctgcatattccggtgacgacatattctcagcgccagatgaaaaatccacatcaaatttccgtggtgtctggaaagcaggttggccgaatttagccttgggtgatagtggtgcgggttgttgtcggggctgtgaaaagaggaagggttgagagtttggttcgcggagcgagggtaacgcttgcttctggggcgattcgaatgcgctgtatgttcctgtaggagtgtcaggggcttgtaattgcagttgtcgtcgttcagaccgggatacgaacgtttcttgtcatgctgcgctccaagctggtagaagggtgaggtcacgtcgccgggggctcgagtttgccactcaaagtccattggactctctcccgttcgtttgtccatctttgtttctcgctgaatatagatccgtagcgggtggatggtgagtgtcaaaagtcgggaagttttttgtttggggtaaacatccagatcccgtagcaaccttggcatcgacactctttatctccgacaaggaccgtacttcatcttcttcgcacatatctttgctttgttttgtggtgtatatacagctttaggaaagagattttaagcagtcgtgcttgagcagacctaatcgaaacattgacatcggcccgtggaatggaccacagatctagagatctacaacgttgatattacaaatgtatagacaagactcaaatccaacatcgaagcaagtatgatcatttgacgcatcgggcgaccagcacccactatgggtattaaacaagatggaaagcatacaagacagacatgagaagccatctactcatccatctgccactggtattccaaagcctcaaaccgactcttcttgttccgcgacgtaaaccagtctttctcaaatccattgccacgatccacgccatcccagcggtgccctggccggatcccatatcgattaggctggaatgagccctgataaagcggccgccccgtaacactggctcccgcatcacgccgggcagtaaggaactccgcagcgggatcattccaccgatcgcgggccctcatatcttcgttcagttcctcgtcctcgatcgtccgtgcaagtggcatggccttgatatcttgtaagttctgtcgtcgctcctcgcgctgctgtcgctgcacatctcccatcagcgcctcgcgcgcctgttcttctttctcgcgcttttcttcttctgcgcgtcgggcttcggcgcgtttcatggccacgttgatgattcggccggatgcgtctcggtagattgtttcttggcttttttgattcactgctgagggatcgcggtactgtgcttcttcggccttgcgccgcttttcttgggctttcaccattgctgcggtttgggcggcggtttggagaccccctcgtactccggactccatgcgccctgcgccgtcgtcttcattttctatcataagcgcatcttcgtcgtcggggtcttggtgggcggcgcgttcagctgctgcatcggctagaattgcgtcggcggcttcttgttcacttccttggccggacgtgggtcctccgattgtcttccagcttgacttctttgcgcggcggaattctgtggttctggcggatgtgtcgaaataaggtctatcctcatcgtcttcttccgtatttcctaatgagcgaatgtctggtggatcatcatcggcaatgatgagaccagagcctgcagtatcgatggctttggtcttcttgcgcttcttctttggccgctcggtggtagggtcagcggtcagatagttctttgccaggtagtcggcgagtgagccaggcataatttcggtatgctgtatgtgaggaatgtgaaatgtagaggtgcaggttgagctcagtgatttaatgatccggaggaacgtttccccgaactgtatgccgcctagcgctaagttaacaaggcgtgaacgtcatttgattatggactcggcaatgcagagtgagacttcgaacttgctcgctgaactaattgagaggcctgtacaatgccacgctccgaagaagcagagtggtgggccaacgcagtctacgaagccatcaaagagattccccggggcaaagtcacttcctacggtcatatcgcacgcctcctcggtgaacgtatggatgcaattatatgcttgttggatatatactaaccatttttctttggtaatagctcagcgcccccgccaggtcggagtctgtctcaaggtgcttccgtcaccggagtctggctcgtatttcaactcgaacactgtgccgtggcagcgagtgattaattctaaaggaatgatttcgcatcggtgcgtttgttctaggctacctattccgaattcttatatcatatcaaactggaccatataatctagacttgaaacgaacttttatacgtgttcacggctgacatctataacagtggacccgggagtgcggagcgtcaggcagaagctctcgcacaagaaggtgtggaggttactacagacagcatgggcgagatgtatgttgatttttctcggtatggatggtttccaagcgagctgtcgagcgagggaacggatgagcagccagagaataacaccccataaagactctcgaaaatcctcatacattggggttttagtgcccttgcgttgcatccgagcgttaacaatgattcaaaaattttacggagattgaatccatacatagcaaatagtcataacttgtctgtctggagcaaatctagaaggacttcccagacgagtgggaagtgggaagggatgatacaggagactaaagacccatcacgaatatgatcaatggaaatagaaagacgagtctatcggggagatatgagatcgaaaagcaccagacacaaaaggttgacagacgtgcagggggaaaggcgaggcataagcatacgagcatctcgaataacaccccatccaaccaactaccagcataggacgaaagaaaagctttgaagaagaacaaagacataaaccaaccagcatcaatccgtaaatggaaagagaaaaaagatcgttaactcacatcatcgccataagggcatgaaaacccaggggatagtcccatctaggctaaggaaagagaacaaagagggaggggatcactaaggtcatcttcatcgctttttgacctcagcagcccagccttcaataccctccccacgagttccagggacaatgcccagatcgatcccatccataccaggcgtgtcctttatccactcatgagctgccataccaccagcgttcgccctcttctccggtgacagatcaagcatgggcaataggagttcgctaatacgcatgctctcctccatggagtagtggtacttttctcgcaggacgtcgggcagggcccagtgacgaagtcggtggatattgcgcagttcacccttgcgattgaaaatttcttgggaccatttgccggacatgcagagtgacttggggaagggacccagtagttcaatgatttgggcgatgtgatcatcgtccttgccatatttggtccctgattgggggtcgaagaggtagtctccagtgatgagttcgaaaacctagacaattagcatgttgttcggcttcggctgtgattgatgatcatgccactcaccatgcatgccatactccacacgtcggtactggcaccccacttagagcccagtatgacttcgggcgagcggtattgacgagtctgaatgtcgttggtgaaatgatgaccgacccaacaagcattgcctaggtctgcaatcttgacagaaataatattgacgtcaagttcttcttccggtgatttgctcgaagagcctttatcgagggaaatgccagacacctcgcgctccagaagatctctgtatgtatattgttagattagatcaagctcttatcaatcagagcaaggcagatgtatgtcatgacgtacgcagttttctctcgctggttctgctgcacatcttcttccttcaccccaagcagttctctcatggagggcgtttctgctgtagatgctaggtcagtttcttttctcgcgcgcggtcgagccatgggtgcatcaagggggactgacctgcaggctcattgaccatctggctgaggctactgtgtgagttggaagagctatgtttgaagtcgaagttattgaagttggtgttgagcggactagggagcggctggctccctgtgatcagtgtgcgtcgccgtctccgcccgttccggttatcctctttctctttggcatctttattggcttcttccttgacatgcgccttgacgatctgctccacatctccaatctcgatcaggacattctccggcttcagatccgtgtggatgattccacactcgcggtggagatagtccaagcccagcagtacttgctttgcaatctgcttgactagcggcatgggaataccgcgatggttccaccgcttgatcaaacccaagaggttctcgcccaggacttcaaaaaccatacaaacatggataccgttgggtcccttgtgttcaaacgagtccagcagactgaccacatgcttccgaccagggtgagagggtttcgcttgaactattttgttgaggagcttgatttcgtcgatcgcggtttcggtgtagtgtgcggcggatcgaaccaccttcagcgcgacatgcttgttggtggttgtgtcccgcgacagccagaccgtcgaaaaatgaccccatccaagcttgcgcacgataatatagcgaccattgttgtatgcttcgcccacagcgacggggtggtatccgcctttgcaataatcttcggagtcctcctcttccgcggtagcctcgagttcttcgccagacgatgaggatgatgatcgcgatgcggatgctttggagtttgactgagcagcgccggttctgatccatgggagattagtaaccctgttcatcagaaatgtttcaagacatacgattctgtagcaccgggcccagggttcgcttcattagtgacgatgggcttcaagtcggtgccctttctcctcttctttccgccgttgccattggcagctgacgcagcaacgtttgccatctgtttgcccttgttgagcatcgccttggtaagatcgactccctccatgatgtggagatttgggaggtcaagctgagaggcggggcacactggcttttggttggttcaagcggaacttagaggcggtggatgttggaggggggggcgcctctaccacctgcacacacagtaaagacacggtaatcaaatattgcagaggaaaagttcaaataaactgggtaggaataatttgaggaggggaaagaagatgtcaaagattggaaaattgcgggtaaaggcaaaggccaaagagaatatgggccagagcgacgatccgatcgcaaaagtcaagttttataagatcaagagaaagatagatcacttcggagaaaaggggagtgttgagatcgatgggatggtattccgcaagcagccacagcgtcgtggtggcaaatatggacgcattgagtatagacaataaatagccttataagaatatcctggatgcatgtaaatgtgaagaaaagagaagtctcagcgctaatgctttgactagtagaaacatagcaagtagcaagtacagcatacgcgtacatgtcagaggagatacattctgtgatgctgactttgttcacttggttatatactgtagatgttttaggtctttcctgctacatccaccttactctacctatcctatccttgactacattcttattcattattctattgaatttcaatcagatagaaagaaaaaaagaaaaaagaaaaagaaaagatcgactgcagtcttgatgtgacgatccccgcttggggtaactagctacctgacttgacctcggtggattcacctcttgaactcttactactctgagccgttcctttggcttctctgtcaccatgacaagtcccttcaaccgccgccctattcacgactacttcatcgcctctcctctggtggccctactctatccagtacaccagatattgctccgtctgcgtggccctcctcgactccctccgcctggcactcaaccaatccgagtagtctgcatttccgatactcacaccctcgaatggccagacgtacctgacggagaccttctcatccacgccggagacctctgcaacaacggttccgcacgcgatatccaagcctctgttgactggctccggagccttccccacccatacaaaatcgtcatcggagggaaccatgacagctacttcgacgtgcggtcacgtctggatgaggatcgtaaagacccagcttccatgggggattccttcgcggcaatctcttcctcgacggcatccattcgctcgttccacgagctgaacgacgactcccgcatcgactggggtgacatacactacctccaacactcagccgtgaccctctcgttcgccgacacctctgcgccctcgcccaccgcccccagtactagctcccgctcgcgctctctcacaatctacggcgccccccaagtcccagccatcgtccccttcggccccgaacacgccttcacataccccccacaccacgacgcctggtccggcaccatccccccagagacagacatcctcgtcacccacaccccaccccaatctcatctcgacctttcccccatattttccaccggctgtcccaacctgctggcggaatcatggcgtgtccgtcctgccctccacgtcttcggtcacgtccatgaatctgccggccaggaacctatcttctgggatgaggcccaacgcgcctgggaaagattgtgtgcctcgcgccgctcgcgtgcacgctttagccgcatgtcttcgctcgctggcttcctccgcgatctcttcgatctatctgcctgggtggatgccgcgcgggtcgtgggatacgggatctcaggtgtggtttgggctcacatctggggtggggagaaccttcatggtgggtggatggtcaacgctgcttgcatgtatcgtgacagtggccggctaggtaacccgccgagggttttttccctgtgatcttccatcggtaagcatagcgttcgctttttggttcctgttcataataccatgttggttggcttgcgcttggtgaactgccactgtaaataaagctgagcggtttacctacgccacaaaaggcgtctcttttcggctattcgcatcttcagcctgagcaactccaaggttggttctcaagatccaccttgtatttcacgttacaaaaatgataattgtataatatatatattggcggttctgatcttggtagcaatagtaacctagttcatgggatcaacagaacctcattgagcttctagttaatgtcagaggggcaatcatagtataaaggcatatatgtattcaaaaaggtatacataccctatatatacggaaaggaagaaaagaaagcaataaatcaaaggcaaatgtagatgtagatggaaatatacgtctccggtttttcaggtgatactgaggctccttctacaaagtaagaaaccttgaattcccacgtgttggtatgtcaacttcaaaatatatctccgtagtcttggcatcaatcatttaagttctacaagccaaagagatatttgaccaaaaagaataatttgtacatattgcatgggtatagagatatatatggactcaatggttatatgcccagacgataccaccctgtagaccgacgcgaacaactcagcaagcttcaacacaaacaaaaatgaactacaatgcagcaaagaggattacagcttcggcttctcattaaacctcggcacctgcaatggatcatatgcactaaggccaagggtatcagacggcacaaccccggagtgcccacccaacaacccgcgagtatcaagcagactaggactgagatccgccacagtcggagctccaatcaaccgcatgttcatctccatctcatccttcagcagctgcatagcacggttcacaccatcaagcccataagcagacatggcatacaggaacggccgcccaataccaatacccctcgcgcctagacaaagcgctttaaggatatcagttgcgcgacgcacaccgccgtcaacatagacttcaatgcgattttcccagccacgctcgcggagcgcaggcatcacctcggccaaaacctcgatgccggaccgcgcggtctcgagctgtcggccgccgtggttggagagcacgacgccgtcgcagcctgcctcgacggcgcgcaggacgtcctcaacacactgcacgcccttcagcacgatcggcatgcgtgtgatggatttgaaccaggggatatccttccaggagagcccggggtcgatgaaggaggagatggcgcgggcggcgccctgggtgcggtcgatgtcatcgccgccggactggacgttcgagccaggatcggagaatttagaacgcatatctttctcgcggcggccgagttggggcgcgtcgacggtgatgaagaggcccttgcagccgcgctcctcggcatgctcgacaatcttgcgcgtgatttcgcggtctttgttgacgtatagctggagccattgcacttggtcgccttgtttggcgtcaatgatttcgtccaaggagcatgaggctagcgtgggaatcatttgtactacgttgtgttcgtgggcggcttttgtgagcaccacttcgccttctgggtggcccagcttgccgagcgccgtggcagtcacgtagaatgggattgagcattttgtgcccagcattgttgtggtcatgtcgatgtgctcgacatcgactagaattcgcggcctgaaccagattttgtggaaggctgcatggttctcgcgcattgtctggttataggttagcactggggatttcgtgcctgggggtataaatcatcatggtagcttacaatttcatcatctgctccgctagagtagtatgcccacgccgtcttcttcataacttggcgggccaccacctcaaagtccagcaggttgtagcaagcctcgagatggggcatgcgggaaatgcgctcttggcgttcggcttcctccgggtcgaaggctttttcttcctgctcaacggttgccatgtctactgctcccaagtgcttcgacgggtccaggaacttgtccagggtatcgggtgggtggattggttcgaactcttcggtcgcatctttgcctgcatacttgaggatgatcttctggccaccagggtgttctgagaaatattagtacacattcgaggagggaaacgtagtaaagaaacacacacccgggaggaattcggttacgtcgtaggctttgccgtgcacaatgatccagcacgagtctttggagttgtgctcggcgacaacggcgccggtgagcttgcctgcgctcatattgaaaaggataagagagtatattgttcgctgaagagtagaagagaggaagtaatgaaagggaaaaagatctagtggaccctcgggataaatgagtccgggggagaaattgcggggagcctctcggccgacttgtcggatgagactcgcctcgtcggatgagaactcaaatgctccttaggtccgtatattaatcgaattgaatgtacggagtattcctaagatcaagcccaaaatccaaaggatctaagggattggtgggggatcgttgtcggagcctcggtctgggtcatttcctctatattggattcagccagtagtacggaacgtattacatgctcggatgttcccttcacaaacagtatttcccaatgctgtttttgttgtgctatacatgctgcattcagaaaagaaacaaccttacctatagattcgctgttgacagccctacattcccttgttggaatgttggggtcggggaaagaatagttcatggcctgaggcagcaggactcacatgactcaatcacatgactcgtcacgtgacttccatcatcagaatacaaaatgtgtatcataatgccattgtgttgaagtgcagtttttaaggcttttatcatcatcataagcttaattcaacgggtaatgtacgctgacaattggacagcaacgttcagattataaatagtggagatcattggacggacgaacagcgagcctatgtacctcggtcttggctgatagcgccaccgtcgatcagctactaagcttctttaaaacctggtttctagcttgaagttcaaagagactacctacaatcaatatacggagtaacgctggtcaagtttgcaacgcgcgtgaggcgcacatatcaatttgtgatctgcatcggtgcagatccataatcgggcaagttcggtcattcctcgcacctccggatatcctccaccctcccacacctccgccatttctccatcttcggctacagtgggtggccacagcccctccttgctgcgtcgcggatgccactgctgacgttgtacggggaaggggctccgcctagtgcactgtccacgagttgtaccatgtgtatgtggcgcataatcgttcaattcgtccatgtatatcgaattgggctaaagcggtcgccaccaatgcttgtagttcaatcgaacggtatagtactgtaggaatcatataaatgaatatttggatcacctagctgaaaaataacatggcaataataaagatcaaccaaccacggaggattcatctactggtcggcttcgccgacagcatatcagaggcgctgaaatcacgactcaagacccccaatgaagcgggtctataatgtgctccgttcctatggatatgcactgtgatatcggattttcatacccaatcaacctcttatcggttgaggtctgttgaggagtcttgatggactgcgatgtaagctaaagatggatctacaaagagtacaagatggggattagccccttcttgaattgtggcgtgaacacgcggacctgccatggagaggcatattctctactatcgtacgcttcaacggtcaagagttttgcattcacgtgcgggaacataaggaaccatcaacgccttatcttcattttctggttgcctttctttttcgtccgtatccacttagttgcagttcgagaaaacttcgaatacgctaggaagtggttcaacgacatcattgcggatactagacgatacttttccgccgaaggcatgcacggagtactctttgagggggattgatggattatcccccatcttttaaagacatgactcgagtcgtcatttgaatggttggaaaaaaaatgaaaagatttataagttttcatacaattcatgtgtcatcgttttacttcaagtggaaaagaggcaacattcaagggaggaaaaaaagccgttgctcacatgattctgcaaactgtatgactccacatgttgttttcggatccgagtagaaaattgtataatatgttcagccttatattgtattacttgtagccaagataggaatcccgaaagaacggagaatgaaaagcattggatagaatattaaacgatctcaataatcaatcctattctgtagagcaaggaggatggcttgtgcacattctatatcaagtaaacaaatatgtcaatccctgtccgatccttttagtgcggcgctagtcctttcgcggcccccgataacatttctttccgacctccttcgggatggggacggcttcccgattcccgatttgcaaccggcgccgataacacttggactccgagtcgcatttgagatcgagtacaacgtctaggtacactgttatttggtagggaccttagcaagcgcacatagcatattcccttgtgcgcaatttggtatcggcaaagccgtcaaccaatttaagcctatggttggtagggcctgtcattcaccttaccgctccaggtacagtccatttgaacatgacgcagaattcatgtatgtcagtctacgggcccaagcatcataccgaagaatatatccacccttctcggaacaccaatcacgttgagaaacattaccgtcgaaaaaataagacaaaaagaaaagaaatagtcaatctgatgtcatcagggacgcaagctacgaagtggatcctaaaagaatgcttaacacgccattagtgatgcattcggcaaataggctccgctctctaacagctctgattcgtcgaaccacatttcctacggtagtggcttttgatattttgctttattttattttcttttctccccaaaggtctcggactcaactcgtatggagtagacacgggggagaaaaaaaaatattatatgccccacgatgaatttccttgccacttttgtcaaactccattgaagaagcagacattcaaatatctcccggtttcctccaggatttactcatttctccacgtatctctatatctccagctattccactcactccactcatacccacgtgtttacactgggaactagtccttcatcacttggacctgggtattaagctatactgttattttctctttctattcttcatcatggcgccgagctatgccggcatgtccggtaagcctctgagtttgacggtgtcgaccatcgctactatgggcttcctgcttttcggttacgatcgtgagtatacattgacttctgatacgaattcaacgttgctaacagtctacagagggtgtcatgtccggcattattgattgcgatgccttcggcaggttcatgcctatcacccggggcgactccaccatgcaggccttggtgactgctgtctacgagttgggctgtctggctggtgccatgtatgccttgttcgctggtgacaagtttggccgtcgtctcatggttatccaaggtggttatatcatgatcattggtgttatcattcaaatctgtgctatcaagggccatggagctactgcccagttctttgtcggccgtatcgtcactggtattggcaacggaataaatacttcgactatcccgacctaccaagccgagtgctcgcattccgccaaccgtggtcttctcatctgtattgagggtggtatcatcgctgttggtacaatgatcgcctactggattgactttggtgcctcctacggccccgatgacctcgtctggcgtttccctattggcttccagattttcttcggtattatcattgtcgttggcatgtactatatgcccgagtcacctcgttacctcatttccaagggcaaaatacaggagggtgagtatgtgctcgctgctctcaatggtcacgaaatcgaatcccacgagacccagatccagaagaagctcgttatcgagtccattgaagctgccggtgttgctgccggtgctggttactccgatctcctcactggtggtaagacccagcacctgcgccgtatgcttatcggttcttcgtgtcaaatcgcccaacagctatctggttgcaatgctgtgatttactacctacctgtcctcttgaagaagtccctcggccagactgagttcatgtccatgcttatcggtggtattaatatgatcgtctacgccatcttcgccacgttctcctggttcttcatcgagaggattggtcgccgcaagctcttcatcggcggtatgacaggtcagatggtttctatgatcatcgtcttcgcttgtttgatccccgaccagaccgaagcttccaaaggtgctgtctttggtctgttcctctatatgtccttcttcggtgcctcgatcctgcccctcccctggttgtaccccgccgagatctcgcctctccgtacccgtaccaaggccaatgctgtctcgacctgctcaaactggctgttcaacttcactgttgttatgatcaccccggttatgcttgagcgtatttcctggggtacctacttgttctttgccgtgatgaacttcatcttcatcccccccatgattctcttctaccccgagacagctggccgcagtctggaggagattgatctcatctttgccaagggttactgcgagaacatgagctatgtcaaggctgccaaacagctgcctaagctcaccaatgaggagattgaggccaaggctgctgagtatggctttgagtctgaccgccgccgcggcgataccgagaatggcggcgaaaagggctcccctcgcagcacctccagcgatggcaagcaacttttcgaggaggaagagaacgccactaccatctcttgagagctaggctttctgtcaactccgctaagcggttatgtttcaagtttccggcatgacagcgctgtgcgctgacacctatcaacgttatggctgtgctgttccctctgtccaatggacgggtgaacgccagattcgcgttttgcttttatttcttatttctttacatcttataccccttgtttctggtctcttgggtgatcctgtctgcactttgagtgcagtattgctttttgataatgacccccgaaaatggttcggtcgggcatgggaattgttcagcttcatgtacatgcatgggcttttgcatgatactagtctagcggacgaacacatcacatttactcttttcccatgtaaattgtaaaacctgtatcccatggccctgcatatgacaccttgtagcctgccgctctagggttgagtttatagtgactcatgcgggtgctgccttgcatgaggctgatagaccccagagcaaggggaccattcatattccttgcaattaaaaaactataatgacgagtataatctcctcggaaaagagagccaatcaataagccatgcgaaatacatcctgttatagaacccgatgcagccctttatccgcctgtaaatgtcttaaatcccatgttaccaaccactgcatgtaagataaagtagttgagttgatagaagctgactcttttttgcctttctattttttgcctattcttctatccaagacacgtgcaggtgacctcgtgaacaagagagaagccatcggctgataccgcccccaacttttcttttctttcttttcacattcaaatatctctttgatctgatcgctttctttcgtgttgtggtcaaagaatttgacttctgccaacatataatgcgaatacaaaactttgacccccgcttcctcaacctcggggaaacatgagttcaagcctcgaagctaagatcgttgtgctcggcgcacagggtatgttggctgtgaattacccagttctaaatctcataatcactttactaaccttatctcaactaggagttggaaagactgccctcgtggacaggtactgtaaaaacacattcaaccccgccgcggcttcaaccatcggcgcgtcgttcgtgacgaagcgcgtcctcgattccacctccgacacaatagtcagattacagatatgggacacagctggacaggagaggtttcgcagcatgtcgagactttattatagaggagctcaagcagtgctcctgtgctatgatgtcagtgcatccacttccacaccgtttcccctcttcattcatcctgcgattgtatttgttgcctatacataggcaacctacaacgtgatacaacccacataaacatgaatactaacttgcacagatcaccgaccaaaacagcttccaagaaatggccggctggctgcgcgaactccgcaagaacatcacacccaacgacgatggcacagactccctcataatacatgtcgtaggtacaaagtctgaccttgtcgcggacgacccctcctcccgccgcgttcccttcgaacgcacaatcgcctacgtcgctgaacaactctacccatcccaagcctccaccccgccaccaaccgcaacagcaggcatgggcgggctaggctttggaacatctgtttttggaggcagtggctgcagtacatcgaacgctagtgccggccctgcagcacactcgtccactgccctgcagagtccggactcgaaacgcagttcagcattctggggacaggagattgggtgggattgctgtcatgagatcagtgcacgggatggcgagggaattgatgaggttttccgcgttatcacgcgtaagctggttgagcagcgcaaccggcgggatactgagctggctttgtcgattgctggtacgcccttggcgaatggggtcgttgggccctttaatcctggggttgtggagggcacgggcagtttccgccttggtcatggtgataagcggaggagttggatggggttggcacctggtgtcaatgtcgagggcgccggcgaggagcgcgttatgcatgcatcgcgcaacaaggggcgatgttgttgatcattggctaggatggggggttggattgctttttctttttgcatttgagccagcgtcgttttgtgtttgattattcatggatgcatgggttagaatagtgtagttagggcttggattggttgggtggccttgtttttttgtccgctatgcgtgaatgaagatacttttcgtttggtcaataagaaacgatattctacgccacatgcactcatcatgtactttttatatcacttgaatctcgaagcatgggcagtggagacggtggatccgatcgagatgtcccactgagtccactatgtttatctttttataactatgttgtatggacatcctctggcggatgtttctaccatatcaccaatagccaacaagatcatacagttcaatacggcgataaaccggatttgggctcacttacgtcgaaccccctcatctcgcttatatcggagaatttcctctgccattggtcaaagtatcatggggccaatcaaagagagactgtgctttgctatcagaaagaacctgtcgatttcattccagtccatgtctgtgtcacatcttggccaaggaagtatctcttttgtcaactgcatccctttgctgggcatttctggtctcctttcttattccctccaagctttttgttgaatatcaaaaggtcgatctatctctttatcacattcatcttgttccaaagcagacccggtgctcgtattcaacccctcagccccgtatatcctgaatcccacctcatttatcatgtcgggggtggaggtgatcgcggtcgtagcttgtgtggcagccagtaagaccatctcctctcctatcacaataaacgagattaacaagcctgatcggcaaacagtcgtctccgcctacagcgatggagcgattatgtttactgccataaagaagaaataccgcgagcgcaaatccactcagaaactagaacgctcgctcgaaaggtcgctcgaacggtcgctcgaacgcggccatgctgatattaaatctcagttcaaccagtaccgtcaagagcttggctggcgatatgaggaaggtgacgcgatcgcccgagagcagatgaaagatatcatcatcgaactacagggggcgttgctgaggcatctccgcgaggtacaggaccgggggaccactctagatctcatggcgttgcagacagagtccgaccggggccgcattaatactttgcttattttgagccgtttataccagcggctctcgaggccgtcgcctgttccgccgtcttttccgctgcccatcgacccgacctatcgtataatggcttctcatggccatgaatatccccttcacggccaggacagatattcactatcccattcctcggagacggggtacatctccggctatcccgtctcaccagccagtcatttaccaggccagttcctaccggacgtcgtccccgcctccccgacggatatgctggggccatcgagggaatatgaggctatgaatctaggaaatcgcctacatccatcgggccttggatttgctgtgagtagtatgggcgacttgttccatccccgcccaggtcgtacatcgtcgttgccagtgtcatcgcccgagcccatgtacatcccacaacctgtgggatccaacccagagtcaccgtcgatgttggggcggattccgcaagttgatatcagaccagccacgccgcacagacccaaaccgcgaccaagttcgataccccacgatgtcttgtgggggaacccgtgggagcacgaaagcctcacagactcaaccccatcaaattcctccacccgaagcagcaccgacggatcaacccaggcaatccgacccctctggccacccagcgaaacgaacaactacctgggcttctgcaaaggggcgtggaaggtgcacgtgggattacgaggattcaaaatctactcggagcctgcggggtattacacacaacagtcatggttgcggtgcacaaagtgtgctttcgaagcacccatggccccgaagagttctagcagcaacccgcaattcgagaaaagcgtgcgtacacatcaagccagcggtattcggtatcgattcgagttcttggcgaaatcccacgtgccctgtaagcgggacccggcatcagattttacccctaataccccccgcggcacgttttgttgcgtcttttgctgtgcgctggcacaaagctccacacgggtctatgggaaccttgatatcttcatggcgcatctggcggaacagcattggacggttgagaagggagcgttggctgttttgtctagtatgcggtgtgtggtaggtcgagttgcgcctgattcggagtatttcgatgtgaatattgtgccggtgcgcggctgatgtcttggatattattgatcctgttgttttattttggggatgtcttaggtttggactggaagggtgtcttggtcatacccgttctttttgtgtatgtgatgtatagcgtttgaagaatggatttcaggagtgtacatggatagcctgaccaggtacgaagtagtactcggtagatttccagggtctaagtaatctttcacggttgcacagtatgtatatcgtactccgtacccctgaatacgtaaataactcgaaaatcaaaaataaaaccaaaaggaaataaaataaaataaaataaactcaaaagataggccgagatctttcgatttcgccaatcagaacgaccccaatggcccaaaatggcccaaaatggatcaaaccaggaaccgacacagttcggtctgcccaaataaggaaagcgccaccttcccttttctgctttttccctttaccttttttttttcttaccaggtctcttggagaaaggacctcctcctctggattctaacttattcgactaattccatattccttctcgaagtactacttcatcccttgactcggcactttcgtcatctcgcgctcagagtacgcgagtgagtttgataggcctccacatgggtcgacgcttattacgttcctaagattgcgcgttccgacaccttggccttttgccatcttcctcctttcacattcaccccctataccacttccctcgatccccacaatcgcgttatgcgatgaggttgtcacttcgtgttagtgccgctgccgcactaattatcctgactctcgtcctggtctgtcgcaatctgaagaccaaaggcgaatcactccaggatatatggcacttcgataccggctccttccgtacatccctcagaccaaaaccccagcctgatccatcacaacggaaatggcgggttgcatcggacagaaaacccgcgttggtctaccagaccaccgatatcgtggtccccaaccagggtgctattgtgatggccaagcttaaggaggaagacaccgcttgggtcggggcagaactagcagagtgagtgtgactcgattgtattcccagaacaagaccctaactgaatatctccagatggcgcagcgtcatttacaccgtcgacgatatcaatgccccgacgcacaccccgaaaaacaagggtcgcgaggctctcccctacctcaaatatctggtcgaccactacgacgaccttccagacatcgtggtcttcctgcatagccaccgcgacggcctactcgccggctggcacatcgacaccatggattacagcaatgtggactcggtgcgggcattgcagaaagaattcgtgcaacaggcaggctatgtcaatctccgttgccaattgagcccaggatgcccctcggccatccaaccattccgtcaacccccgaatcccgaaagcaaaggcgaggcacactacgctgctgcgtggaaagagctgttccctggggaaccggttcccaaggaagtcgccggcccatgctgctctcagtttgcggtttcccgagagcagattctccagcgccctcatagcgattaccagcgcatgtatgactgggtgatgaacaacgaactgccggacgacgttaccgcggcaattatggagtactcatggcacatcattttcggcaaagatcctgtcttgtaagttatcctgcaattgtattatttgtattttccccgctaacacgtttaattgcagctgtcccgatttgttccaatgctacgcagatgtctacggcgaagaagtcatctttacctaaatactgctcatttctaatcattcttcttttgcctacaagggccgatagctctcttgtatttcaaccaatacgtttcttcattacccggcacttgccggaactccccagcggagaaataccatggttactgggaagacacagtgccaatgccatatgatgacttgcttcgatgtctattttttttattctatcggaagcaaatgtacaaagaccgaaatgtgccgggatggctatcagagtgatatcatctgtctcacctcgagttgcacgtccaactcaagcgcatgagataattcctttcgtgctacggcacccatgtatatcttattgatgcaaattttattccagttcaatcagtaaccgggtacctaccgcgtagctatgcctttttctcctgtacaaccatcttcctcgctacttcatcccaccggtacatccccccactaccgacattataatgataataattatttgtcccgctaggaacaacagcccgccgaaaggtaatgttaatccgtcccttggtcgcctccccggccttccccttccgcttaggaatactatgcaaccaattcgactgcgtcgttccacgcataacaaccatatcccctgacccaaggctcattttaatctgctgcagtggcaccgcagcagcaggcctagacccaggagaagagacggctttcaacgttccacccgaaaccgtacaactcgcccgcgtcgcactagtaccgcccggcccggaaattgcgtgtgcagcaataggcacgcatccacccgtcgtccggtttgcattccctgctggtactgaaggcttaggcttcattagaaaatcccgctcgccgcccagcgacagcgaggcgatatttggctctggtccgaggaagcgctcgtcgtcggagtggaaggcgatactgtcatctccgctggaatagtaatttaccaggcagaaattgtagccgggtgtttcatctgcgtttgcatttacgtttgctgcttcgacctgtctccgtaggagatctagacatgctgggattggccgcggcatgcactggtattttgttttcggggttggcgttttggcctttgtttctagtagaacgaggctgtttgggtcgttgtcttgttcttggatgaaggtcgatgtttcatcgacgccgaagactgttgtccatcgtggtgtgttgatttgcgtttcaatgtcgccgcgtcgtgctgtgtattgcacacggtagaagggaagttcgcgacggaggaatttgaatagctcgtttgctgttgggcgggggatatagggctggaagtggaggaggtcgaggtgtggttgattatttatttcccggggtggctttgctggtgttgcatgtcctaggcctacttcaatgtgggagggaagttgagctattggaattggataacttgggtgttggcttgggggtttggtgtcctcgactgggatattgtctgtctcgggtgttgagattgcagttgcggtgttagattcgatgaggtcggttttcgcacgttttggagcggtggttgatggtttgaagaatgcatcgagcgtgcgttttgccattgtggaatgggaagatcttgggtattggcaattggaattgaggcagttgcgcgcgacttggagaatttctcgggtgatgtcattttcgatcccgatctatgcattccgatctggcttggcacatattttgtagcatcattgtcatggcattctagagtaactccgaatcgctttctcgggctataggctatataactactgctgaactccgtcagtctcggcaatcttgaccaagtatttcaccgcagatgccttgccagcctctagatctttcaatgcgccttcgataccacccagtccaccttttcgcacttcgtatgggtggcctgagaaccaaccctgtgccagacctcgaccaatgaattggaagaaagcagctccgaactccttatcaccaacagtctggccttcggcaggatgcatatgaacagccccgaccatcgtccgctcgatgctaatttgcttcggcaccttatcagcgtccgcaggtaaaacgacagtgatcttcccaggtacatcgagagcagcaccgagagtcacatagcttcccttctcggacacggcatcgtaggcatactgaatgggattacccttgccagcagccttgatcgccgagtagacggcgtcatcgccttcacgataatcaataatcgtgtctcccttctctctgctgatcaacgtctcgacgaagggagcgcctttgccagcgatagcgatgatggggtgaatgttcgatagctgagcgaacttgatagcaaatgcgccaaccgccgaggcaccgccatacacaactagcggaataggtttatcggcgggagcccaaggtagaggcaatttcagtttctgatataggcccaatgcagcagtcatcgccgcgagggggattgtagcagcctctggtcaataagtttagttacatccgcgtgatgactaggacggagacatgtcataccttcaaagctggtcttctcggtgagatggaatgtcgtgtgttcccacgcaatggcatattcggcataacttccatttggggtcatcatctcgtggaacgctgccactttatctcccgcgcggaagttctggactcctgctcccactgcttccacataccctgcaatatcgtctccctggttaatagtattgtttggttgccatttggggactttccagtccttcgggttggtacccgacactactacccggatgaggacctggccgggtttgggagtggggatctcaacgtcgcggatgacgaccgaagtggtgtcgtcaacaatagcttctttcattttgaactttgggaatcgacggtggaaatcaacagatcaaatcaaatagatcaagccgataatttatattcgattgatttgtaatgtcacgggaatatataaatgaacttattcccggcgcttccacggatttataatcagataccttagttttagataactagttgactagttagttagttaggtacatagatatattacctaaatctccttagtctgatattgaggaatagtctcccctgctcgccacttgtatttgcttccagtatgatcttcaggcaaacgttgcgatccaatgaacacctcgcgagccgtggcaccttctttctcaatttcctctcggaacagccctctccgtcttagttcaggcaataagaattcaatgatatcctcgaaagtcccgggattcacaatatgagcaagattgaagccatccacatcggatatttccacccatctttccaactcatctgcaactgtcgtaggactgccaacaaccttggcctgtagtccacccacactgatatactccacgatcctccgtttagtccatggcaagctatccgtgccagggacggtaccagagaatctccgaacaatggactggacccgcggcgagtcgctgaacaggaaatcctcatcatcagaatgacttgacaggtcgattccggtccatccaccgaacaaagcgagcgcaccttcatcgtcggcatattggagatagtcctcgcgctttgcttgtgcttcttcatctgtcgctgcgacaatcacgttgatacccacaatgactttgatatgcttgggatcccggccttgctgtttggcaatattccgtatattacccaccgttaagcgagcaacctcgggagtctgaccaccgatgaagattgcttcaccatgctttccaccgaattgattaccggcctcggacacgccggcctggaacaggaatggcgtacgctgtggcgatggctcacagaaatgagggccaggaacatcaaagtattttcctttgtggtttatctcccgcacaccatcgctggcaatgtataccccgagctgtcggtcggcgagcacggcgtcgtctcggaaacttccttcccagagcttatagagcacctcaagatattcatctgctattgcgtatcgctcgtcgtgaggaatctgctcgttcagtccgtggtttcgggctgcgctgtccagataagatgtgacaatgttccatgccaaacggccttggctgagatggtccacggtagagagtcggcgagcgagggcgtatggtttttcatacgtcacgctggcagtcactccgaaaataaggttctttgtgacagcggacatggcaggaacaagatacaaggggtcattgacgggaaattgtgcgccggatgccaatgcgggcaccacattcctagggcccttgtatacatcgtacgcgcccagcgtatccgcaatgaacattgcatggaaaccggctttgtccagcaattgagctaagtcggtccagaatgagagtgttttgtactgatcggtcttgtttctagggtgcttccatagcccgggtgccaaatggcccggggtgttcatgacgaacgcattgaggatgatctgctttttgccggacgttggtgtgacttcacccattttgagttggaattattcgaacgttcagtggatttgaagaggcacttgaggtctacgcgatgagtctttagcaataggaaccggtttgtatacgtagtgggtagaagcatacgccaagcgctgtcgccatcgcagggtcaccttttatctcccgtaatcggtattcgacatttgtgatgactattttgaatctcatgtcggccgataaattagcctgtgtggggtacgcagtgaccctggttgtgcgcgattccaagtgattttatcgcaatctgggagtcgaggcacgcaatcccaacgacaatccccctcacactcccatatctttcgcaatcaccacatggcgagcttattaactttatttcgttcctccaatggctttgcgtctagactctttagtcgtgtctctaccagtcattctgtatggcgcaattgcgggcaaggacgacgtgagatatctcacccacatggcaactctgattgttgcgcagtccttcagagaacccccaattggctatagatctacagagactaaacttggcattgaggatatggcggaccctccacacaataaatattcctcggccctgcaccttggaacttggctttactatgcccagagatgtctgacatagatacgtccgctttgatcccccagggggcggcctatggcctcctcattggcctcagtgtggtgttttgtgttgttgttttggttgctgtcaagatgcagaaaaagtatctttctgaagattccggaaaatcggaaatgttcatggtcgccaatcgctccgtagggagaggcttgtgtgcatctgcagtcttcagttcctggatgtggatcaacgagacggtgttgtgcgcggctatgacgtatcggtatggtcttgcagtgcctctggtatgtttctttatgccctcaattgactttgcacgactgacgggctatagtggtgggggtctggtctatgcttccaaattgcactgatggcagcactcggtgttatggccaagattcgagtcccttatgctcatacatcgctcgaagtagttcggatgcgctatggcaagattggacatctcgtgtttatcgtgctcaacctcgtcaacaacgttttcggctgcgcctcgatgattatgacgggctctcagctcattcatggtgtatctggaatgcactatgtagctgccactatcctcgttcccctcggaggtttgtttcatctttcttactgaagtccatcgggaaacaggagctaacccctttgtagttgttctctatacagccgtgggcggcttgaaggccacattcctgacggatttcttgcatacggccattgcactcattctgatcatttattttacgatcagtgttttgacaaactcggcgatcggtggtctgggtggtttgtatgataaagttacggcagtagctgcggataattatatccccagcaactatcaaggttcccttcttacattcaagtcgaaggatgcaattatctggggtttaattctcaagtttggaaacctggcacttgtcgttatggtatgtcaattccaaaaagtgatctttgaaagctcccaaggaagacttttcacaatcacgaacttcgccatgttctttccaaagctaacatatcaccggtaggataccgcattttggcaaaagtccttcgcgaccgaggtcaaagcgacagtcccaggatacaatattgccgcattggctgttttcggtatcccctggggtctaggcacagtcgtcggtttggcaacgagggcaattcacaatacaccaatctttccaacataccctggcatcctcactgccactgaagtgagctcgggcatggtgatgccatacaccatcaaagcgctcattggagacaaaggaatcattgcattcttcttccttttgttcatggctttgacaagtaccgtttcctcctcaatgattgctgtcagtagcatcttgtcatatgacatctataagacatatctcaacccgaaagctaccgacaagcaaattgtgggagtgagccacttgactgtcattatccacggcgtctttatcaccggcatttccatcgctctcaactatggaggagcaaacatgacatggatcgggtacctgagacccatcatctcatgtccaggaattatccccatgattctcactttgttctggtctcggcagacccggttagctgcaattgtttctcctgtgcttggcttcgcttcaggtcttgctgtctggttggcagtaacgcactatatgtatggcagtatcaacatcactaccactacaaatccctacccagcactatatgcagccgtcacttccttctttacgccggctctctattccgttgttctgtcactctacaagccttataaattcgactggagagtgttcctgcgaattgagctcgcagatcaagaagaaatccagtcaccttcagacgcgagcacattgaaccggagcagcgaggaagaccacgcaattgatttgaaacatcccgctggatcagtctcaccggttgtcaatagtcagccagagagcatcaacaacgacccagagaagattactggcgacatcagcgaaaaggtttcgacgaacaaaacttcgtctccatcctccgcacaaattagccttgatgatattcggcacccattcgacgacgaaacgttgaaagagctgtacagatggctcaagatcgcttggtacatgttcggggctatcgtgctgatcacgtttgttgcttggcctcttccactgtatcgagactatatcttcacgagatcattctttgcggggtgggtagttgtcgccattatttggcagttcgctgctttcggggcggttgtgattttcccactttatgacgggcggaaggatattgtgatcggcgcgaggggtatctggaagtcttacaaagagcttttcgggaggaacaagaaaaatcaaacgagctaggtagataataggtgctgttaaaatagagcgggaaccagatcggtcttttcaaatagaactcaagtcttcacgacagccttggaacattcttgctttcgtacggatcctcccttgatctcaaagccgtcttccgggagcaccagaatagcccatcctggagcagatgatcctcaacccgagattctctcctacagggccagaaaaccctctgaaagggcctcggattcgtcacttagggtgtggttataactggttcatccgctggggaaggcgctgattacataaaatgtgtccatgtctcgcaaaataggttgcgacttgaaacggggtagtgacaccagcccctgctacaacgatcacctttgagatccttacagagtgcggccttcgtatatttatacgatgcaactacaataaacggtagaaatacgatgcatgcccgcgaggtaaaaagaccaagaaatcgctggtcttaacgtttctcggatgtccaccaacggccctatattcagggaccgggaaatctcaaggggattccaaggggaatagaatgcttaacactggaagcaaaagtggaccctttgtagcaagatgggatttttacagccgcaccgagatgcagaagaagacatggttgaataggaatgttgcccacacaaagtgcatatacaatttgtcagcaacattgaagtcccttgaaaactgtcgtttagttagagagtgacaaagtgaagatcacctaggcatacattgccctaggactgcatatcttcaccaatggggttgtggcgttcttagaggcttaggcggggaggcttaagcagagctacccaatgcactaagccaaatctggtatacaagatgttccttgagcagatgcgattggccaatcttctaatccaagtggagtatccgcaactcttactacaattgtatatcggcatcagggcgcgtggctctgattatcgaaaattaactgcactgcctgatgaagaaaattaggaaaacatcgcgagcggaaatgtatctggaagggttaaatagcagacaagggcccacgattcgagagtaatacaaccatcagttcattttccgtcttcctcttgatcccagtacttcattcccttgtgattatgactatcgattatcggcatgggatttcgatcctagaggtcattgtttactctccatgcctcttcattgctctctggatggcattccaccatggtttcaaaaaaagctccggctggtactttttcaacatcttttgtcttgcccgtgtcattggcgcagcatgctatttggccacgattcgctatccttccaatatcaatctatatattacctgggctgtttgcacttcgcttggactttcaccgttgttattggcttgccttggtcttttatcccgagcgtgagcaaccctcttactcgtgattaacttgatgatttgcagctaacgacatttattagaaatgattccattatgcgaaagaccgccaatcctctccacccgttgatcttccgggttgttgcaacattttcactagtcggtgtgattctgagcattgtcggcacaacccagaattccgatattacccatggccttgttacaatagagtcgaagattggcctcatattctaccttattacctggttctgtgtgttcgggctgttctttctgatcttgaaacgaacggaaagtattgaggatggagaacgtcgcctcctcttggctgtgggaatctccgtccccttgatcctcgtgcgattagtctactcttacatctttgcctttggtggagatgcagacttcaatctgctgtccggaaatgtcacgattcagcttgtgatgtgtgttttagaggaaattctcgttgttcttgtgtgcctgggcatcggccttacacttgaagtacgacccgctgctgaatacacacagcaactcagtacccacagcggagaagaaaatctggtggagctcgagagtggtcacctgccaggccaagcgcgtccaaatagacgagtccaaagacccaagcgtcggggtggacccattacgaaactcgtgatatatattgtggatgaggtcaaggaccggaagcgatgaatgattgcatcgatcaagatcatggggttagaattggggattgggtttgaatggacttgtttactttgacacttataaggtagcatagattgactagctactagaactatttctacgccgtgtagaattataattaatacccttgttatgaagactccctctaattcttttgctcaaaatccatctctctgattgccatgcaattgccaaacttactaattattctcattgtttattgaagatgctgaagatgagaatgtgtgacgtcaaccatcaatgtcacgtaactaagcagcctgaacgtaaacggaaaaacatctcgactctctccacaagccttcgttctccaatggatcacaacacaggtctccccttattcattgcccaggagactctctgcttttatccaatcagtacaatctacaactcatgtccacgatatctcttctatgcgcttctgctagcaacctgtgtcactcgatggacaggatgggtcatggatgtatttttaggaactgcagcggcatatgcatttccagttaccagacaccccaagaccctggacctgtcactatcccatacctgtccgctaactccagcctacaaaacactttctcttctttgatcaccgagacagaccatgttatgatctcgcccgcatcacttgagcttgactcggatgctgttcttgcaatcgttgtcaccggttatctcgtctttttacccctccaatgctggtcccgcatcctaacccacgaccgagcacggaaccttctcttttatatctggcacgcgctcatgttgggtggctctatatgttccctcatctatgccgcgaaagtacccaaaatatccccacagtacatgttctgctttcctgatctcgcgcctttcaatgacacatcgaatgacggatggcaagcctcatggagaacatccacgtggaacgacagtgtgtgggatatattttcgaacctcgcgcgatggaatcaactaggagatatttgcttcaacccctgtttcaattcgacccaaattttacgaaaaccagactcattgcattcagccacggcagacggagacttcaaaattgctacctcccatagcttcgtgaagaaggttctgtactcgcatcgctacatctacagtctcatcattatttgtctgatcctgaactgcctcctcttgacttatcgatttctaccttatcgatcgcggatcccatcagcgcagatcatggtaatctggaaagaacggaagactatctggaaaagcttcaaagacgaagtttgcggtgcgatggatacaccaagcaatctagataataatggagaagacccgggacccacaaccaagaagacctctgtctggcgccgaatgcgacacatattcagccgtcagttcctcaaatcctttcttcatgtgcttgttgatgctgcaattctttttggcatactcttcagcatgatagtcagtccgttcaccgtcgttgcctttgtcatttggatagagatccaaatctccaatgatgggccgtcagaggagactccgagtcaggttggtcagtgggcgtaccccgtgtctctagcactgcttgtaatctcagctgcgattctgaagctcaaataccgactagcttcgtcggttgagcttgaacgtgagatttctgcattgaaagagcacctgggagccttggagaaaatgaaggaggcacgatcggggtctgagtcgactgcgctcacagctatgactcgtccggccaaggaaaactaggcctaacgatattgttcacaaaaaggtgcaatagaagagcttaatcataacaatgaatacattcacataattgatcacgagcttcagtgttgatggtgtctgatttgaaggcctcttgcttagtttacatgtctatccctatttcagactgacagtatcaaacttcctgacaacggtaagcacacctaagtataatgcaaggtcctctgagatcagaattataaaattagaacgaataataaatggcacatgtaagttgggaattgcgttatatggtgacctgtatatcccggctaggcgaaggcaggtatccctgattgattctgtagactgtccctccaatgtattccctggtccaggtacggagaacatgatgttataatagcggggaaacgagttatgtcaaggcgatagtcttctttcccgagatgatcgccttggcagtcctgcgggggacgggggaccgtgtcgcatgaaaataggaagaaaccagccaactatccttgttatgtgttatgcgtcacacagcgcggtcagtgcatgagaaatcccgaaaaataagacattcgattcgagaaacttgtccattggtgttatgaatggactcctatttatgaattgactcctatttaatattccttgctcccccccccctgttaaggttggtatgcgggtttctttgttctaccattctgtagggtcatacggagtacattacgcagatttaagacaaagggatttccaccttgttatccccttgttgtcccccctgtcattactgcccgcacctatacaatatgaatctcaaagagacaatctccaacaaagagttcagtgagaatgtttgtgttgatggcattcattccggcagaaggacatcacacataccactctggcaatcgttcaagaaatcccccaacatcgtgggctattgcctcgcgctaagctcggcaattcttctctatggatatgatcttgtcatagtggggacagtggctgcaatgcctcaattccagtaaatactccatccaaaataatacagaatttcgtcgctgctgacacacgaaagacttgttttcggccaggaactcaatggaaagtatatcatcccctcgatgtggctttccctttggaacgtctccagttgcattggcttgatgttcggctccatcctcggtggttattatcaagatcgtcgtgggcgtcggattacgcttgctataggcaatttcctatccaccattgcggtcgcaatatgctacatctccgatctaccagacgcaataggaagtcgtcgaggggtattcttcgtcggtaaattcttccaggggatttgtattggcattcttctgtgtgttacacagacgtacatgtccgaggtactccctgttgctctacgaggaccggtcattgcattctatccgatcttcacacttcttggacagctggttgggtcgatcgtggtttatacttcgcttaagcatacaggcgcacaatcttaccggatttgctttgcgtcgcaatggccgttctcggccgttccctttgtgctagcggcatttctaccagagtctccaacttggttgttgagaactggacggacagagaaggctcttaaagcacagaaaaagcttgataacgatcatatcgactcacaagctgtaatcgacgagttacaggcgtcaatttcagcagaggacgaggagagcgcaacccatacatatgccgactgtttcaagggagtcaatatgcgccgaactatggttgtggcttttgcaaatatgataccccagatgttcggtttgcagctgttggcaaatgcttcgtattttatgcagatcgtgggtatgggttcatcgaatagcttgatattcttgattttgggtattggactgggcctgatttcgaatgttatcagtctatgggcgctgaatgtctttgggagaagacttcttattctactgactctgggtatcgttatggttctatggtttgccattggaatcgcagggatcttcaagggaacagtgacaatttggtaagaccctatattggacgcttaagacgatgagctgacttggttgcaccaggtatacggcagtaagcatgatggctatcgctatggtctctggttttggatcgtggcctgcgtcccatgtggttgccgccgaagcgtcctcgttacaactccgagccaagagccaaggtatcgggtggtttactagtggcgttggcactgcagtatttgccatcatcttgccgtatatctataactcagatcaaggaaatctcagggcgaaaacggggtttgtgatggcaggattcgccgcagtggcagtcgtcggggcatggctggctatccctgaaatgaaaggtcggacgccaatggagattgatcgcatgttctcgttgaggttacggactcgggcattcaaaagttggcagagcgatgtcacacttaggagcgaaacagaagacactcatccgcccgctaattcatgattgttctttctacgcaattgaaggtggaaccgaaagagaccggttcgacgtggagacaaagtcctattactcaactcgagaaccaaatttatattcgttttatctgtctcagattagaccattacctgagctaaatatatagttggatccaatattcttctggtcgatccctcaatttgacctcgtctgccgggccctgtcagcagtctcgcagccgagattcgaaggggacattttcacatatcaatacaattggacagcctgtcgggataaaatgtaccaaaaagaaatattaaaaaatcagagtacacctattcagatgtttttatttttttcacaaaccacagatacccagcgatgcccaccttccaaggttaaagccccggagatcctaatgtatgactaatctgggatagagtgggcaatgcgagtctaaccatcctttctcacttgtcatatcctcgaaactcatgtcggataccccagagaggaataaatctagcaaacgtggaacacggaattccctttcgtgtgcacaatgtcgctacaaacaccttcgctgtgatggccgtaagcctgtctgctcgcgctgcgccacaaatacagtacagtgcgtttatcctctatcacggcgacgtggaaatccaaaatcggcgaaaccccggtcgcctgtcagagatgtctatgataacaccgtcgagacatcactgcaaacatccactgtctgttcttcctcttctaccgctataaacggggaaattgaatcaacttccaactcagctgcttcatttttgagtttatattatgagttctttcacgcggcccatccttgtgccttaccttttcaagttctcaagactcggctcaacgaagcgaatattcagcctttgcttcgagtgatgtcttatatcggatctatttttgatatttcttgtccgtctcagttgctagaatcttgtgctcaacgtgctcaggactcagtggtcgaaattcggtcatcaatccggcctcttacaccatttgacgttcaagctctgttgctttattctatcgctgtctactggtgcaatgaaacagaaagtggtgtggagctccttgacgaagcaattcgcatggcagtagcccttgggatgaacaaatcggaattcgcccgaaaccacgctgaagctgattctgtacttgaggaaagttggcgacgaacttggtgggtgatttatatcaccgatgcccatattgccggtatgtcccctaaacatgattatttcccccaatttacattcctgataaccgcaggatctacccatacgtacccgttccgaacaagtggcattgaaatcactaccgaccttccttgtgaagaggaacagtatgaaataggggtaggacaactgctctattgctttttagaagtttgagttgactttcattaggtcatccccaccccacgatccctagatgattacgagaacagggaattccttgacgaagaaaaaagtgatttttcctcctatgcggagcttattggcttgacccgcgggattgatcgggccttgtccccgggcaacagtgcatatgaccaaatatacactacaatggctgctagctgcgacactagtgttcgagcatggtgttctcttctttctcctgaaaagagagaattaattcatcccgatggatcatttgatgaggtcatgttcaaagcattcttcattatgcacacgtacgatctgcacctttcttctctgttgtctatttgcctaaccgaagtctagatacaccgttgaaattcatcggccgctgtcagcgttgactcacagtgcgatcgaaaccgtgtcgcgctgtgctccattggccccgtcggcacacctcaaatgcagcaacgcgaaggaacgtgacctgcatactgtcaaatgtacacaggctattaatagcattgatgaactgttgactctgccaactaatatgacaacccattctcctttcatcatttgcatgattgccaatgtgactattgcgcatctttcggcttgcaggttcatcttttctggcgaccggcgagccaaaagccgggagaagattcgtctgacgatgggcactttgaagcgtctaagtgagcactggacactaggcaaacggacctaccgcgagatcgggattatcgcccgagaattgctatctctcacaacggatccctcaattggtttggatgccgttgacctgtcccttccgggtccaacttcacctgcattcccaccattggacacgttgcctgacgccaactttgacatttgtgccttttttgatacggatgctcttggcctaaccgaaacgagttcatttattttacaatagattccatgagggcttaccctccaatgatagccctacagattttgaatcgctgatgtgattatcccgatgctttgacagtgttctatcaatagcttcgatacccagctattctcatttgcggtactcctcgtcaatttggatgagagcccccataccgtctctctcaaatgcttcagtatcgatgatcatggtagcaatgagcgtcgccggctctgtcttgctagcattatcgctgatgcgatgatgacaccccggcgcttcaaaccagcttccgccttcttcgatgattttcataggatcttcgttcattttgttgagaagagtccctttgaggacatacgcgccaacgttcgcgcccccgtgacgatgcgggggagttgacccgttgggcgggaattcgacacgcaggctaacgatagtcttgttcgggatgccgaccagcttgtacgagtaggaaatctcgagcgagggcatcgggcggctgtatgttcaatcaacttccgagtgggaacttggtttggtgctttatttacctggagtcgtaggttggttcctgcatattggaatttgaattttttgatcggaaggatgtctctggttctgatgaagatttactaacccggtggaagttcgtcagtatttatataggagattggtcagatagtatagtctactttccgacgtcacggtaaaggatagactgttcgggtgtccgggagtagctataggctatcaacagatagcctaccgggtaccagaaataaagtacacacgtggttcttcgcacgaaccttggatataccttcatttggcgaatcattctccgtggctattctcgcaagtctcaatttgtgtgctggggataaccgaaatgctggcgccattcccgaccggacaattggtgatatctcacaggttcattatacggtctgcgaaataagcacgcattacgatgcaaagaggcatctttcaatgcttcttacgtgttctgaattgaggaagggccagcaagcactagtaagtgatgatcgttggtcaaggatataatctgcttttgactggagcatacgggtgggttccaacgaagacgacggcatgcgtaaggcctccttttgagcgaagagatttgtcaaagatcgacaacgttggtcgattgctacatgccaaactagaacgtcgcctagtgcgaactagaaaactacaagggtcccctgtccaattcccaattcggcctgtgaaaaataatttcaggggccgcccgtgcattagtcggaggcagccgtcgggtcgaatttctcgacacttcaatattgttttccgggatttggtaaagatgtattgggtttccaaatcccggtctactaatcaggtccctagagccgagtctctcgatgttgtatggtgatccttttggcccttctgaatcccccttcaaacaaagaaatgtacatcacatgaccccttgttcatttgctactctttttcaatcgcatgttttcccttatttcacaaccttggaagacctgattctccgtcaattttattccccaaagtctagtaatgatctctgagaaagagttcttggctcgcctccctcggttcatcagccactggctgggctatcgtgagaatgcaccaaagcctcccccgaaatatctcgttcatttctggtcgttcatagccgcattctgtggtctatgtgtggtacagggtatattcaattactcttcctacttcattgaacgtggcgtgccgggcatcattgcttcttatgtacgtctcgctttttccatgtgcccttgtcagatactgatccataagtagggagcatcagcggttctcgtatatggcgccattgagagccctctagcacaaccacgcgcgctgatcggtggccatttcttgagcgctctggtcggcatctgcatctcgaaactcttcagcttaatgcacaatgaagaaaagttcgactctttgcgctggctggccgcttcgctttcgtctgcggttgccattgttgttatgcaaatcaccgagactacccatcccccggccggcgcgacggctctccttccagcagtggacgaagctgtgtgggcactatcttggtactatctgccagtggtcttactttcatcgactatgattctgatggtcgctttggtcgtgaacaacattcaacgtcgctatcccgttttctggatcagtccacccgccccgaagcctgttcttccacaggctaccaattagaaatacagccatgcgcctttatcacaaggtgactatatagatgtcgagggattgctagggaatgacagtggatattgagacgcaatcccttatgaacaaaggagttgcgcaggaatagacttgccatgtctctttgggtggcaagtgcagtgtcagagttttaggggctcagtatgaccccgtcggatttactatgacctattaaaaagagttgtattcaacatgttgtctatataattaattgtccaaatcacacaatcaaacaagaactgtcacggagtacgtactccgttctccgtaggtttcccgttggttttccgtcggttgtgacactccacaagatcgtcattggcctcgccccgacccgcgttgccgtggcgcacgggttgccaaggcggcccatccatcgatcgccgagggcgggaaccttggaaggtggaaacgcagttcagatctgagatctgtataacgtgcatccatagatatctgtcgccatctgcaacccttatgcaccgtttcagcttcaagggctttatggtcaaatccgatctggctgaaatatgcgtctgttttactcggccgagaacctgaacacaaacacccatgttcacaaatgcgggtaatcacaggccctatgtggagctgagctctagtcgtataatcctttaggtatctacgtacgacataggcagctaggccgagaatactccgtaatataaatgaagctttgcgaatgcgaccccacttatcaaccttagtatagtgtaatattcttaagctatctacgaagtacagtctgttaatggatagtttatatgtatatactctaccatcatataataacgcttgaaaactaagtggtgagatgtatctatgtcggaatatgcatatgcatatgtgaacttgaaaacccggagcaatagcggtaaataaaaaagaccgaagccccgtgtggcaaatttcgtcgctccactaagctttgctggttttttgtctactgcgatcctttgtacaggggtagcctgcataggcccacacttggctccaagctggttctgtggcaagtgggggatggccgtttttctccttccagttcacgtaagggacaatagctgcaacatgacagggtgtatacgaggaatgcgccaatttacaatttgttgttttgcaacttctacatccatggttcaagagtcacggcattgtactttctgtagccaccggtagaattgggaaatgtggctgagtcaggaacacgactactgtttactgtttactgttcactcattatattataggtctacttccatggctaaattctctcagtgtctttgtacatttcatcattatgcaatatcacgccagcctcgcaaatacggtcttggcccgtccgaattcgaatacctagtcggtaatggtctctatattgtcgggatttgaatgattattgcgtcctcgatccatgactcagacattatagatgcaagtgcatgcattggtggaccggagatttcctaaaatacccgtttttagcgatgaggaaaccagcatgatatgcagtaagattttagcttcgggatacaaattggcaggcgatggaatccctcaggaacagccgagagatacatatttctaccccaggtgttatattccatcgttgactcgtgcaatgataatctataatatctatctcagtggtcaatgaagctgaactatctatattgatttcatacgtacccgcgtagcactcaattacaagcgaattgatttagtctgagatagagagcccacattttctgtaacataacggtgatgcacgtcacggtgatccttcttcattccttgtttggacaatcggggggcccgtctgcgagcatctagcctaaatgacgtcctactaagtgatgtatcaatcctttgcgtgcccaatccaggaaggggatataaagtgctcactagattcaagacacttcgtcaagcgagctgtcgatcatgcatatcggacatcagacacgataggtcgtattcatcgttgccaaggaatgtttgcaagatatccactgtgggtagattcagccaagcaaagaatcaacgtggctttgtcgtatccgcttgatatggccatttgagctaattccacccgtcttctcttggtttgaagtaacctcacgcatatggtcctcagtctagaactctccgggcgtccgagaccagccgctctctctcctcttgaaacaggaaaatgtaggcgactgtggggttttggggtgtataaaacgttagttcttccatcgataacttcttgcaacccgggatacatactttgacgagatgtctactatatataacagcaccgaggctccgctcaaccccatgcccatcgattccgcatcgtggcctataggacttgccgctttgaccgaagcaagtacgccagtcctgtggacactcactgcgattgtcggagcttcgcttctcgcctggctcagaaagccctggacagacgaaaatggtcaccaaatccccaagggcccgctagggcttcctatctttggtaaatctaacgctggcatacacaaagggcacgcattaacatgacttacaggttctttttactctttgactagatatcctgagttgactctggactactgggcgaagaagttcggggacctctattctatctggcttggaaaccaactgttcgtcattgtgtctgatccaaacattgccaaagatctcatggttaccaatgggaacgtgttctcttcccgcaaagaaatgtttatcaaaagtcaaactatctttgctggtcgaggcatcactgctactccatacaatgaccgctggtaagtttatcctagacttggctgaagccgctgctgaccctattaaaggcgcaagcaccgccgtattgcggccacatggttgagccagcgtgccgttgactcgtactctgctgtcttagatcgcgagtcgctctccttggtaaaagcattgctcgttgaaagcaaaggaggcttggcccccgtcaaccctcaagtgtgtcaatcccgttcctcaatccccccagcaattactgatttgtgaagcctcatgccggtcgttgttctctaaataacatgactactatcactttcggtttccgagccgacagcatccatcacccgctggtgggacgggccttgaagctcagccgtgaatttatgtatgcgcgcggtcagatatttattcatcttgacaacagactgactaagttactaggaattgcactggccctatgtcgaaccttattgattttgttcctattctgcagtatctcccgtccccattgtacaaacgcgccaagaaactgcacgaaggcttggtcgaaacatacggtggctttatcaaggaaaccgagcagaagatgaaggaaggcaagaaggttccggactgtttagctaagactatggttgaagtccgtctcaaagaggaccttgatgatttggatatggcaatccttgcatcggccttcatgattggcggtgttgagacggtaagttactaccatcatatcactattactatccatcactgacgcctcattcagaccgccgctattatgcaatggttctctgctcttattcctgcctaccctgagatccagaagaaggcccaggaagaactcgatcgtgttgttggccgtaaccgtctccctggcattgaagatgaaaagaatctgccgtattgtcacgctatcatcaaggaagtcgagagagttcataatcctttctggttaggtactccccacgttgccagtgaggattttgtctaccaaggaaagttcattcctaaggatactgtggtcgttctcaacacatggactatgcactatgatccggcccgtcattcttcccccgaaaaattcgatgtatgtcacccatggccagccctttgaaagacctgtttactaataagcgaaaaaaagcccgatcgttatatagacgaccccttgacatctgccgacagtgtcaatgtcgctgatcctatgaagcgagaccactggatgtttggagctgggtaagtactaccttgtatacgacaaaacacaaagcccaactaataccttctagtcgtcgcatttgccctggaatgattgtggctgagcgtgagatttggctgacaatctcccgtatgctgtgggcattcgatatgtacgagattccaggggagcctgtcgatttgaaagaatacgatggcctctctggacgctctccagtgccgttccgtatcggattgaagccacgacatgaaaatgttacgaagctactagagaaagttgagatttaaattatgtgtggcaggcaggatgagtgattaagagactgaagatgactgggatggcgttctcccacgatgagaatgcagatatgtatggaagatcatgaattcagtaccttttttctcttgatatatatacctatacgtaccggattttccctggcgggtggggctttcctatttgagctgccgccgcttttgtgagggtgcttaggctcaggctcactgagtagatatcagcacgggctcagatcagtgatcatgctcagattcatcacgtgcagatgactgatcctcagtatatgctcagtgagtgctcagtgatgctcagtgtccaatcagtgagcaacactgatgccctcagcacgccgcagcacaccgcaggctataccaaaaagggattagccccgcaggtagtttatactgtaatagctaggtctttgataacattgctgctgccctcattttttggagcactacatcccaccaaggaaatacgccatgacaaaggggcgcaggaaagagcggagaactccgtccgtttcaggatattatcgccctctgtcttttaagtgagagcggctcgagcccaaagtcttggatataaaagcaggccgtataccaacattagtatataatttttcacaagccttctatttaagaacctcttacctagtatccttgatatactatccttactttgaatacattctctgcctccaggacacaccgtacttaatcataggtagaaaagacttttttgccaagcgcgatgagattgctaagacaaaacgccgtttacagcgagaaaagaatggctatattcctagagccccacagacaggaggacttaattcgggagaaggacaagaggcttccaagaccaaaagtttacatcataaaactgtaaagctttggctgaagtgagttgggctgcatataaggtggcaattccttcccattcatgaataaggctgaccttcccttagttttactgcagatccagagaatgggtttgaatactacaaaacttcccttggttgtccagctccaagtcatgacatgatcaagcaattcattcgctggtacactagttctattcaaggacgactgaacgaggatgagctacccacggtgagaaccgtgagtgcgcatgccgaacggttttttggtgggtttgaacaattcacaaaatttaaaatcattctagatgaaaggaaataagaacggttaattaattcgtcacttaccgtctgatattatcataagccattctaacctcgaagtagtggataaaaaataccttgacggcagacggcatcgttatagaccaaaagaaagagaagctcaacttcacaaagcaggattttctgataacagtctcgtctttgtggcagacagatcaccaaaaattcattcctggtttgcttaaggtctttgtcttgttcgctcttcagctgtacctcttcactggggcaagagtcggatcttttatacaatatctttgagaacggactctatatgaaaacgggaagcagtatgacttatcgatgtaatatatttgggattctctacctctctgaggtcagctcataaaatgactagttagacggattttgtggtctagtaacagcttgggcaaaaaaatttgctaggaaccctacagtatttcttggtaaatcattacgccacatcatataattgcgcccagtcacaatcagatagccaatagaatatagagaagcgactcaatcggcacagggtttctgcatataggaaaaaccgtggcctgtcgtaggaaaccactcgcctggagaaacgagctgtcttgggatatagaaaaccgtctgtcgtaggaaatcgtccatctggcgaaactaattgtcgtaggatacggaaaactgtggcctgtcgcaggaaccacttatccagagagggcaattatccagggatactgaaaggattgggaaactgtgggccatcccatgatcacctagctagttgggcacttggaaaattgtgctgtgtccatcgggagtcctgctattgcttgagttggaagtcagcgtgcatgtgaaaaagggttggcccgcatcatcgtcaatcgcgcgcgcgtagagaactccaatgattggtcagtgcctttgctcttagtatgtgagtcatcagaggagccttgtagttacatgagcgccatcaataggtctcaccataagcttttttgaccaccacgaaattcgacagggttagaagatcaccagacatgtttaacgttgactgaggaattccttgattttttccaggtaaagtaggcggaacatgtgtagcaattacacatagatcttacatactatgttgaccgatctatgtgttggatgaacttgagttacacccgtgggaagtcctcacatgtgtacttgcatgatcaaaagtttattgattaagaggcagtaaatatgggctgctttcttatacgttatgggaaaatagtctgatttgtggtaacttgtaggtactttaaacgcgtgcggttgcgataacgaagttgatccacgggtcgagcgcctaggatatgtgtggtaaattgcaggatctgcttttgagttagccacacctgttgtataatcagcacgaagagcttcactcacatcaaacacccggttatctcgatgaccatgctctggacagtcgtctcggtcaaacatccggtcgagttcaaggatctacgaaatttcatccccgacctagtagagatgtactatcttggttagcataacaacgcatagcatctggaacaaggaaaccgtactaaaatccttcagtttaacttgccacaccacttctagccgccgcactgcgttcctccggcttcagctttcttaaacgagatgccgtataaacggcagagcgtggaggagtctaataccttctagtacaaaagtgacggttccgtactggcctaagggaggcgagtgtccgtagggacctagcatgcatactggaaagtgcattattgcatacgcacgatccgcagcttgtacaattcttttcgtcatgcctagttcgtaccacgcgggttgtccgtgcttctagtgtagtttgcaccgtgtccaccgaagctatatagaaattcttataggaagctataagcatgctctgaatccctagtgtggtgcctagagttgtatatactgcctcggccgagccacctactccaccggcactgcaatatcgctataagagccggttcgaagaccgcgcgagggcctattgggaggtgatacgccacgacctgtggtgccacatggtatgcagacacgtcccggcatcctaggcaaatccagcgtaaatacctctaagtagtacctagtagtacctagcggtaggaagacccccggtcgattaaatgatagaatagagcgccggttgcaattgaggtaaggatatagtagactttgaggccgagttagggccaccgtcgaagaatcgtagcgagcgtctaaggtaagattgagacgagactatatccggcctgtgtcatgtgagcctcttcaaataacatataccgcgggaaatataggagcgctgcctttttgtggcccgtttcacatactaggagtggaatgataagggaggttctaagggcagtatgtcgagcaactatgcctacgaaagacccatgaaccatgtaatgtagcatgtaaatacggcctagctaccgatgggtctactagaaggtgcctcgttcgacacggtagacgtgggctagaagatcgaggctaaatccggagtagaggggaacaagatgtgtgactactaagcatcccgctcgcttctgcacgtccgcctagttctgggtatgaaggctgattgtaatgatgttggcaatcactggggttgtaagcactcccccttgcacgtatgccgtgatatctagccactggagcacggttggcgttggcgcctagaagaagcgtctccacgatactacgtgatgcagtcggaagggtaagtggccgaatcggtggccgaagctgtagtagaccaagcatatcattgcgaggagcccacaaagaccaaatttgtctggggtggaagccctagcaagccatttgacaaaatttgacgcaggatgagacatgctttcaggtgaggcaatcctcggcattgtaggattatagtatattttccgaaaggctgaccggaaaacgctgatctagagcttttattttgggcggtcgaaagcactttgatgttgatgctgttcagatcagagacctctttcatggctcatactagagatgaccggttgacaattgcaaacaattgagtcctcagcaggacatcaacgacagcagtaaagaaatcatctcggtgttcagagccaaatggcgaaatataagaaaccacaagtccacgcgaacaactttacggcctgtggaactacattgtttcgtaaccgtacacatacttgatagagagttgggtcgtaggtagtacttaaatatccatggatattgagatcatatagctcgaaggttccacgttgatatcaagatcaaacttggaggattatgacttctatatccccccccccnnnnnnnnnnnnnnnnnnnnnnnnnnnnnnnnnnnnnnnnnnnnnnnnnnnnnnnnnnnnnnnnnnnnnnnnnnnnnnnnnnnnnnnnnnnnnnnnnnnnnnnnnnnnnnnnnnnnnnnnnnnnnnnnnnnnnnnnnnnnnnnnnnnnnnnnnnnnnnnnnnnnnnnnnnnnnnnnnnnnnnnnnnnnnnnnnnnnnnnnnnnnnnnnnnnnnnnnnnnntacccccccccccccccccccaaatatttctcaaaacatcccattaaccctatccccagtctctaaaagaccccttaaggcttctcctccccaatcatcgcaaaccacctagccatataatcaatccccggtttctgatccctcggattccgcggctccggttcaaggaaaccgccatccggaagggggatttttttctttcgagcgatattactcaatccaatagaatacatacgccacccatcccagataacccaaccgagtcgtcgccacggtttcatgttcgtcagcgagtagcatgcaggcactgtccgcgtgagatttataccactgagatagaggtgtgcgatgtgccagtgatgcgaggcacggtgtctcggcgcgagcatccaggcggatgttaattctgtgtcctcgggaggatctggcgtagcccagaggctgatatcttgtgactgtgtgggtggcaggtcaaatgatgggaagaaaggtattgatgtttcttctggagcgggccagatagtttgggcgggttcttctgcttctgggtcattaggcagccagttcagggtcagacctagatctgagaggacggcggatactgtccagagtctttcggctgtgcgatagtcgatttcgctccaggtgttgtatgcgtctagttcccggattgaggattcgttccagttccatcgctggattgctgctttgcgcaggtgggagtagtgatgcagatgccagagagcccagtatgtgcgatactcttctgtccaggtgaagggttggctggcattttggatttggagtgggggtccacttattgaatccgcggggatattatcaagagttttgataagaccttctcgcataatagagagacatttgcacgcaagccgctggatctgcgcgcctatcttaagtatatgccgtgattctgtgtaccctaaagttggcggatcctcgcatgtctggtgatagtgctcaagatccgggcattgcagtgaagagatactgaggtgccagatgttatagcatagcttttgtatttctggcatataagtaatcggatttaagaggatcagctcttgtatgatgcgggtaggctgggcctggaagacggcattgagtcgtcgagatgctaacaggctgtttttaatgcctgcaaaatcaccgatattggcgagaatctgttgaatgacttcagggggcagtttctcgaaagaatccatgttgtaacttctttgagtggtgagagagatatgtagaaggttagattctctacaacgatcgagatctagtcaaatagctaggtgaagcctggcaaaccaggcaacggcatgtgatcggcacgtggccaccacaacaatatctatacgaaaacaatccaagtttataaatcgaaatttcgaccagacaaggtttagtgccgggaagcttaattgtatgatcttgctccttcctcccctcgactcttctctttcttttcctcatcccgccaagtggtgagagagatatgtagaaggttttattctctacaacgatcgagatctagtcaaatagctaggtgaagcctggcaaaccaggcaacggcatgtgatcggcacgtggccaccacaacataactgaagaaacttcgggctgggaaaggtagatgagaaggggggagcttggagatattgaagggttgcacgtgatgggattagcgtgtcgcattttattgatacagcgttcctaatgcttaacgaagacaaccaaattctacttttatagttgggatatatataaagcgcaaaatttacatcgttcaaaaaactcgagttcaatttgcgaactagatagactgctttcactctctcaaattaatgagcgagctatacgcataggagcagctttgaaccaagcaccccaagtagcatactcgactcttggtggaagatccacatcgagagcagagtcccttatgaagctgtggacgtccatcttttcaatcgggatgaaccagcctccacggtcgagcctgggatctttattccacttggtgtaaagaagccagacgacgaaaagtagaatcacaagcggtgcagcaatgtagttcatgaagaatgtttcagcatcctttgaagccacagagacataaaattccgcgatgagacacaagatattgagacccagaccgatatagctcccaaccacaccaaggggagcggcataggcaagctcgttcacgctgtgtccgttatgcgcccaggcggagcggaagcggatatgggcaaggcagatacttccccagatgaagaagtcggagataccagacaaggcaagaagccagtcgaaaatggtgcttcctgatggcgcctcgttgatgaaagcgagcaaaccaaaagcaatctgcaggataatacagtaaaggggccgaccacctttgtcaatatatgccatgaatctcggtgccatgcctcgggaagccaaagactggatagtacggcttgagccatatgtcgcggagttcgccacgctgataactgaaatagtgatgatcgcattcataacagagggcaatccagagataccggcattctggattgatacgacaaatggagaagccttggtgttggcgccagatgctccgagaagccagtcggcgtcagaaggaacaatcaggccaactataaaggtgcccaggacatagaagatcataatgcgccagaagacctgcttggatgccttggggatggacttggcggggtttgccgcctctgcagcagcaaggccagccatttctgtaccaccgaaggcgaaggctgctgtcacaaagaccgaacagaaccctctgaatgttgtgaatgcaccagggtcatgccagtaatgagctcctatgtaacctccgttcggggcgccaccgcaatcgatcacaattccaaggatgatgaagccaatcacagcaatgaccttgatcattcccagcacgaattcgactataggccgacgttagtatttatatatcttgtaaagatataaatgctttttcaccttctccgtagcctcgaactccgaagaactggatcgcagttagaacgactagaaacactgccacccagattccgctgttcaaagtttcactccagtactgaattgtcaaacttgcggccgtaagttcgaagggaagaatgatgagccatccaatagcgtagtcccagccgactgcgaatcccctatcataaaatgaggagtcagtcttttgaccatgaatatagtacatgaacacggaaactcaccaggccgggctaatgaaccggacgcagtatgtgaaaaaggctccgttcacgggatatagcacggccaattcgcccaaggcctgaattgtaagaagaagcattcctccaacgatcaagtagcatagtaacaaagacccaggcccacccgtacggagagcagaccccgtactaacgaaaagaccagctccaatagcgccaccttactgaaattagcatcagaagaaaagtaaaaaccgttcgaggacgcataccaacagcgatcatctgcatatggcggttcttcaggttccgcttcagcgggttgagttcaccgacgctaacatcatcgtgagctgaagggagactttcagctggttccacaatggtgggtgctttcttctcgacgtctgagtccatggcggtcatgttttcgaattttacgccaacgccggcaacaaaacttatccacggcgagtggcaatttatataaaagcccagccgcagataaccgtctgatttgcatcccgcctatgataagaaaggcagtaagcctgatttgctcagctcgtggcgtagtagagagttcgtatacggagtagatgtgatcagactgcaagatgaagataagactttgtgtacttctcacgacccgttgatatggccaatcgtggccaatcaggaggagagcccagagttcttgtttgagcttagttgacacgctgctcttggcaacatgatcttccccctattttgcggggccaattcgttctctcaatggtcctcgcctgaaaatacggagaagctcatctgttttaggaactcggggtaaacttagttggacaccaattctaagaccccagataagcccactttgactttcaaacatgggggtgaggtaggtctagggttgcagtgtcgaaccccatttccaacctcacatgccggtgttcagctagaagatagtatagagcatagagaaatccgcatctaacagatatttgaaatatgctttcaactgaagtgaatccgatcagatgcgcatttcgcgcgccattctcacgccatgaggcgtgcccgaagaggaatctttttcctgccgttggctggaatctcccacgtcaatactacgctgtggtgaacggtttacccttatcatccgccaatatactttcgaggaaaggaagagatacacatcacatacgcgttaaattgcccgggcgctgacgattggcggtgcctcctatctcaggggcaatgaaacgccgacagcctgtagaactgcaaatacccgatatggtacctccgaggttgtctcagtgttcgtgggatagatggccatagtaaccaacatcctaaggagacatttctattgaaagatatcatttcatgtgcgatcaatgtatcaaacaattgccaaaaatatcaagtccaaaagctcgcagaaaaccttcctgaaacagacgagccctgtctctaaccgaagtgcggcaagggcgtgatgttctacctatcccagtgcaagccacggagatggccacggttgccttcaatcgacactcgcaattactcacgcaacatgatctgcaatgttatactccgtcaccgcgcgaatttgattacttatgaaactaggaaacagacctgtggcaggtgctagtcaataccactgctagaagaaagctctcaccattatttcaatcacagcatacagaatactctttgaatatgcccatttcgagcttgctgttctgtatcttgccttgacgcgcggcttctgccttgatcacattcttctgggccttcgacgctaccttgtcccggtgtacatcatctatacgaaggtaatgagccaagaacaatacaaaagcttcaccatcctccaatgcttgagaagaaaattgaccggagcttgaaggaagcgcatgtgctgcatttctaatgagtacaacgccatcttgctcccacgttggaagaggtaaagtccatattggatacatgctttcaacatgaagaaattgaataatctttgccaacaggtttctttcaaacagcatttctcacgcagttgacaaatcacatcaaccattgcgagtgtttcgagatcaggacattcttcgacctcgtaggttgaccaatcaaggggatcctggctgagagacgtgatagcagcagacatcgagctttctgaaaagaagtatccgaagaacccgttcccaccaaagacaaaatacatggaccccggttcgacaacttcatttacacctgccgcagggatgaagcccccaatcccgacgaggcctctgtcgacatttagtcacggaaacacacataatatggtgaatgactggatcaagtgttttaattttctacttactcgtagttcgggggatatgggtactccgtggtggatcatctattagatatctgatgcatttgggtatctctaaaagtgttggttgtccgcatgaagcttgacagacccctctttggtaagctctttaccctcctgcagagacgcggtttggcagatctctgtttgcttatcttacagggatgcttctcccgcgttccagcgcaggaattctttgtatcattgatgtatttgggtgtccactgttcctatgtagtgttctagacccctctttggcagtatccttgctcttctcgcagcctcatgttgtttcacttgcggcttcatgctgcgccgtgttgtgttagtatcttcttctagtcgagctgttgctcatcttgctgaagatgcttctcctggtttctagggggggtttagggggtggtccacgaaattattcaaagagcttcatgtcagtagctagatgaccatctccgtctatctacacagatttctcttctttgttcgtaactctctcactttctttctcattgtcacattgtctgtatatgtgcatcattttttgtccttgtaaagtttagagggttttatggcagtagctagatcatgatcaacattttatctcagacagatctcgcattggttgatcatcactccccactcttcctatcagaagaccgaaatctgaagcagaataacgcagcagctgcgatatcttcacagtgcttcggacaggtttggtggggtacgttgactcttctcataacgactatgaagatgggaagtcaaccgaagcgtacaagcgtcattcgatatagatccttacctatttgggcctggccttgcccaattgtagagctagaaacaccactcgtcgtgcttctaaagtcttggactcggctatatgtacttgatcgcgatcttacctttcctccttcatgaaacactcctagttaataataaaatcctcccaatgtctatggcaaaagactttacagaagaacaggacagccaaagaaatcttcctaattgagagaacttggtgcaaatatataggcactggaaaatgagagcaaatacaatagcagcaaaaaaatgcatcgtttcagcgtctgattacacgagtaattaaatccaagaatgcggagtcataatcgaatacaccatgtatatcccggttcacatcacaacacagcaagagttttgcttcttggcctggaattacttgtgttagtacattcaagtgaaagctacccttgacccttgatttgcatacctgggtatagaatttcttgctctgatttgacagatcgtcactcttctgaaccagggtgtcgatcttctcaccgcgctccaggacactttcgatctggatatggttagcacatataatgggctcatacagacctaagagcataccgtcttgtgaaggacaatcttggtttcgtcaagctcctgctggatcttcatgatgctgtcggcctgggttgggtcctggtacttgacgatatattccttgagctgcggcagggggcacgcattctcgcgcaaagatgggtcggagaaggcagtgcgtgggtacttggcaagaaactcgtccacaatcttgctcaaaacctggtgggccaccagggcaggatagtccccatctgttacaataacaccggcaacaccctctgtccgtccgtaagtatggaatgtgtaggccttctcctcaatatcctgtcgttggcccggctttgtcctctcggcgaccgttcgggtgaagagcatgaggaattcatcgtagctattaagcgtttcgcggttagtgacctagctgtgtcggaccaagagaggatgggtggatatacctctgacgagtaaagcgcgaaaagctagtgacaattagcgggttgttccagtcagttgcagggcgggcatatgaaattacccgttgaggtccttttccccgcatagctcgacagctggcttagggtcgttccggaaaacctgcgaggttgataaataagtaccgtatctcagctaatattcaatcaaatccaagctgtgataaaacatacgcccatataaagaatcttcatggtgacagggtgttgtccgcacagggacaaggaggcaagtaggtgttggggtcagtggggcgttgcgtggtggtaggtgattatcaaggaaacactctagtgtcaaagaactaggcaactcctttatattgtgggagatcagctgtatgttcagctggagtggcgaagcaaagtgacaagtgttaggcctaaaatagactcctgagttgcagataacaatgatgcactggaccctctggattatggcctgaggcatgtaaggtacaccgctcttgtcatgcgaccaattgatgttgagagcctgcgggcctggccgataaccactttgggttccctacaatattgtacattctttgtcgctcagcataactatcacatcttgatcattacatcaactagacagccctctcctaaacatggacagcatcgcagctaccgagtcacaatggctgttacaactagcagccatgcgccaggccattgccgatctgaagctccccaaggaccttcctcatgaagcgatcggctatggaagtgatattgatctggatattgacgacgactactcatccccgggaacaaatgatgatgtgtgggatatcatcagctcggatgatgaatcttccgatgacctggatggactcgacggacttcatgtcgcaccaggatcctcctacaatcgattctggcttgaagataagtgccaggatttggctatgcggaactcaactatggatgcgacggagcttgctgggcaagtcatcgccaccctggctgctgacagcaacgacgaagagctacaaatgtccttggccgagattgtgggattcgatgacctggatctggtgattgagctgattgcacacagaggagaaattctgtcggacaagggaccctgcttggaatcccagacagatgggctcatggcaggtagactccaaacacgagcagagagagaacatgctttgcagcagcgcgacttcgaacataagaatgcagcgttgatgccggcccaaacccgatcggagccttcctacccgcatgttttcaaacaacacacctctggaaatacactttccgccaatggaaagaaatatgggctgcctctgggtagtgagcagattgaggaaccaaagtacaccgaattcgcgattccagcgtcgaaggtcggaacacttggaaaaggaaggaaactggtggaaatctctgaaatggatggcctttgtcggggtaccttcaagggctacaaagccctcaatcgtatgcaaagcttgctctacgatgttgcatacaaaaccaacgaaaatatgctcatttgcgcgccgactggtgcgggtaaaacggatgccgccatgttgactgttctcaacgccgtgggaaagaacacatctcctaatccgttagaaaacccagaagcgactgagttcactgtccaacttgacgactttaagattgtctatgttgctcccatgaaggctttggctgctgaggtgacggagaaactcggaaaacgtttagcctggttgggggtcaaggtccgcgaactgactggtgatatgcagttgaccaagcgggagatcgttgatacccagatcatcgttactacccctgagaaatgggatgtcgtaacgcggaaaagcactggagatacagagcttgttcaaaaggtccgccttctcattattgatgaagtccacatgttgcacgatgagcgaggagcggtcatcgagtccttggtcgctcgaacccaacgtcaggtcgaaagcacacagtctctgattcgtattgttggtctatcggctacccttccgaactatactgatgtggcggatttcttgaaagtaaacaaaatggccggcatgttcttctttgatcaatcattccggcccgtaccccttgagcaacacttcatcggtgttaaagggaagcccggctccaaacaatctcgtgacaacattgactccgtcgcctatgagaaggttcgcgacatgatggagcgaggccaccaagtcatggttttcgtccactcacgcaaagataccgtaatgactgccaggatgcttatgcagctagccgcggaggagggtcgagaggatttattcagctgtcatgatcacgaaaactattcgaatgcccttcgtgatatgaagcatgcccgtgcgcgtgaactgcgcgaccttttcgctagcggatttggaacccatcatgctggaatgactcgaagcgaccgcaatctgatggagcgaatgtttacagaaggtctaatcaaggtgctgtgctgtactgctaccttggcgtggggtgttaacctccccgcagccgcagttgttatcaaaggtactcagttgtataacccccaagagggtaaattcattgacctgagcattctcgatgtcatgcaaatctttggtcgtgcaggtcgtccacaatttcaggacaccggtattggatttatctgtactactcatgacaagttgactcactacctgtctgcggtgactgcgcagcagcccattgagtcgcggttttctggtcgacttgtggataacttgaatgccgaaatctcacttggaacagtcacatctgtttcagaggctgtgcaatggcttggctactcgtatctctatgttcgcatgaaacgtgagccgagaaactacggaatcgagtttgccgagttgcgcgatgatccaatgcttgtccaaaggcgtaggcagttgatcttgcaagcagcacgagtgctacaaaagagtcagatgatcatcttcaacgacaagaccgaagatctcaaagccaaggatgttggtcgtatcgcgagtcaatattatgtattacaaaccagtgtcgagattttcaacgacatgatgcgcccccgatccggtgaggcagatgtactcaagatgatcagtatgagtggagaattcgacaacatccaatccagagacagcgagtcgaaagagcttcagcgactgcgcgaagaagttgcgcagactgaagttgccggaggaaatgacacgccacacgcaaagacaaatctcttgttgcaagcttatatctctcgcgccaaaattgaggactttgctttagcatccgatactgggtatgttgcgcaaaatgcggcacgtatctgccgtgctctcttcatgatcgcgttgaatcgtcgctggggctatcaatgccaggttttattgtctctttgcaagtccattgagaaacaaatatggccctttgatcaccctttccggcagttcgacttgcctcagccgatcctacgtaacctcgacgaaaagcttccgactacttccatcgagtccatgaaagaaatggagcctgcggagattggtcagcttgttaataaccaccgcatgggcaacacattggccaagctcttggacaatttcccgactctgagcgtcgagactgagattgcgccgctcaatcgcgatgtgcttcgtattcgcctttccatctaccctgagttcacctggaatgaccgtcaccatggagcatccgaatccttctgggtctgggtcgagaactcggaaacatcagaaatctatcatcacgagtacttcatcctaagtcggaagaagctttatgctgaccatgagcttaacttcactattccgctgtctgatccccttcccagccaaatttacattcgtgtaatctccgaccgctggctgggtgccgaaaccgttagcccggtttctttccagcacctcattcgcccggacactgaaagtgtgtatactgatctactcaatctccagccacttcctatatctgctctcaagaatcccattcttgaggaagtgtatggacaacgattccaattcttcaaccctatgcaaacacagatcttccatctcctttaccacacaccagccaacgttctccttggttccccaactggcagtggaaagactattgcagccgagctcgcaatgtggtgggctttccgtgagaagcctggctccaaggttgtctacattgcacccatgaaggccttggtccgtgaacgagttcaagattggcgtaagcgtctcactaggcagatgggcttgaagcttgttgagttgaccggtgacaatacgcctgatacacgtaccattcgagatgcggatattattgtcaccacgcctgagaaatgggacggtatatcacgtagttggcagacccgtgactacgtcaggaaagtcagcctcgtgattattgatgagattcacttgctcggtggtgatcgtggtcccattttggaaatcattgtttcccgaatgaactatatcgcttctcaatccaaaggatccgttcgactgatgggcatgtccaccgcctgtgccaatgcttcggatctagccaactggcttggtgtcaaagaaggactgtataactttcgccattcagttcgcccagtccccctcgagattttcatcgatgggttccctgaacagcgtggtttctgtcccttgatgcagtcaatgaatcgcccaaccttcctcgcgatcaagaaccattctccagataagccagtcattgtcttcgttgcttctcgacgacaaactcgtttgactgctaaggatttgattaactactgtggtatggaggacaatcctcgtcgattcgtacgaatgtctgaagatgatctggagttgaatctcgcgcgagtgaaagatgatgctctaaaagaagccctcaactttggtattggtctgcatcatgctggtttggttgaatctgatcgtcagctagcagaagaactctttgccaacaacaagatccaagttctggtggcgaccagtactcttgcgtggggtgttaaccttccagcgcatcttgtggtggtcaaaggcacacagttcttcgacgctaaaatcgaaggttatcgggatatggacttgaccgacgttctgcaaatgctcggtcgtgccggtcggccgcagtttgacacatccggtattgcacgcatcttcacgcaggactcaaagaaggctttctacaagcacttcctccacaccggtttccccgttgagtcgacacttcacaaggtcctcgataaccatcttggcgctgaggtatctgctggaactattggaacgcaacaagatgcactggactacttgacctggacattcttcttccgtcgattgcacaagaacccgtcatattacggtctcgagatctctgcagaggaacaaaacaccatggcagctcaagccacagctcaagatttcatggttgaattggttgcaaagtcgctcaatgatctcgcagaatcgtcctgtgttctcgtggactcggccaccggagaggtcgattccactcccttcggcaagatcatgagttactactacctgtcacataagacgatccggtacctcgtgtcccatgccaagcgtgatccgactttccaggatgtcttgagctggatgtgctctgccaccgaattcgatgagctgcctgtcagacacaatgaagatctgatcaacgctgagttggccgagaacttgccgctttctattgactgcatgggcgacgcgcccctatgggatccacacaccaaggccttcctcctcctgcaggcctacatgtcacggatcgatcttcccatcactgattatgttggcgatcagacatctgtgctcgatcaaggtattcgtgtcatccaggcctcaatcgatgtcatggctgagctcgggtatcttcctgcgtgtcagatgctcatgaccctcctacaatgcatcaagtcggcgcgctggcctgaagaccacccattgtcgattctgccaggcattccgaccgagaagccacctagtggtctcccgggaactcttgtatcgctctcgtcacagcctgttggtgcagtcgccgctctggtgaagaaattaaatcttccatttaacttcactcgcattacgtctcagctgcctcatctgtcggtcgccattgcaaatgtttctgctaagggcatggctgtgtctttgacacggcgtaaccagcccacaaccccagaatgcaaggtctacgctcctcgattccccaaaccacaaactgagggcttcttcttgattgtctgcagtgctcttcccaatgggatggatggtgaattacttggcctgaagcgtgtttcttggccaccagtgtctaagcgcaatggaaacggcaaggacaagggcaaccatggtgctagttccagtcgcgcaggagctgccaaagataacaaggttgacgtgttgaccgttcgctcaaatattaaattccccgaaggcatcctcgcggattccacgagtacgagcacagctcgggtgaatatcagagtcatcagtgactcgtacgttgggatggcatggactgtttccaatatcgaagttaatttggatactggcatcaatacgcagactgtggcagaggccagcattccaacgaaggactaaaataagatgctcaaactgtttattaccatacgacaagtcaatgcatttgcgaaaggtactggactaaatgtaaaacaccgacaatgaataacatgagcctttcaaggaatggattgagatgttgtagaaagtatcaagaccatatttggagaatagagaacgataggtacatgtagacaacgtatgagaggcggcaaaggggaatcacttatagaagaaaaaaagtaaagaaagagggggggcgaagaatgtcacagacactctatctgcaactcctgcgagacaccagcccgatgtccccggtgagcatctgtaatctgcggtgtcagaggtcttctctgcacaacccgctcctccggggttaaatgatcgatcctcatgccgatgggaaccagaacctgctgctttgcccgtgagacagagacagtgcgtgctatggagacctcaacccttgggataggacgtcggggctcgggtgcaggcgcctgttcagcggtatcaggtgtctcaacggcatcgacgaatggcatgcgcatggaatctgctggcgatgcgccagatttaggaccggttgatgctgataatggagacatgattcggtcaatcttgtcctgggtagggtttaatgctgaaggagagcttcgggacggactgctagatagtgtgtctttcgcgggtggttgcggtcggtcttctgtttgaactctgagacatggtcgcactgagtcgttggttctttgttggctcgacgtcatatttggctggtgttgcggtgaagtaacctgagactgtttttctatggctcgcggcagggaatctttcctcggctgtagatgaacccagggctgagcgaccggctttgttacaacaatattgtgtggttgcacactctgttgtggtcgggtcttctgcgaggatagggtgttcttgtccggttgagaaatcttctgtgattgaattgttgtctgtggttccggcttgatagcaggaagaggtttgtcgtagctactagaggactgcggggtattggaacgctcggagaaaagcttcggaatgacaggtgactcgaacgatgagacgctatccatatttgaaccataacgaagctgtggcgcaggcatccttgatgggctttcgatagggagtgtctttgctcttatcaatgggtttggtccacgagagaaattctgagtgccgagtatctgagccgctttcgaagggtgtgaagttggaaataaagtaaagtctgaccgcgctggtgatgttgcccggcggcgttggggcactgggggtggtgctggcttgaggaagtcctatatcaatgcatctattagtctcataccggtttctcatcgatgaaagaccatacatttgcgtctggtacgagaagattgtccaatgtcttggcccttctggccagcagtgagggtttttggttcttgttgacgacatcgctgaacatgacactgtaccgctccatctgaatatccgggatttcgacactaagtaagagaccatgggtacttgattcatctttggttggcttgttgccgagtgaaaaattgcgactccgctggggagtttgatcgcttcgaccaggcatctttctgggttcgacctcaaacttcggccactcctccgtcgagttctttctcagtcttgctttcggtggtttctctggtagcttatagttgttgctgtgtggcttgaccacgctttcttgtgcgccacccgggatcgatgtaggcgcattctttgccttgaacaatccgccgatcttcttccacttgctgggcttatgggctgagtctctttctgcgataatgaatgtatcaaatctgggtggtggtagcggctcatctttggttaacatgccgggactgcccagcgcaatgccaatcatgtgttgctcggtttgggcatggtcagtctgaatggcttcatctggtggtgcggttatgcgaaagtcgaaagttgcaccttggcccgatggtggcttttttagccacccgtctcccgcagagggctggctgaaatcccactggccaatcatgggttgagctggacgctgtgaggcctcaagagagaaaaggtcgtcccgtggtaaggcatcggtataggtcaaaacaggaaaagagatggtctccttaggttgggtgcgtgaccggactgttgtcatgccccttgccatctctgtaattgtatattggaatccagccgataataggaatgagtgttaaaaggagaaaataatggaaaatgatggtattaaaggagagcagatagtaaaagaagagacgagccttccagaaggccaacaaaatgaaggaaacgaaacaaatagcaagacatcagggtataggccagtatattaatgaaaccagaggaacagattgagtggagaaatcaaataaccatataaacgagagctagagttaaccaaccggtctagtctgggactaaaccaacgaaacatgagaaacgaggccaaaactcgcaacctcattctgttttggaatttgaggggcctctcggcgttaatattcacgcccgtgtgagatgcttatttcccgccggacgaatgagcgcattggtcgacggattagctcgctaccaggccggaggcgtgtttcacctggtcaaaactgagacaatggcgtattattttccgttttacccttgaatcaggggcctttttcgctctggagcaatagcattggatgcccacatactcagtacagtgcagggtcatgaatgtcgtgactcgtgaattctccagcttcgcattgtgagtcgccaatgcaatgtgatgccaagcctgtctctatttccaatgggcatatctcaaggtctaagtactccgtatggtgtacggagtaagagacaaggctgcctgagacgaagataagaccatctgagacgaaagatgaatctgctattggtaagtagcggtcagatcaccccttgaagttttggggtttaggcactgtaaggcagcaaagcagtaaggcaccaaggcattcaggcattcaggcatacaggcactcaggcactcaaggcagcatgatgatcgagtcccgtgatctcccgtgatgatcgacggtacatgaagtgactgggctaactggactggactggtaccgcggcatgttatatgtatgtcatacatattcaatgctgtactcgacatgactgccttgaatcaacagaaaagttgttgatgttaagctcctctgtatatttaaagatctcccaccgctacttggagaatatccgatatcttatacacaactccacaccctacacaccctacacaattattacaatgtccctagcatagacagattgaataagatattctgaatcgacgcatcaatagacatacataaacaaaaataagcttgtatcccaagtcagttgcaaacggtgggatcgtcatatggcggggtcctctcccgaccgccacaacttcttctccccccaccaactccccttattctcccagctctcctttttttctgtatattcaaaaggtgcgccctgaaatttctgctttcttctcttcttgactgtctaactcaatcaactccagcgttattctctcagcttctttacagtcatcatgggcgagcactcagcaatctggcaaagtatgaatcaccttgcactgcagactgcagactgcagactgacaggtcggcccttgcttcttcgagttcgctaacatgagatttccctcgaaccaggctatgtcgacaccaggtacaccactgcccctcctcaaccccagatatattcctcaatgctaccatcgaaaccgaatcatctcacccgtgttatcctatacatatactgacaagcttcttttctcacagcctgatgggctcgtttcaattcgacaaggccggtattctcgccgctgatttctccggtgttgaggctgcctcgcccggcttcgcggtaagctcgcctattgttttccctcgtgcggggtggggtcacaggcttcgacacatccgctaacgttattggttgtcgaaatacagctctctcaagaggagatcaactccctgatcaccgcttacacttctagcgagaaggccttttcctctggcttctctgtctgcggtgagaagttcgtcaccatccgggctgacgagcgcagtctatatggcaagaaggtaagcatatcccttcgactcataaatacctcgggagttctatcaacgcataccactggaatctggtctaatctatttgatttgtgttacagggtaaggagggtgtcattattgcccgtgcctcctcttgcaccatcatcggccaccacggcgagaatgtccagactaccaacgcggcgaccgttgtcgagaacctcgttgattacctcaacaacccccggtaaattggaaaatattcaaggataactaaatgatgtgatgagttgaggggtttgtgaagaataggaaataaagcagcactcgactatttctcttttgaccccagcgtgtttttttcgcttatgcttcttttcttgctttgtgactggatctctttgcctcaatcggtcacgtcaatctagacatacctcccaatgcacagtatgaggatacgaaccagattgtatgaggcacgacgtaatttgtctattctaacatgcatattaactgattaccagccgcgctggaagatcaataagggtcattattaattacataaagcggaaggccgtagatggatcgtatcatccatgtatagcacagcgtacttgcacacaaacaaggtgatgtgcatccgatatccggtaagggtacatcgtgaaatccacatacacggagtctgggataccatcaaggaacctcattgtcgagtcgtggtttgtatatactcatacaggaagctcggcattgctcctcccaccagcaagcacctccagcccacgctggatatacggccctatcacagggatgttgcccgcaaattgaccgatggtgaccaggaagtcgccaaacaggatgaacaagccgtagagttctatcaaaaacccagtcaagggccagcggaagagaataaggaggataccagcggcgaaagcagcagtgcccttgagtttttgcgggcgcgtgaagaagaccgtggttttcctgacgccaataatcagagtcaatccgatgagaaagaggacctagcattgtcagttagatgtaacagttttgttagagcatgtggcacacatttcccatggcgagtctagttaacaggcattagcatttattctcccaaaaacgtgaaacttctggatagacatacaatgaccggtcaaagaacatcaatactcctccaaataggaacaagcctcctaattagcaaaatgaattagttctcgggtccgagtaattagtgatttgggaaggtcgatctcgtaccggcggagcagaagatcacaccgatctctgttatataaattagcctatgctcgacaattgctacacatgtactgtcacggtagtgaacatcacagcttgtagagcgaatgcgactgactctggttctctgttaaccacatgctaggcatccttcttttatttcaggtccgactgttgatgatgatatatgggaccgaaggttgctcaaatatccgcgatgtacttttgtaggacacacgacacctatcactggtgtgcgaaacaaatgatctttgatggttgtagactcggtagggcgaaaccaggcagatgcggcagggacaaagcggatataccggtggcgtcgttcaaagtgggtaatagcgagtctaggtttgcagtatgctcacgacgtgcaatattctcgacacagatcaaggtagcaaaagtcccgaggcacgtaaacaagtcaaaaatcacaattctgccgcctaatcagcgccaagccgggaatggtaggcggtgactccaaagcgcttatatcgcgggctgatcattcccttcttcctttcccttagtcttctccaatttattggcaattgaacaaggtcattaatgatgtgatagtttcaattgcataggtttgtgacaatctcaattttcagttctaaatctactggtattgagatataccgaactgaaccacacaatattgagcacagctcatacatactgctactcgctattgcagaaccttcctctctatgtatttttgtacatgccacgccgcgacgacagtctcttcggattctgtaactggtgccctgttccatggggtgtcggtaatagtcgagtgcttctgcacaaggcgaagatcgactcattgatcacgaataagccggagcgttttcttgagcctgtctcgaaaggggcatggtggggtggaaaaggcttgactgtgttggtcgtacataacgcttattgacgattcgtatttttgtctatctcaattgattagtagtgctctgacaatccagattctttcttgtatgacatacccgttcttacatgatcgttcgtttgggaattgataaagtaagcaacggccgccttttacttcaaaatagtgtgcgccccgcgggcttccaggtagttttctggaacaccctgtgccagagtccggatcaccttataaatctccttgttgtgataccgcagccgggtcttggggtcggtgtaaggtccatccaggcccgtgatgtcgcagtagtgatgctggtaggcagggttgaacgatggtgcggattcgatgttcgtgtaggtgacagcaggaccggttgggaatgtcgcccgggcattcttctccaagacgagagtcgagaggttttgggtggcctgggacaggttgggtgctgccccttctgcgggggtttgtgtgccatcggtgagagcgcccgagttaccaggcgtagtttcgcccgaattgacttgagttgccagtactgaagcctccttccgagaggcctccgagataatctgcttcagattcttgttgcgccgctgggacggtttccagtgagggttgcggaagggcttggggacatgtgaaatgtctagagtgttcaacagctgctggtgagcttcatcgttggcaggagttggtggaggcatgatatggaatatgattcaggatctcaaacggataaggtcaggtccaacgtaagaagcaatgcaagtagtatccccggcccgcgaagtctgtatagccgcacgtgatctcatcccgattaagtccaaataaacacctgaacgtccaatacccacacacattactcaatattcagtcatggtacgcggtttctcttccctgtatcaattttgatgcgatctgaaagatcccagatgctgatctctccttaggaaagcccccacgagcatcagcagacggtgctgctctctcgcatcatcaccaacgtcgtatgtgattgaaccacgtctgcaagatatactctactcaactcatacataggagaagctcaatgaagccattatggtcatgaacaaaggtctccaggtaggttcaagcctctcattgatattatcatgttattgactctatcacaggaagtcaacatccagaacatgaacgttgagcttgtggcgcagatgtttaagaactaccagtctaatgttctcttccatcttgaaggtatatatgactatcatatatcagaaaacctctactaataccctctagctaccgagaacctccaagacccatcctaaggaattctgaggatggataatttcatgtaacgaggaaatgtatggacgagcttgcaattagtcaatgataccaacttctaaattcaataactaggcacatttaaatggttgtaatcgttgcatccctgtgctccgtactccgtaccagcgatagtgatagcgatagcctctattcttggcggtccaactccgccaaactcatcaaccgcgtgtgtgtcctctttgttaatccgctaccctttctgcggtttattagtttcctcatatccaaccttattcccatgcagtgagccctcttcgccatctacagatctccgaccccaatagctcctggtttctggagcgcagcccgccatgacgattacctctgtgcacaccctcctaccagctcgcattgcatccaatgcgagtgaaaaacgaaccgagaagcctcctccaaaactctacactgtacaagactttccattcaagggctaccaccctccgcaacccgagggataccagcagagcaaagcccatcccgacaccagtgctattgtcattgacaatggtaagggattccataactagagtttgtgattcaattctcctaacagatgtggtgcgcaggctcccacctcgtcaaggccggttggtcttttgacaaaaacccccgattcgctatacctcccgttatgagccgataccgtgatcgcaagctcaatcgccagtgccaatttatcggatacgatgcctacgtcgatgcgaccacgaggggacagctgcgcaatggctttgaccccggctccagtgttgtcggtaactgggatgtcatggaaggcgtgttggactatttgttcctcaagctgggcgtggacggcgcagatgggggcgtcggtcgcccgatcttgatgacggagccaatcgccaatatgccatattcaagaaagagttagtatcgggcggttttagggccagtatggctgttgttgacacacctccagtgatgaatgagatcctcttcgaatgctactccgcgccatcggtggcctacggtatcgattccctcttctcctatcgctataatggtggaacggatggtttgattgtggattcatcgcatacctctactcatgtgattccggttatgaactcgaaacccatgctctccaactgcactcgtctcaactggggtggcctgcagagcgccgaatacttgatgaagctcatgaaactgaaatacccgaccttcccgactcgtttgacagacgcacagatggaggaaatggttcatgagcactgttacgtctcacaagactacgagcgcgagttgagtgggttccttgactggaccgggctcgaggaccgcgaccgcgtcattcagtacccgttcacggaacacattattcaagagaagacagaagaggagctcgcgcggattgcggagcgcaagaaagagagtggccgtcgcttgcaagaacaggcggcaagaatgcggcttgagaaactagtgaagaaggagcaagagctggagtactggaaagatctgcaagagaccctagctaacgagaccaagaaggaaatccgtcgtatccttgaagccgaggatttgaaagacgaggcggcacttgaaaagttgattcgcgagctagagaaatctatcaaacgctcgcgcaacaaggatctaggcattgaagaaactgaggagcagccggaggaaatgacattccctatgctcgatatcccagatgaccaattggatgaggccggattgaaggaaaagcgacaccaacgtctcatgaaatctaacgtcgatgccagactacgtgccaaagaagagaaggagcgcgaaaaggctcgtattgaagcagaggagcgtctagaccgtgaggcgcgtgagaatgatttcgagaactggattgcaaagcgtcgcaacaatcgccaggtatcttggccaaacatgatatcctcgatttccgtgctaatatttctcagggcattctccaaagaatcaaagaccgtgaccgtttcacggccgatctcggaaatcgcaaatctctggccagtcagatgcgtatgaagacgctggccaacctggcatctgacggtcctaagaaacgccgtcgtggtggggatgacgatgacttcggtgccaatgatgaggactggggtgtttaccgcaccgtagctgttggcgagggtagtgacgatgaagaggaggaggatctcaacggtatgctcaactctgtagagaaggagcttctggagtacgaccccgaattcaccgagaacaacactttcgccgcacagtccgactggacgaagagtcttgtgcacgcgttccttcgcgggccctggcctttcgatccggaaagccagcgggaggcacaccagctccatctgaacgtggagcgcatccgtgtgcctgaggttgtgtttaagccgtccattgctggcctcgaccaagccggtttgatcgagattgcggccgatattattaaccaacgatattccaatccagcagaccagtcccttcttttgagggatgtgtttttgactggaggaaatacgttgtttaccggtttcgatgaacgcttccgtaaggaagtccgcggattcctgcccatcgaagctacactgaatgtacgcaaggcatcggaccctgtcttcgatgcttggaagggcgcagcacagtgggcttctggtggtgacctaggccgatcctcggtcacgcggcaagagtacttggagaagggcagcgaatacatcaaggagcatgaactcggcaatgctacatggtgaggtttaaaaagcgcgttctaagaacgcctgtctgggcgcactggagtcgaatggttctgcttatccggcgtggtatattaggacatgtttatctaatacttcaaagattttattgcagaaaccggcggtagtaagcgaaatatgacatgttcagccctctgtatggttactttaactatgttaatagagccggtcttgccagagcatggggtagtagaggtgataagtataggctatctatgcatctcgatggcaagggacccggcgaacgtattcattccccaggtgagacacgctccttgcatttatcaatgagccatgtttaagatagctggtctagaagactgtcgatcatggcttatgcagggagaccccgctagtcaactattgaagctgcatattatagtcttgtttttctcatgtctcgatggttatgcaccggcggtgccattcactctttctcgctctgattggcacttgataagtacaacaccacaagcttaagcagacgttggattatcctccgcaaactgccgactggcttttgtttgtttggggttattctcgaagtcgccttctttatgtaaacctctaaatcgacctcacttatgtctttgcgtacgagaacatgacattgcccttaccacatgacctagatatcgacgtcgtataaaatagaactaaaatgaacttactgcacgatatagttcgaatagctacacaaatgaaaaggtaaacaaatcttcaactacctcttccgataacctgcagcagaaaccattccagattaggatatgggccagacatagtgacttcatccagatgccatcatgacgcacctggagagtttttgcttttcgtccttgctgaccctggccatggactgtggtgggtcttattgtattttatacctagcgtcagtcttgtttgtttgccttcgttcatgctaattccgagatataaagtccttctctttgctcatttgccatgaaggccaactcttttcccccctcgctgtatcgcgccccctttcacgttttatatacttcttggtccttatacaaacgatggtcttctcaacaaacatcgctcgtccactgcaactggctactcgcgccatgcagtggagtagcgctgtcattgtcatgggcctgacctcgttcttcatcaatcgcggtccccatggtcagcatactatctaccaagaagtcattgtacgttattggcgctctatttgatcaaacagttttcacaaagccatggaatctaactgcaagcttaggctgtcctctcagtcgtcttcttcctcctggcttttatctcgccattcctaccctcgttgagcagattcgtgctcgctatcgacgtggtattctcctacctgtatgtcagcattcgatcatagtgtctgcatcgaagtctctaatatccattccagctggttgactgccttcatcttctccgcacaagactacagtacgagacggtgctactttgctattcccgcgggtctcaactgcaatagcaagagagccaatgaagctttcatcttcctagctttgtatggcctgaatgcccccagccgctatggataggtgaaaactaatatatcgcagtatcttcaccttctttggaatcttccttgaaaccgccgctctatgggcctatcgcaaggaaaacaccaccgaacgcagttatgaggataaagtccatattgagacccgtccacctcttgatgcgcctacagttcctgcagttcctgctggaactgtctaaccggtgtttcaactacttctctggataaatatgcatctactatctcttgttgacgttctcaatcgttgtggatatattatttactgggatgttcaggaaaccgtcttgtgcataataccttatatctggactctttgattcttccactagccttctcttttggttttatctcggtggacttggattttggcaggggccaaattgaacatatgtttctatgagcggggatgggagggtgaaattgatatctgatggacagtatcgcaggctcgggatacgaccttgcagtgtgctctctcccaataacttaatccattcattacttatactgtgaccgaaaccttcgggtgtccgatatggtgataccttttccctttcttaatcaacattacacgacatactgaagaggcctctcctatttcaggtttttcatgatgttctagccgaagggaaaacataaaggctaaacaataatggcctgattcgcataactgaagtaaaaatactggaagtaaatgtcatatgactgccagcaaagctgtatttctattttattgtctgactatttacaatataagtatacactgaatgtacaggttcgataaaagaagccacccaatcagtatcttacgcaataaagaaagtaagcaccaagcagcgcgaatcgtacgcagtcttgcataccggatacaaaaaaggtcaagtctttgcttaattggactcgacatatcacgcagagcttggttgaaggataaatgttggaacggttagatactagctcggcgaggagccatcgtccgctgcaacttgcgcttttcctcggtttcctccgtgataggcagtgagccctcgctcctcaagcggtcgaggaactcctttccatatgcatagccgacttggtagatctcgtcaaatttaccgaactctagggtaccatatgggtcgacaggaggacgcatgtatagacagccagtcgtattctttgcgcgctcgagattgtcgaacgatgagacatacgccagtcgtgcttgtatttcggaaagtgtaggtgggttcgggagcgaggagaagggattccaccggttgaacactgaccagaatcctgacaatgagtctccgaatccctggggtgtggtgtcatcgatagatccaacatcaattgcgaagatagcatccgctccaagacttttcatgtgcgccactgtgagattgtcgatgtagccaccatccaggagcatactgccttcatcacagataggaggtatcaggccggccaatgtcatcgaagcccgaacgtaccgccagacgtaaccagacgagtgatactcaattcgggatcggctgatgttggttgtgttgcagtagaactccaaccagaaatcttcgatttggctatctccaaatgtcttgaagattccccggttgaactcatgacctgtggtgtaggaaacagtgggataggtcaaatccaatgcaaaccgccacatactccccatgcgcccggagaacttcttagctcgcccgtacatgggaacaacatcagcgtcacgcgcgtaaagagcaccaatgaaagaaccaatcgacgtgccacctatgatatcaattgggatcccggcctcctcgagggctttaataactccaacatgcgcaatgccacgcgctccacctccgcccagtacaagacccacagacttgccgcataaacgccgagccagccgatggaaatcacccttgaaggaggtttgcggggaatagagtggagactgttgtgcacgccgggacgtatacttttggatttcggcttgcaaaatttgcacgcgctgcttcagcacagtaccgaacttcctagtcggcgggtgtgaaggctcggtggtcgagcgaaagcccatttgaatgtggtgatggccgccgttaatccacacccggttcttcagccattcccgagtcagtccaggtgcacagtaacgctctgcgtgcaaaagaactagttctttgcgagcagtggtcttcatgcctagcaggaagcgctcatattcaccaattctaggtgaagactcggcgaggcccaccaacaggatagagtcagcttgcgcaatgcaagtctgagtccacggtgcgttcacattggtgtcagcgatgtacaagaccattccgaatttctcttcgaggtcagccaggtattgagaaagcttaagcttccccatcttagtgaaggcgtggcgacccaagtggttcaaaattgtcgcttggttgagtgacgtgacacctctgggcacaccaatttggtgcaacgcctgcaagagtctatgtccaaattctacgaccgggacgccagaaatgatgggaagaattgccacggtgcgaagattgactgttgaggttgcagtctgaacactgccagtctgtccctgttcaatcttcttttcggccagcggatgctcgactaaatcacgcattcgctgggcaataagtttagagacctgcatggtaattccaggatgttcctgagcgagactgttgaaaagagaccgggggaacttggctagttccgtttcccggatagcatgcaaggtagacggtcttgtagattcagtcatgacctcgagttcgccaacactctcgccctggccgtgttcaccaatgacggttatcttgccgtttgatccctcaaggacagacctcaggcgaccgttcagaacaagataaatagcatcgctttcatccccttggtggtaaatcacctgccctgcgctgacctgcacccactccagcgcgaaatcaatgtggagcagcaaacggggcagcagaattgtcaaccgctttgctagcgttaacagagcagttggatgtctatctgcgattctctcaagggaagcacggggaaggaatccaacgtaaacatctgtcttggcgacaacatcggtgtacgagcggtacgatgcaagagcacctacatacccttgaatgccaccaggtttgatcaggtatagcgatttgcgggactgagtctttcgtcgagggtcattgctgcccgctgcaccagcgcgcgacgatgatgtcgttgttcgtctcagcttcgggaacagctcctcttgcgcttgcgagccagatacatgagaggccccaataagggtgtcattatgttcattcgccggaatacccacgtccaagaatccgtcaatgacgtagtagaggcctggatggcgctcacccttttccactaaaaccgagccttggggaaagtaaactacttcaatgtcatgtcggaggtcttcccgtaggttgatgacaggcgaagtcccccctgcacttgtcactgacatggaggacatcatggattcagtttcgccgtcacctgacgcttcatagggatcgatgaagccaaaggcattggagaacacagccttctggcggcggttatcgtaggagagtagtctcggcgacgcatcaccagaatggctgctcttgcgcagagcatcgcgtgtgccttcggtgagcccaatgcccttcatgatacagtccaggatcgactcgcggaaaatagcgtcctcgtcaactgactcttttagctggaaagtcgagggtagaccattcattgcagctgtggatacaaattgaggttgctcccgctcagtaagaggagtctggaggcgaggtgccaaattttcatgtcgcggtccaaaccgggacaattgtattgtcgatagcaaatcaccggggctaacacttgccgagtccctgtcaatgaatggtgacgacctttgttggctatggagtgtgaggggacgctcacttgacacctttgcttgtaaaaaggcttcttttctgagagtactgctcgagcgtcctctacggcccacagaaggattgtgaagagcaatgccttttccgatttcctctggtcccaatcgatctcgctctcgtgtgaacttgtccttcagacgatccaaggcactccctcgaagattattcggaaggtcccaagaggtgaatttagacatttgccgctctatgcctaaaacctcgctagtcaggcccagataagaatgcgctgtagcaaacgttacccgctggagacgtgtcaggataacctggacaatgtgtgacgttgcccgtgggtagactctggtcaggcggcggaatgcgctggcagggatgatagcaatcgtcgtgtctactgtagctcgtgccacaatatctgggtgtaccgacttgcggctttttttctgggcattgtgtttagtctccgaatgtggggaatgtctgtggttctgccggggcatggtatggctctctccgagattcagcggaggcactggtggcaatatattgccagatccaagggatgcagtgttcaaattcccggcctctctcacggtggacccgggactgacagcaaaggtatcaggcacatgagtctggccaaggctaggactggatatactggagctgtgacttcgggagttacgaagctcaatgtcttcggtaaacagctggagaatagagaataaagacgacattgaagcgccgttcttgacttcagtgaggagctgatagccctgtcggttgtgaatgttccggtcctcctcgtctgaagaggcatcatcgtccatatagatattctctcgcgaacctgacttcccttcgcgtgctgatttcacgaagatctggaccagcccatccacaaccatgcagaagcccttctcctcctccagcatgagcgtctctcccgcaatcagcttcctagtttgcatcgtccgggtaagttcgtggaacacgggccgttcaaggtacccaaagactttgatagcactgaggaattcatccagatagttggcaagtcctggtttcgagtccccttcctggatatcagggaacaaatcgacctgggcttctttgcgttgaggctccgggggcaggcgactgtacgtgttcaggtaccggtaacggatgaaccagctgagggtcgatacaatggcaaggaagattaacattctaagggtcatgaatggtcagcaacggtcaagaatgaagttagcaagaccaagacctacatggtggtgaaattcatagtgaacgtcaagctcatagagaaaagcgtaaagagccatgtggggagtgtaattgtcgcgaatgtgattatcgagtagagaaggcttgggagggtgtgaaatactagggtaaacacccatccgatccaccccatcatggttaagggagctggaggggactgcgggggttgagagaaataggcgctagaagcgagggaattaattgaggttgaagttgcagccgttaggctgagggcgagggacggggccaggccagccatgttaaacacatgcaagattggagagctccgctttgtgttccacctgggcaggtttgaggtcgagactaactcagattgacctagaccaattcggagttgaacccaaccgtgggcccattaggccagaagattgaaagcatcgtactttatacagagtgaagtggtaggtgggatatggatgggaggggagagggaggttcctagttcccaagtcacctgctttacgtttaaaggcggaatgtgagattcgcatttgtatcagtttatgatttcaactcatgataatattctgttagcctattctgttccaattaatattctaatgttattattttatgatcctatgatcctatgatcctatgattccaaaatatcccggttataacaggccaatccacagtgatgtaattgtttacaacatcaggccttacacacgcaggtaacaacacaacttcaatttgatatatgttgatacttggaatgcgagcagatctgaaacataaaatgtataaattagagaagttgtagatcccattggtgtgttctacatagccctttcacgcaagctgtacagcaaatatatatgcaacgttacagtctcaaacccccgatacaactagaaataagaacaagctaaataaaaagcactgggcttagttcgactgcgaataaaaatacatagattaataaaaaaatatactaatcttcatgaattcaagtctccaacatggcaaaaaaagtaaagacagcccaagttgaccttccacatggcaagtttccgccttggctacgcttccaaccttggaaaccaatgctccccctcacttccttttgcggattgctattcttcttgtttttggtaaatacccttgccagtggtcttgcgtttctagattctgttgtcgtctgggttctcagaaccgcggcaatgtttcaggtacctattcgccctttcgatgatgtgtgcgccttgtgttctcactaacaccgtcacagcgcctccgcgacgccatcgactctcgcattgcagaggaacaagcacgtcaaaagtccgcccaagataacatcgaacgctccaattccgctcgccgtccgcccggacgtaaccagtccccgagtcggcgcgcccgtcctagacgcaacaccggtacccccgttcgagggcccgaccccaaggagttcgaagctgaattcaccatcggtgacgatgaatccatcaggtccggtactccccgagcagatacaccagagcctgcttcggaagtaagcgcccctaacgagggagagagccaaatggccgaaggcaaaccggcggagacgcccgagaaagagacaggagagacggagaccaaggaggcacctgctgtgcttccacctgatgttcgcgcgaaattgcggcgacttgataagctggagtcccgataccatggtatgtacctgcctgactagactacagggcacacgactaactgaacgtattagaattgctcaaggcttaccgtaccgcccactcgcgagtcctatccattgaacccttcgaagctgctttgcgcgagaacacccccctcacctcgattggcgaacccaaagctttcacggaatacctcaaccaatcaaccctgaaaagcgatatggtcatggatgagctgaagcgcgtcaccgaagaaagagaagacttcaggaagaagtttgaagaagcgcagcaggctaccaaggaggctttggatgagcttactggcctcaaaaaggagaaaccccagacggagacacccatagggacagacggaacaggggaacaagctagtgaagagttcttttcgtttgataatgaagttccccgattggaaggcgaacttaaggagaagaaagaagaggttgagaacctcaaaaccgaggtcgaaaagctcaagcgcgatatgtctgtcacccgcgagtcgaccgaaggtatggtgcagaatttggagacagccacccgcgagctcgtcgagctgcgggaaaccaaggacaatctagatgctgagatcaagactctacaaacctctaagaaggccgatgtcgatgacctcaaggcgaagctagcaactgcggaatcctctctcaaatcaaccacattggaggtcgagaagttcaagtcgcagctcaaggagaagagcgaggaaatcgataagctccagaaacaagcctccgaaagaaccgagtctgattcgaccctcgctgctgagttggagacgaccaaagaggaaaagaaatccgacgagaaaaagctcgttgtgctccagggcttagttgacagtctccgatctcagcttaaggataccgaatctaccgtgttacaattgaagactgagatcgacgagaggtgcgaacattctgccaaactacaagacatttttgatcttgtggatgagaacttgaaagagaacaaggcgtgggtatctaccaaggagaaggttttcgttggagagttggccgacttcaatgaggttatcaagaccctggtgccggtcaaggaagagcccaattctactgtctctgctcctgtcactaccgaaggagagacacaacctgctcaagctactggtggtggcagcagtggaggaaagaagaagaacaataagaagaagaagaagggtggtaaagctgaggaaccttctaagtcgactgatgcagcccctgcagagcaaccgcccccagaggcgccttccacagctaccaaagagctggatgaactcaagcaaaagatcgaatctctcaccctgcaattatccgaaaaggaggccgctatcgaccgtctcagttccaagctaaaaagcgaggacaatctgaaggaagaaattgagtccctgcgcgatgaccttatcaatatcggccaggggcatgtggcagcgaaggacaagatcaaggatctttcagaagaaaggacctctcttcaagaaaccatcagcaagctcgagaaagaattggcggaactccgcaccagcaacgcttcgacctcagctgattcggcgaaggtgcatacttcactcaaagaggaattcgataacctcaaggtccactctgttaccttggagaccgatctttctgccgctcagcagctggctgctactcggttcaaagaccttacagacctccgtgaaactcttcagaaggttcagcccgagctgcgcagcctacgtgctgagtcttcggagttgaagaccctaaaggagaccctcgccagcaagaattccgacctgaaggtcctcgaaggcaagcatgaggatctgtgcgctgagctgaagacatttaagtcgagaatctcagagcgtgacgcagaagtgggcaccctcactaagaagatccgacaggagaccgacagccgattgaaggcggaggagtatcttactgttgtccaatccaatctacgctctgctgagggcaaaaagcaagatgccatcaatgccagagacagaactgctgccgaactctccaagacccaggacggtttgaagaatactcgcgccaagatgcgggagatggatgaacatatatctcagctgaataaggagctcggaagcctccgagaagagatccagctaaagacagctcagtacactagtgcccagagcttgatgaacagtatgcgtgatcagacgacggaagttgcaatgcaaatgaaggaggctcgtgagcgatgcgagagcttggatgaagaattggccgacgcccaccgtctgctgagcgaacgaacccgcgaaggcgagaccatgcgccgtctgctcaatgatatcgagggtcgttcagaggctaaggtgcgagacttcaaggaacgcatggaggctgctgtcgaagagcgagaccgtgccgaagatgaagccagcactcaaggtcgacgccgtgctcgcgagatggaagaactcaaggctaaggtccgtgaagccgagcgcgccctgcgcacggtggaacaggacaaggaggagcttgaacaatcccaaaaggactggcgccgccgtcgtgacgagctcgagtcagtatctgagaagtcatcacaggaagtggcagagattcgacaggccatggccggtctacgcgatgctctcgacgaaagtgagaagcaagttcgcgacctcgaaaaggacaaggcagagcttcgtcgttcagtggaagagacaaacagccgactggagaagctccgaagatcccacaagacgctaggagaggacgtccgcctacgtggctccccgtccggtcgaccatcctcgcgatcatctacggattcaggctctcgtcgggccgtcgtatctcctggcagaagcgagactcctcttggaccacccagtaatgcatctattgactacatgtacttgaagaatgtccttctccaatttttggaacagagggacaagaactatcagaagcagctaatccctgttctaggaatgctgctccatttcgatcggtgagttttttactgaaccttctctttacaatggtcactaacaaacatagaaacgatgagcaaaagtggatgtcggccatcatgtccaaataattggcgtttatacccatgggcgttgattgctatctgagtcccctgctctgtacaatatcattctgtagagataataatatgtttccgctatcagaccatacccctttgcctatgaagacaacgttcagatatccttatccaacatctagttagaagagctcggtaatattacctaatccggtatagtaaaatcctggggttatcgcgaagcttcgccaaaacaagcgacgcgcatatactagcgagtacaaaagtccgagagaagcaaataaaaaacagctaagctctgtaattcgtcatggattatcttcgtcctctttccaacgccatggccgaccaacccaccattcgtctcgcgacgcccgagggcaagtgcattgaccccaaagcttctgagtagctccccaattaacatcaactagatgtccccttgatcctccaattcatctgtgaactagccgactatgaaaaagccctccatgaagttgaagctaccgaagaatccctcctagcaactctctccttccctggtaccccgcccaggcgcggggcggtctatacagctctcattaccccgccggctactgccgacacaccgaacccgatccccgtcggcatggccttgtacttttacaactactcaacctggagatctgcccccggtatctacctcgaggatctgtatgtgcagcctagcgcgcggggtaacgggtacggcttcaagttgctcaagtaccttgccaagcaggtgctggaggcatcgggtcggcgattggagtggagcgtgctcacgtggaacgagcctagtattaggttctatgagcaggttggtgcgcgcggtatggacgagtggatgaagatgatggttgaaggggatgcgttgactcgtttggcggaggatgtgtagagggatgcatgggtgctaggcgggatagggctgggttgtcttttttttatactacgaaaggcactgggaacggatcagagtggtttatttatattgtagaagctcattgcagatcgagaacaaaagtgggctggttatgcgtgcatgtttagcaaatatctatgatcacagctacatatggctcaatgtcatattttcgaaaaaagaaatttatatcgaagtattagaatccaaatctcacgtcattgatgtaattgaatacaaataacatccaagttgggctgtgaggtagatctaggggcgaagccttttagcgccaggtgacggcattgacccgcagatcgcctcgatttgccctgttccactttctcttcttccttcaacaccctcagcgatggcgacaactccagagaatgcccaggagtataacttccatgtggactatgttatccattacagcttcggagacgtaggtgagtaaaagagagctctagcatgtgtcgcggggcacattctaacaattgcagaccgatcgcaggcaattgagcagctcgaaaaattgctccaagcactggccctagttggtttacaggttgaggtacgacagggtgatgagtcgtctctgctcgtctttgctcgagcttcggaaaaccggctgaaacgggcggtctaccggtcgcggtgagtgatgatgcatgtcgttctatgccaatgtgctaatctcgactttgaatatccacagagtacgcgactggctatatggcattcgcaatgatgagcccacaccttccaactcgaccgagccgcagaccgaggctgagcgcctgcgagtgatccaccagatgattacacttcccaaggaagagggcggtgccgccattacccccaagtatggcgactggaagaatgtcactgctatattccccattcatgatgtcgatacaaataaaaagtggatacgagactggagctcaaagactttcctctccgatgacgacttggatcagatccggaacaagtttggagaaagtgtatgtacagcgaagttgttcttctttgtcctggctaacatatgaggcaggttggattttacttctcgttcctacagtgttacttccgatttttgattttcccagcagtcttcggattctcctgttggttcctgctcggcggatattcgattatttatactgtcgtcaattgtctttggtgtatcatctttgtggaatactggaagcgccaggaagttgatttgagctgcagatggcaaaccaagaacgtctcagctgttcggaccaagcgacgagagttcaaggcagaaacagaggcctacgatgagggtaccggtgagatgcgcggtgtcttcccggcaactaagcgcatgcaacgacagctacttcaaatcccgttcgccttgcttgcagcaattgctttaggtgctatcatagcgacttgctttgccattgagatcttcatctcagagctctacaatggtcctttgaagacatacttggtatggtgatccttcccatttcctgtgaccaaagcttacccttcagattttcatcccaaccatccttgtgtcagcgcttgtgccaaccatgagcgccatcttgacgtctatcgcaacgaaacttaatgattacgagaaccatgagacaagtgacgcctatgatgttgcattgacccagaaggtctttgttatcaacttcatcacgtcttacatgccaatttttctgacggcctttgtttacgtgccctttgctagccgaattgtcccctacctcgatgtcttccgcttgacagttcggcctttcgtgtcgaaggaacatgccatctcaaagcgatcgaatttccaaatcgacccagctcgcctgcgaaaccaggtcgtctacttcactgtcacggctcagattgttggttttgcaatggaaactattgtgccgtatatcaaacagcatgcactccgcaaatacaaaaagtacaacaaggagcgcaatggtaagatgaacggaaacggcgacaaagaatcgcctgaaagacccgtcgtgtctttcgatgatccggtcgatgaagtgcagttcctcacgcgtgtgcgcaacgaggtcgagcttcccgagtacgatgtgaccgatgatctacgtgagatgtgtattcaatttggatacctggcccttttctcacccacatggccgcttgttcccctttcgttctttgtgaacaactggattgagttgcgatccgatttctttaagatttgcatggagttccgcaggcctgtcccatcgcggactgacacgattggaccttggctcgatagtctgggattcctatcttgggtcggtagtatcaccagtgctgcactgctgtacatgttcagtggcaacacgcagcacgggcccaatggtgagccgacagatatcaaaggctgggccctgcttttgacaatcttcttttccgagcacctgtatcttattgtgcggtatgctgtgcgggctggtatggctaggattgagccccccaattcccgcaaagagcgggctgatcgttacctcatgcgcaaacgctaccttcagtcgacaaccaatgcggaggtggacgagaaaaacgatgaggatgatatcacatatatggttcagccaactgacgtctcacgcacgtctcttgaagatgatgctcggcgtgcgtcctcgcatggcgccgacccggacaaccgtttctggttgcaccagcggggctggatggagtcggcgaagatcggagctgggatcatacaggcacagcctagcaacgatagcgcgaagaagcaacaatagtgcttcggagttggacagagtcaggatgtggaggcaggggcttgagaggcctatgttatggggtgggatacgagatcacgagactatatacgttcaacttagtacgcgatgtgcaggtacatagtaattaccgatatacgttcgatctactttttaagctgtcctaaatggaatgattgtccagtggctggtgcctcaggcagaaatgtcggagtacgtggtgactatgatgtcatgttgacttggtcggaaacaagtaaacccgttccgataccggatatgggcggcatgtggtcagcagtagaacgaatcgtcgacatgtccatgggtacgacgagatcatgcaattggatgaatgtgacgagctacatagtacatatcatgaggttgttgttaaacccaatcatagccaacatgtggtatcaaaaccagtttagcggcaaaaaagtgtcgagataaactctggggtaggagccaccgcctcactcaccgcctactcaatgcgacatcttcgcttaccaactccttacataaatcgacgatcgccccaaatcctctgactcagaatccttaagtaatcctcctcctcctccagggcccgccatcaacttgcttacagcatcggatctgtaactgcttacctcattttagctgtattttgtgttcagcaaagcagctctctttgctctcaattcttttggaaactaaagtgccgtgcaaagtcactgcccaataccctctcgaatcccctttctgcttaatcaatgcaacctgcactggcgccagcgccgcatccaagcatgcagacttctgctcaggtaagcaggtcatcttgaacgcgtttgtcatcagatctatatgacttcctcgatgctttggatacaagacacttatgtcgcgttaccaaaatgtcgggacgacgtttcgacgcgtcgggtctccctgcagtcttgccacgtcaccttggtgcttcgttttgttatttgctactgtccatgctaacatatgactgtaggaccatgcggatcagggtacgtgattatagtttagagctttattgatgtttaattgccattacttttgggggattcaaggattcgcggttttctgggttgaaaataccctaccccgatcttctacttcatctcacctaggaaaattagggctgcgcgtcgcacatgattgttccccattgctgacatgatcttatagtcctccatgaccagcttttggctgctcagcaccacctaggcggtcgtccgcagggtgctccaggccaacaacaacacttgcaacccaacaatgctagcccgcgcgaccagccaaacattgaccctgccatctcgggtgccatgctcggcgctccccaaactcccacccaaccccagggctctcccccatctgacggcggctccaagagctatgggaagcgtgagctgtccacttctaagcgtgctgcccagaaccgtgccgctcaggtatgtcctttagatatcgtacacagagtactctgctaatcatcagaatagcgcgcattccgccagcgcaaggaaacctacattcgcaaactcgaggaagaagtgaagaacatcgaccccctcaaggagcaggtcaagtccctggtgggcgagaactaccagctgcgtgaatatatcatcaacttgcaatcgcgtcttctcgaagcccagggtgaagtccccgagctgcctgccaacatagatttgagccagcctcgcaccactgagatggcgcttgcttctgccggaattcagaactctagccctccagggtcggtgcccaccccgggtgcacaaggccagcactcttctgtctccgatgacatgaactctctgaaccgcatcgctgcggcaactcttggaatgcgtaagcaccctgatgacacggccttcctcaacaacaacagcttccagcagaataagcgggtgcgcacagatgatagccaggacggaaatgacggcgtgaacaagcaggagattccgcacggtcttcctatggtcaactgatcgccatgccgttttaatgcgtcttgattgcctacgttctgcgatcacctttcgatacccgcgtctgtgtcttttgtttgcttctgtcttattcagcttcggtgttacgttatgcttgacgacgacacttgccatatttctatctcgcctgttctgctggatctcctgtgcctttctactttaccgttatgtcacgtcccccctttgcgtaacggtgtgtggcgcagcgagtgattccatcctcttgatttcgaatacgtgattgggtggtgttttgagatttgttaccttcattgtggcagattgatggggagtttattattattaccgcatttgtttcatacttcaatttgatctatctgcttaattgcttaatggatggtcacaagacgcggatacccatacctaccccagcggactttcgctgcctcgtgggcgatttctatagcactcctttgatgaggactttataatgtcgcccagcgtcaagcttgctgggcaacttagtccggtctgaggcttttgagctgctccgtgctatcgggtttatgtgggctgtactccgtagtatactaatattcttcggcgttttcaggccttgtctaaattaattctttggaatgaagtgaataatcatacccatagactagagatttagtgacacctttatggagagatgagatccgatattaaggtaatcaaagcgagaggtgtggctacatgtccgttctcacaggcgaagaagtcggttcacttccagtaaatccgttcacttatatatacacttatacatgatccgtgaatctactgcaaaaagcatgacagcattggcctcatacgatatgtagtacttgtatacttttagtgcttcgaacaccttcagtctgggagaagtctagttggatatttcactgcgaaaaactgtcatgcttatctatttgtgtccctgcgttggatatgaattctcgtggccagtccagattattgaacaaccttgtcttaccaataccgtagtatctatcacttactgtttatcgaggccatattccttgataaggatatcagcacaagtaataccagtcacgtaagcagtagcctgggtgtggttattagtgaggacaggaacaacactcatatcagcaacgcggaggttctccatgccccgaacacggaaacgcgtgtcaacagcagcatcactggcaccagtcttgcccatcttcaccgtgccagtcatgtgccagctggaacagagcgtgttcttccagaactcgaggatgtcctcgtcggaatcagacgcaggccccatcagcgttgagatagtgtccttcgcaaagcactcctgtctactgacatcgagcaggtgccgataaatttcgatacaagcgcgacgatcgtatggatgtccgaggaaccgcgggtcgaacagcagcgggacgtctgggtcagaggactgcaggtgcacttcgccgcgggattgttcgtttatcatgaatgctacaagacagctatagctgtaatctttgaacatttcgggcttcatgcaatggaggggcatgtgggtggctatctcgtagtgggggatggtttcgcggttcaggaactcttgcacggatgttggaagcgctttgaattcgggcgaggcggtgatacggtctgatttaaaccagccggtgccgatctggcagcagtatcggttccataggccggtgttgtcgtgaagccactctttcattgcagcctccatggcggcgggatctttgaagaaggaattgcggtcatttgtctcagggttacgggcaagaaccagaggaaccaagtagtggtctcggagaccctggccaatggcgggcagatcgttgaccactgaaatgttgaacttctcaagctctttagccggtccgattccagagtgcattagaatctttggggtgtcgagtgtgcctgcagaaagaatcacatctcgagaagcgaagtctgtaatccatgtcagacgaagtgcatagtaagagttcagaataaaatatacactttgtgccctgagcctctactccaacggcctttttgccttccaacaagacccgctgtactgggctgtctgtgacaacgacaagattatgaggaacattttcaaacatatcaacagccgtggtacgctctcccttccaagcagaattgattgttgcagccatgccaaggggattgccggagttgtgatccaagttgagcttgtgtccagccgcttcgaatgcatccagcgtgggtgccaagtccctttcccaatcctgggcatacccgacgcgcaagggacccgagtggccgtggtcggaagcaaccgaacggacatatttctgattttttggaagtacacgaccatcgaaggtctccaaattcttgtagcggatatgcatctccttccatccgaaggtatcgtcatccacctcagatgcccactcatcgtagtcatcccgcgcgcctatagcaaagaccccgaagttgattgccgagctacctcccagaccctttccacgggaatagtcgccatcgtgcccattgcaatattcctgtggtgtggtcctgtacccccagttcatgcttggttccctcaatgtcgtccaacgctttccattcactcgcaaagctttgtcatcattgcgcccacctgcttcaagaagtagaactttaggtctttgggctgatttggcgagccccgcagccacggtgcaaccagctgggccacctgttcaatgatgagcatgagagattgcaggtgtgtatagtgcacgattacctccgacgatgacaaagtcgtatgtgtttttagattccatgttgaaggtagctttctagagtcaagaatttgtcaagagcaatcgtgaagaacctatttagatggggtcagtggcaacacgtcaagtatatgtcatatcttctttctggcatgtttatgccattattccgtctttgcgtgcattaacagtaagccaacatgtgaaaaatagtacagcgtattaccactaggccacaataattggtcttggtctaaaggcggctatatctgttctgtttcttgtctgacaccacacactcaacatgacgggttgtactcggtacaccttggaagaacccaacaatagatggggcaaggaaatatacacccccaggtttaagagggctagcgtcgagactgcaatcctcacaggatattgcatttgtttatttacgacacggctaaatgggcccttgagtccaggaggttcgttagtcaggtcaattttgcaggggttgtaaatgtagatcctatggcgaaggatgcatagcaaattgaggctaattcattagtgtaacaccagaacaaggctgcaacatggtattaaccaagggcatttaaacaaactctttgtcgcacagcatggctcgaatggtaatcaccgggatcaaatccatggtattgattctcgaatccagtacctttcaacacttgcactgttgcgaagtctgcagcaagcccgatttcacgttgctaaaagatagtataaagtgtcgcaagatatcccaaaatagaaaacaataagactcaagccggggatccacattaactaggatatcgattttcccaaagctaggaggtttcgcttgaaagtgagcagtcgtttcttcagacaaagcaagtcatatcggacgcgtaacataggcccgtgcggttatatctgcaacgggaagatctgacgggccgaagacgcatacgcatattgtgcgctctgcgcgctgtgcatacgaaatatcctttcatgccgattgaaccatggagtatgagtattactagttacggagtacgaggaaaatcaggtttaagtcatcaatgtcacgagaccgtagaccgacgcgcacggtccctcatgttgttttgggtctggatcctccgcaagaaaactgaccaatcgcagctgagagcctccttccccactccagtagtcgcggaggttagcgcaaagaagattcgtcctcggcaattgagacatgtcggttccttatggagggcgaaagtatattgtacatactccggatatagacggcgccactctagccacccgagccactcgagccacctgaggttgttaatttcaatggggaagaaaaagagagtagaccaaaagctgagatttgaaatcggaaatgatcgtctagttctattgtgtagatcccatttaattcccagtcactaaaattggaacgaaaaagcccaaaagttcacgtgtggcggttccaagggttccctttctcggcttagcttggcataggggcaaacctttatgctggggatagctctggagttttctttcctcctgtctactcatactattctcattattataatataacggcattgctggacgttcgcttagcttcaatttccgccttgagtcttcgacctcgtcatcggaaacttctttgaaacttccaagttacatccgccattcttcggcaaacgaaatcgcgatcagagcctcccacagatctcaatctcctcaggcccaaaccctcgatccctttcattcggcattgacctcgttggcgcaaatggtctgctcggactagcaaaactatgatggctataccggggttctcaccaagcggggcatgaaacattttctggtctttccaataccaacattgaatatatctcccacccaggctggttgagtcggcgaccatgacagacctatcacaataccccgacggcctgcatggttaccgtagccataaattggcggtgcggacattgatgattgtctttacctccatcgcattctataacgccatcgaattgctcatattgttatttttcaccttcactcgttatcgcggactctacttttggacgcttttgctctcggtagtcctcggagtgatccctcacgccgttggccatctcctcgcgtttttttcactggccccattatggctctcgttgactctctccactattggcttctacgtcatggtcccaggtcaatcgctggtgctatactctcgccttcatttggtggtcaataacaacaacgtgcttcggtttgttctttggctgattatcatcgacgcgatcattctcttgatcccaacgactattcttacctactctaccgcacacattgcaaatccggcaattattcggggatacaatgtcatggagcggatgcaactggcctggttctgcgcccaagagattgtcatttcgggaatttacatcatcgagaccgcgaagctactcagaatgatgccagacaaggaccggcgccggtccagaatcctatatgagttgctggctatcaatttcgtcattatattgctcgatatttgtttactcctcgtggaatacattgggttttactcgttacagaccactttgaaggccatggtttacagcatcaagttgaagctcgagttcggtgtgctcggaaagctagtcgatcttgtgcacaatcatcgatcgcaacccacttcgtccgaacacgaagaataccctggcttcgtcgatccttcccagattacaacggatgtcacccatgcagccccacgggaattgcgaccggggggacggagaggctggaatacaatatctgtggagagcttgcccaattctgagcgcgacactcgtccatctacccagtcgactggcaagagcctgcatccatcttgaggttggactagtgatcaattgtctaccactcagaccaatggtcgaaataaaacgaaatcaagcaggagcaggccgtggttgcttactccaaccgcctttctgcttttacgtatggcgatgggtgatggtatcttcgtttgcttttcacaagaaaagtacctcgacaaatcttcgaaagcaacccatgatcccgcccattggaattaaaattccctggtttcatcacgcttgcgcagcgagccgttttcgcacctccggcgcatcaatcaaatgcccatcgttccttacatcccagcgagattcgaacagccttgctgtcaattcctactgaatgtacgatatacctgtctatccaaaattcctccaggtccaccataggcctgcattgtttatatgtgccagatttatattggcaacaataattatttaacgccacgtccacgatttgttgattttcagccttatgatgtaattacttcaatgaaatattacgtcgccatgacatctcatcagacaccaaaaccagttggcaaatttttaaatttagacaaaagcgtctctttgtagtcaatgcagcatggaaaccaccgtctcgatttaccacggcccgtacgagtccatccctgacaacgcttcaccaggccttaaatttctaaaacgattcctaccagcactagactccctaacccccggcgaaaatgtgatcagccctttcttcacatccagcgcccccatcctcatcgccagcgatccaccaacaaccgcaagccaagcagtccctatcctcgaagtgcgcagccgacatacctccaaattccaccaccatgttgatctcgcctgggatatagaccttcgaggtgacacaggccccatcaatacgtcgtacagcaggactgctccaaacgcggacgccgcccaaaaaggacagctctatgctccgctagtagggaacatacagatgaagcgcacggttatgtttgaagcgacatcggaaacaaccttcagggaggatcccgaccagttcgcagttcgagtccgtgagttcaacatcctcgacttggaaggccgcgacgagtcggatctgcagattgttgagatgcgtatctttttggaccagagacctctccaggctcattctgcgagtctattcacgggctccggctattccggatcttaggctggagtactccgtatacgtagattggataaatgtaatgaaatttcatggatcgatgtgcttggcttctccactgcggaatcatctactaagccccaagttgaaccaacccccgcgcccccacttggaatgcttccatgtctttcttatctttggagatcatattcggcaagggattcctttcctggcggctttttgcctctttgccttataaggttgcattgcccagtgccggaagttgtagacgattcaaaaattttcacgagttaacaagacaagatgttggcagcacagaaacaagcagagatcatccacaatgtctctggggctttggataagtatgaatccaagctcagtgagatcaatctgaaggcgtgtatgatataggcaagcatattaaggctttattaacgatctatagatctggtccaaccccgaactttcattcagagagtatagcgcccacgacaacatctgcgaacttttcgagtcactcggggatggatacaaggttaacagaaaagcgtatggaattgaaacggcatttgaagtgatccatagccacggccagggtggacgtaccgttgccttcaacgcagaatacgatgcccttcccggcatgggacatgcatgcggacacaatctgatcgctacaagttcgatcgcggctttcctggccacgtgcgaaacaatgcgtagtctgtactccgatggaattggctattcggttcggcttctggggactccagccgaagagggtggtggtggaaagctgctcctcatcgacgcgggagcatacaaagatgtggacgcgtgcttcatggtgcatccattccccgtgcttcccggcgcctctgatcttctaagcgcgagttgctgcaccgggctgtatcttgcaaacgacaaggtgaaggtgacgttcacgggcaagccggcgcatgcgtcggctgctccgtggaagggtatcaatgcgctagatgctgtggtgtctgcgtatgtgaacatttcaatgctgcgacagcagatcttgccgacgcaaaagattcatggggttatttcgcgaggcggtgatagaccgaatgttattcctgcctctgcgacggttgaatactatattcgatcggagactgcgaagacattgaaaccattgaccgagagggtgctgaaatgctttgaggctgctgcgattgctactggctgcacggtggaatacgaatggtatgagaattggcgatggtctattttgatacgcttcgctaacgcatctgtcagggaggcctcgtacaaggacatgaagagcaataagcccatctgtgacagctacgtctctgctatgaatgctatgggccacaaaactatcttcgatgccgcgcagcaggcaggggggcttagtggagggtcaaccgatatgggtgagtgttccagatcctcacagtttgacctgaggctgagccactccaatctaggcaacgtttcatacgaagtacctggcttccacggtggattcttcattcacgccgatggagttaaccatacgccgcaatttaccgccggagccggatccgaggatgggttcaagcgtagtttgcaatgtgcagcggggatggctgtggtggcgtgtagagccttggtcgatgcaagtttcgccactgccatcaagtcggactttgagaagagtctggaattgtaaatactagcttgcatttagcgttctctcgtatttcttgtgggatctttcgaaattcaagtacaagggtatgacccgtgctcattgacaacttaccctatttgtacaatgacgattcggcaattgtcgcagatagagtgtgtgccgatcgacagtggatacaactgccggacttggcctccactgagggggaagcggatgttcccccaaattgcctccgtcatgactttgacaccatgaaagtggggtgccgaggaagatttattcttcgcggattaacttcgcggggaaattccggtaacctcttaccaacgccgagaccgactgcaagtgtataaaatcctcctttggtgtgagaagtgttgcaatctcggttgcgatcggtcaccgtcggccatcagccacgggcacagggcttgatgctgccggctgagtcttccctaatccgtcgatagtcttggctgatcccatacttcttttgaatctatccaaacccccggaaatggatccaacgcgattcgcccataatgtacctgttctatttctgtatcgctatgcgaggagagaactgcatcgactagccgataattcgtattctaaacatccacaggcctggcgaatgtgataccggtggttcgtttgcctctcactaaacccgtggacgctccgatggcttgagaaaacaaagagaaccgctcgtgtccgtccactgtcactttatctcgcacttcatttcattttttgtttattattcccttcctctgtgcatgttctggacctcggcgaacaccgaccctattttccccctctttcgaataattccccctatcagatatccaagaggcggtcatagctttgacggatatgacgagtctctttgttatagctgcatgatctgttttctatatgcagaagcccggtgcacgtgttggatctgttggtctttttttcctctgggaagttgtcctgctttcattggaaaaatatgcaaatctttcgtcgactcgatgtatcattatgactgcgcacaaacttttcaaaacacagacattaatagaaagtaacacatataacaataaaaacaagcatgtctatagcgacaggggtataaaatgaaaaaagctggccgcccagtgatgattcgactatagccagtcgaagttcatcttgcagtatacatcacgtatggaaaattatgtccctaacaagttattaacatctgttcttacttcgggcgctcgattaatgccatttcaatcgaagactgcgtatcggatgagggcagccgaggccgagcatttgcccgtgactcaacaatgtccatagttgacattgtctggcgcatggcctcgtgaaaatcgtagattccgctgcgcgctgaatgctgttccgggctcgccgttctcccagcagtgccagcactggagctagcttgcgcctcagtatcctgtgacgggagactgtttgcgagcatgtcgaagagattgatgtcggtcgaacgacgagcattgccattagccccttggcaaaaggcgcatgggtaagtgcgtgtcagctcgcggagctgcgtaagggcgtggaattcgagtttcagcttgatactgtaggcgactgtcttgaagctgatgacgatgtagtgcactttgtactcggcgaggaggatcaatacgttgagcaggatgccgaagagattaacgaagagtattcggtagatgattcttcggccctgcggtccttttgattcgaagacgggcttgagcgctcggagtgcctcgcggacgtagatggcacagattattgtatcttggatggcgaatccggttgcctgtaaacgatcgtagattcccgatacggggccgcatggtatattgccaacgttgagaccgaaaaggacggccatgggaatatggaggatgaagaaattggttatgatcatccataatacccatcgtacatggcggatatcggccacgacgaggtgcagtctggaatatagcacgagcgcttgtccagtcaccatgcagatccagcccaccataaaagggactgacatggcaatggcagaggcttgttgtgtatagcgaatttgagctggtatggcatgtaacaatatcccccaggccgcgacttgcatgctccagaagtatagcccgcgatactttttgaacctttcgaatatgcaaatcacaacttccaacgagttccacgctccgatcgagaacatagctatgacctggacgatcgtgaagttggtatttaaaatgaggctcacctccacagggaggttgctcattgaggtgtccatagcgtgtgaatcggtttggccatgtggataaatcagccggcgggaaagaaaaaatatatattggtcacagctcggacaaatgccccatctagctgacatacaccattataatggagacttccctcgagcgcctcatcctgggccacggggtgggacgggataaggttgactgctggtgtagaaggtggatcatgtcactggcgagtcatgcccttcgcataaatgagagagaaagcaccaatgcagtctatgatgctagcccacggggatctggggcagatgttccggttcattagacagtcaatgaaattctgaatgggctattggtagcaatgatatgaagatcccagttttccctcccccttaatcatgttggttggagagcttattggacacagcaaacgaagggacaaaagtcgagaggctatcggcgcgccaaacagggattctcgggatctcaaacaaagaaacccagccagaagtcgtgcactgatcacatttctttcgctagtggcgcaccgaaatgggagcccagacctcccatcgaggcattcaggcattggtaatgacgattgaatgaagagatatggagtactccatacggagtagagaggaagagaagaagagaagaatagggatggattgacgtcgacgttgaggcttggcgcccgttggactcggagctctcctgacaagaagtggccagagcggagtactttgtgcacaatgaagtgttgtctttgaagtaatccgtattcgtatagaaatataacaataagcatggagtatagattgaccgcttcaatattcaacgtatccaatatatacagatcggtgaaaggtgacacgtacatggaacttatccaaaagctcaagcgctgtgctacgaagaagagatagtacagagtagagaatgtgtacattaatagattggataccgctaagccatgtaccccttattggacatgtaatttgaaaaatcgtgtcatgtcaaatccctcctgaatccctttgaatttatttccgatcaacctccagttctgggtaatcagggagtttccagtccccatccctatcgcttaagaaccgtgacaacagttgcggtatgcgaaggaaacaagctagtcctagaatgagatgcagaagtgaaatttcccattgtgagttggggattgcccatcggagcaatccagtgttgaatggctgaaccaggtcgatgaaaggtcgcattttctgatggtagttttgaaaggcctgggacaaatcttcactgcgagcaagctctccagccaggatatatgccccaaccagaccactacttgtccccattccactcaagggagaaggacagtatgccgcatcccctagaaggacaacccgaccggagtgccaggtatctgtcttgatttggacgacattctggcagaaccagttctctgtagtgtccatcccttcaataaaccgatcggcctgccaccccgcgtcgcgaaacctttcggcccaaaactgtttttgctgcccaactgaacgtttcgggatattccgaagttcttccgagtcagatctaagcgtgaagtagacttgggtttccgcttgattgtggcttctggtcaggatcatccggccgcccgggcagaggtacgacttgcacatattgctgtcagtttcaatccgtggaacaaaccagtacgccatgtgtacaccgagctggtgatattcgttcggggcatcggggggtagaatgtgctttcgaatttgcgagccctgcccgtctgctccaaccagtagatcaaatgtatccgaagagccgtcggaaaaggttgcgactaccccttggtcattttgcgcgaagccatccaccgtttggccgaatatatatttcactttgtcttttgttgcgtcgtaaagtatgcgcacgagatccccgcgcatgatctcatactcggatgtcatagactgtgcacccttgccagacttattggcgaggactttccccctgacattgcccttcgcgtcaatgaaggagacgcctgcttcgtcgacgagcttttcgcgaacggcgtccatgagacccatgcgtttgacggcctcgatgccttgtccgcggaggtcgatctgggcacctgtcgctcttagcactggggaccgttcgacgataacaacttggtgaccatttcggacgagccagaaggccaaagctggacctgcgacacctccgccacaaatgaggactttcagagccattctgtagagattatctaggagagagttagaagaaacaaattctctgtgtaatcagcagtctggatttgaattttaggggtagtaagccggcctcgcacaattcggatataaagggcaattgctccttttcgctgtatataccggtttgtcatagtgggtcatgactctgcatcggaggcatctcataggcaactattttggggctgcggaggcccgtggctgaaaatcaaggaacgggagtttcaccagtacgttgagtatttgaatcatccatagaaaaaaaaccaagaagttaatgcatgatagagctaagtaacactacaaaaaatgatatgtaatcgacaaattattcacaggcgcggacggccggtcacagggaaacaagggatatcataacggtccaaattcataaccttggcccaggcagcaacaaagtccttcttaaacttatcctgggcatcggagctggcgtacagctcagaaagagcacggagctcagcgtggtgaccgaagatcaggtcaacacgggtggcagaccacttcttggcaccggtcttgcggtcgaaaccttcaaactgctcactgtcagcgccggttggcttccagacagtgctcatgtcgagcaaattgacgaaaaagtcgttgctcagctggccagggcgggaggtgaagacaccgtggtttgatccgtcccagttggcgttcagagaacgcagaccaccaaccagaacggtcagttcaggggcggagagggtcagctgctgcgccttgtcgatcaggagctgctcggtgcggacacgacgagtcgagtggccgtagttacggaaaccatcggcgaacggccgcagccagccgaatgactcgacatctgtttgctcctgggtggcatcgttgcggccaggggtgaagggaacgggaatacccgcggatctttcaagggcggcagatccagcaagcacaatcaggtcagctactgagacgcgcttttcgccgttctgggcactgttgaagcggctttggatgttctccaacagactgaggacttcctgcaactgcgctggattgttgacatcccagtccttctggggagcgagacggatgtgggcaccgttcgcacctccacgcttgtcaccaccccggaaggtagaagccgatgcccaggcagtggcaatcaacttggtgggctcaataccggtcgagagaatctcgttcttcagcgcaatgatgtcgccattgtcaatcagagcgtaagtgggagcaggaatgggatcctcccagagagaaacctccttagggatctcaggacccagccagcgagcgcgaggtcccatatcacggtgcagcagcttgaaccacgcacgggcgaatacatcggcgagctcatcagggttcgcaaggaaacgacgggcaatcttctcgtaggcgggatcgaaccgcagagaaagatcagtggtcagcatctgaggcttgtgcttctttgagtcaaaggcattgggaacgatatcgcccgcattcttggcgacccactggttagcaccagcgggactcttggtcaactcccagtcgaacttgaacagatattccaagaagttgttactccacttggtaggagtacttgtccaggtcacctccaatccactggtgatagcattagggcctacaccggagccgtgcttgttgtgccatcccaggccctgtgactcaatgccagcagcttcgggctcgtctccgacattatcagcaggggctgcaccgtgtgtttttccgaaagtatgaccaccagcaatcaacgcgacggtttcttcgtcattcatagccatacgagcgaatgtgatacgaatatctctggcagcagcgacagggtcagggtttccatcaggaccttcggggttgacataaatcaaacccatgacgaccgcggccagcgggtcctcgagatcgcgagttttgatatcgctctgtttagcctcctcctctggggtctcggcctcatagcgagcttcattagtaaaccagacgttctcacttccccagtacaccgactcatcggcttcccagacgtcaggacgacctccagcaaatccaaatgtcttgaaacccatagattccaaggcgacgttgccagttagaaggaaaagatcggcccacgagattttggtaccgtactaagtacaagagttagtattgattgagaaactagaagtatagaagtgtatagttctcaccttctgcttgatgggccaaagcaatcgacgggccttatctggaaatgaaagatacatatcagcatgatatagatgtcaactcaactattaatggaactcaccaagggaaacattatcgggccaagagttcaatggtgcgaaacgctgctggccctggccaccaccaccgcgtccatcgaaaactctgtatgttccagcgctatgccaggccattcggatgaaaagaccaccatagtgaccaaagtcagcgggccagaactcttgagagtcggtcataagggcgtgtagatccttcttgaggccccaataatcaagggtcttgaaagcagcggcataatcaaagtccttattttgaggattggtagcatcagtatgctgacggagaatattcagcttcaaggcattaggccaccagtcagtgttcctagatgagatcagtatgttgaagcggtatatcaaatgtgccgaggcagaatcacgggagaactagggaccataccgggtaccacctccagcaacattgctcttcttgtgcgcaacaggacattcacccatgatggcagttggtatgataaagaaaacgggaaatctgaagagaaagaaaagtgtcgggaacaggatgcccccgcagtttaaatggtacaggctgtggatccaatggcgggtcacgtattaagcagctcccatgtttagtgcagattccctcgatatgctagtttaaagggaaatcatacgaagatgacgtgaatttatctttcttgaatttatcattggccatgcagcgacaaaatccggggcgtgcggggaaagccataacagtccctcacgaagagatcaggaactcattggcggaatgcgccgaagagcgccggattccgattcgacccaatatataatgagctgacaaaatggccatttctagatgctggaggttgtttgtagatatgagaaatgttgaatcggagaatctttgcagtctggccctatgatctgactaatgataattagttggagccgggccctgataatcgcccaccggtctatgttgtatgtacggagtacggagcacggagcacggagcatatactccgaaaatcaatgtatgaccctttttcctttttgattcacatatagaattagtggtctagtagtacataattcgaaattctccttgaacggtccactgatccagagaaatccttgttcggatcatggtttatccgagccaaatagggcggtgtgttccagcttcggaagcgattgcctaatacagactagcgtaaatatacaactctaaccagctctgataaactgcattcatcgtcctattctttgatagctttactcactggctggttagataataatatagcctcacctatctcttgttcttccctttcatatcttctagcaatagaaacctacgtcacgtctatcattcttctctacggcaagctggcagaaacagttcaaacccacccaaacatcaactacataatccgtgatttatcaataaaagtgctctagtattgaatatcctaccaatgaatttaaaagcttaataattgtttgaactatgggccatcactgcaacaggaagctagcaggatgatgcttcacaatgagcgcaatgtctcatacatttcggcaataggaactcacccaagctagcaagattcaagaaataacgggcttggtacccatcctcccacacgagactctcaatcagcaaaacttgtgaatttcttgaagacctctacattggccttcatttcatttcttactggcaaaacgcctgtcgctattagaattgtccatatattccggcacttttccttttttgatatcccctgtgatacacttggaaaggatgtgaccgtctatcagtgtgaggcctagcggtctgatcaggcgttacttactatgggatcaacaagatctatatcgcggctaacgtttgatcagactatagcggccaatcaggcgttagtatcaggaaggtacatgactatacaatggcgtcgccgcgacgatgcgattaatctagtctcttctaggaacctatatgcattcacctcaaacggtcttcttccttttgatcctcttcttattcatcccatcatctacattcacggccttcagccactacttcgttacaatcttttatcatctgctatcatggcagctaatgccaccagccataatggccttcctagtcacttctctttccgccaaggtatttccgtcatcaagatggaactccacatgacacctgaagctgctcagcgctactcggatctgtggaatatgcttgctgctcgccagctgccttctgagcaccttggcctgatcatgaccgtggtgaccctggcaagacttcattcctcctttgccaacaatatagtcgcccgcacccttgtcaggacattcgtcgagtcgaagcaaattgccgggcttcgcgctgcccttcctcgcctgccggacgaacttgcggctgtcattcctaatctctttcaagaatccactcatgccatcacgatgttgccggccatgcctgccgaattctccgagatcttttccctctctgcaaacgatgaaactgccctccgccgggagcttatccacctggaaccgaagttgaagcctgcgatctccatctcggacgatgagttcaacatcattgtcaataatcttcccgacttgccgcctagcatgagtggtacctggaaaattccgctcgaagtgttgtccactatgatcaaggagaaccaaggtctctccgacaagcttggtattttctggaatgtcctctcataccaggattggttcgcggtttacaatgccaccagcttctttgagggccttaccaagtttgccacagccatcgcagccctggatggcaacgagtcccaggtgtattgggatttctattgccactttctccgagtgattgtggctaggcccctcgcctagatgcaggattcactgcattgtctaagcagcggtcgttttcttttgcgtcctctcttgtttcatgagaccgttgcttcccattcagaagagcactagccagctctcactacgaattcagatttctttcactcataacatctcacatcttcttattcgtaactcatcatatgcacataaatttgatatgcccatcccgcaaaatatcaggccagctaaatgttcctccagacaagctcacctcgtcccttttggtccatatcgtctcaaatatatgtttagccaccgatgcatgaaccaaggctgttgtccgagcgcaattatcaaaccatgacgagaagaacacctgtaactcaggactaacagcctcacaagcagtgatgaaagccggccatatcagagcagcattatgactacccttctgatcaatttcctcttgttgaatttggattagatagccccggatggcattgacattgccctgaagcatttcaggatcaatttcgtatattcggcggtgaaagaaaatagataatgctgtgtacatcgcatgagatgttgtagtcatcaccactggaagagctccattataaggctgagcatagcttggattcgcagccggtagcaaatgggcaatagctctttccagaccctttgctcgagtccaaaattccttgagactgagcctactttgtcctgcatcagacattatcgacaagtctcgctcattggcaaggcggatcacttgggagagtagcatgaggaatatctcatcgattccgtatagcgtgggaaacagtgttgagctccatcggccgggtatcgcaaggtggaggtcacgctgggctatcccggggtccttttccatgctcattgtggttgtggaaaagactaaattggggtagatacgaaaacctcctccatatgtagtgttgtcgttcaaagtaccacttgccccagtctgattcatgctcaatctatcagcaatgcatgttgtctcggccataatgcgcatgtaagcataacagtggtgcaatgctctcttgttgcctgatagcgctggctgactgagccccttgatgcaaatgagtttctccgtttggacgagataggcgcgtcgcatttctgggtccccttttatcatctgtattagagagaatgttagccatgtacagtgaattcacattgaggccatacaaaagcatttgaaagactcagcattgccatcaaaatctccttatatttgctcattttcgtcgctgaaatacagctttcttccatacatcgttggaaatggtattgagcctgtgccaagtatctcgctgctgatgatttccattgctgaacgtaagccattgaattatttcccaagtgaaaggcacttgtgctccatacggcatttaatagggcaagccgtgcatgattgggagacccattaagcatgaggtctgccaatgttgccattgcgcatggtattaccaggctcatccaaggtgtttcctttccatggcacaaaggagagatcaacggcacaattctttctttgtagtgggataagagattccagccctcgatattgcccacggataagtagggattgagttctgcttgtagactcggttcgtggaagtccatcccaacgctctgaagtggctcttgattcggccctgctagcattacatcgtcactgtagtctgcatctagggcatctggactgaacggggtctggttcaagtcttcctctcttggcagctcctcgagctgctcaaaccagtcacccgaggaaggctgagtatctgtaccaaaaggtaacgggtcaatcgggagtgattctgggtatctgaaagcaccaaagggtccccgaaagagcgataatggtttcgagcaactgatatccgagtcgaatatttctagatcgacgattgcctggtcgggattctgatcgggcacggaggagatgagctcaagggtcatgtctcggcgttcaacatctgccaaagattgtcagaataagccgatgatagttgcattcaaaggcggacctgtgaagatcgagtggcggtgcctggctgcattccccgcattcaaccatcgaatatcctccttgtcatgaataaaggttaactgtacgatttctcgcatcttgagggctgttgttatttcttggggaagttgtagttcccacaaaggactcggagtctccgttggggataaagcccaaattggaatgtgattccgatatcgacatggtaggtatcaactccccggtctaaccgaatgacaatttattcattctataagaagtaccaagctatttaaagcgccgtctgcattatacttatgttcaatcttctgggtcgcaaaaatcagtagttggatctgagagacctaatatcgctcggaacttcttaccctcttgggctattcccttctcacgttgagtcttgatagtcattttccaacgttatcttaagctgcaactaaagattacagacttaaatactgctgcttcggattccaagttatacatgcaagacgcactagcacgttcactcggaaagacaagcattattctacaaatcgtctatacacatgtagtggaggtttgataacaatccggcattgaatctgcagggtaacttaagtacataagtatggctagacgatgcatcccgaggtctgactctggatgactgtttaggaaaacaatttggcgattcgcagattgttgtagtgccaggccgtaatgtcctcatatttgcacggggtatcgggcgtgataaacttcttcaagggaagcaaggaagcgatacggttcggcttcgcaaaataggcaacagaatagcgctcggggatcatcatatcaaggccaattttgacagtgggcggataggttacccggtgacatgcagccctgaatgtatcattggtcaggcgctgaagagagtcgccgatgttcagaatgatctcggactttccccctgagatgacatcatggaacttccccagattttgctggtcttcgacctgtaagccaccagtggaatcttgaaacagcatggtaattgttccaaagtcggtatgttctgcaatgcgcgtggcagttccatcttctagagcagatgcagggacagctggataatgaagcagacggaattcgttttcagccttgttgtgcagtagtttgagatctgatgccgaaatatcgagggccttagccaacgcatcgaggatctctaattcgacgttgaagcagctttcatagaagtcttccatgaattttcggaacccgggcagtttctcatcagctacccagatgttgtccacaaggctgtcgtgtgaggaacccatgtcgagggtttcctgttctcgttagaatggatgttcacggcggatcatgcaggaagcacccaccttgatatcccgaacagacttcccttgagggaggcctttatcatagccactaatggaagagactgattcttggccgatataactgtatccacggttggggtttgcctcgggtgggtgtttggcggtcatcttatcctctagtgagagagagaagaattgacgggtctagtagagacagtcaatatgtgtataatcacctcgtttgtgtcaacttacatagtcaaacattttcgcaatcagattttctgggagcccatggtttttgagcttggccactccgcgcgttttgagtgtttctagtagggctgccgaaaccgcctctctttccgcgggagaccctttcaacagggacagatcaagagcttgggacataattatgaagatattcttggaattatcgtctgttatgagggtcttcttgactttcgaatcaagaatgacaatgaaatgagtaaaagaagagacctacaacactagactatatatattcgatcacggataggacctacaagtggtaggtggccaagaagaacttcattgggaaggtaatattgaagatatgaacacacagacctgtaaattatggattaccttccattctatcttcatctttcatgatgcgaagtgtttgttccgaagatagtgtaacgcacgccaagattacgccaacaacgcgtcccccaataaggaaaacaaaatagtggatcaccttcctagtatttcatttttcaagtacaacatacaacatagagataggaaagtgctgtcgccttatctcggggactgtagaagtgtagaggtatttcatattacttgcctacgacagctaaaatttcatcccttggatctcggtgtactgttgaggaccactatcactttcctcttgccgttccaacttcatgaacggctgtgtaatctcgaggctgcggagagcgagtgtccgaaagtaggagtaaaagttcatgtaggcccatttgacgaagcctccctcaaggacattcacctgctgctgaaacaagacaataactgaattgtagctcaaggcattttcaagagcaatgcgatcttcgtcaccttgattcctagaatcaaaaaactaagtcttgggctcaatgtttgcataaggtctcggataacagtggcttcagatggtgaaatattatgttggaccattttaacagccatatggttgtgacgccacctctgatacatagtttccattataccgactgccgtgaatagctcccaatatttgggaggcgattcaacggccgttagctcagtccaaagtgtcttgaaagtaagcgagttgtcggaatcgcgaactggtcggtcatggcttatcccaactaccgtttccgccctagccggtgatgggtgcaaagagatttggagcgaatcttgaatttcattaccgctgtctggctttttgcgcttgcggcaggttttgtttgtgtgaatcggcatattcccccacttaattccaatgaagttgataaaatcattggttttgaattcggcatctggggacaacttgttcttccaggctgtggaaagccattggccccgttgaattgcttcattcatgttggtggcgtcggcgccgggaccaataagacgttgaagccaaagagaagacccatcttctggtatgcagatacgctctgccctgcaagcacaagacaatatcccaaacatcactgcaacccctgagtaagatcccgtagcaccggtaagcaagtatccatagaatctccatcaaattagaatggcggagaaatatcctttttggttcatactcgatcaactggaaattgaggacatcaaaagtcttcacgtgagacgatgcgaccaccagaccagcttgaaaaaatggctgtccacctgcggggtaactgtcggccagcaaccatccagcatcattgtatccccccgtgaagacatatacacctttccacgcgacaagcgtccgctgattgttctagtagaagtcagcagtgggtaatttcgggactcgttctttgcgtacatcccctcggtcgtctaagtcataggctaggtgttggatgcgataacccgcaggcaaggtcaaaagggcatagatgacacctgcatccgacaagcggacgttcttgggattccacttgcactggttgatgtccacgcccacttctgcttcaatagatttgcgatcggggggatttgtaactttccaggtacggagggaggccaggtcttcctggcttgacagaatgcctgggttgaatccagggacatcgccctctttccattcgactgggttgctgcatttattctccaactcccgctgaacccatatttggcacctctgacgcaattgcgacaggtccttcagccagtcctcaatgtttcttgtggaagggcatgccatctcacaagcccggggcggggagatagatggcaccgatacagatgttagttgatgggtggtttgtaattggagatgttcccccaggtattgctgcttccaaaagggagaggtcaaaacaggtagaagactgctgtgaattggaaccagaaaccttcatagacaacgaaggagaaagtgagacgttgatgaggacgaatactgtcttttttagtgaggatatgagaagtatagagagtcacagagagagagaactaatcagatgtttgaagtgtgctttgttgacgaagtatacaacgcccaaaagggaatcgggcaggcctcgacggtcattggaccaaagctgcgcgatggccgctgcgggatgccgtagccccccaccaacaaacagcttcctgcgcatcacttcattcctctcctcacactttttatttcttttctgctttttttattttctgtaatacactgagcgttccattttttaaagtcttttcgagactccgtacttgtcatggattccacgggtctgggtagtgatggtgctgcctaccggtctcgtgggtaccaactcgaaatgttagaggccagccgcaaggaaaatatcattgttgcggtatgtttttctcttcggtgagggcttagaaaatgctgacgattgatagatggatacagggagtggaaagactcatatgtatgtttggaggtgacgcttcctttatcggcacatttccctgacagttgcttcagtgccattcttcggattatagatgagcttgaaaacgccagttctccagacaaagtgaacaaactcgtcaatttgtatatctattcttggctcacatatgtcacagcttatttggtttcttgccccgacagtggcattgagccttcaacaacatcaagttatcactagccacatcctctctgtgaaaactaaagttttaacgggcctagataatgttgatcgatggactgatcaaggtatctgggataaggtgctcaaggatgtccgtgtggttgtctccacatatgctgtccttgctgatgctctgggtcatggttttgtccgcatgccccggcttgctctacttatctttgatgagggtacatacgtggcacatctcaaggtattccagaattaaaccaatctaacatctaatttagctcatcattgcacgagacgtcatccggcgaacaagattatgcaaaatcactaccatcctactctactgaggtcaggcccaaatgctgtgcctcggatcttgggactcactgctagcccagtggtccgttcgacccaaaatgagcttgagtcggtccatctactacatgatgataatcatctccagcaactgaccatgttccccctagaacgatcgaatccaacttgaacgcagtatgcaagactccacgtgtccatcgtaccgagctgttggaaaacacccatcgccctcatctcgagcgtctcaattacatacactttgatgaagcacagtatggccttggaagtcgactacttccatctctcatagaatgttgcagggcctataacatagatgatgacccttggatcgaatcattacggttaaaggatcagattgtggagctggcgaaggccctaaatacaggtaaaaccttctgtagcgagcaactgaggatgttcgaagcacgcagccgtcacatttatgaggagctggggggttgggctgccgactttttcatcagtgcttcaattgatcaacttcaactttcaatccaagatgctagtgaaatgtcacatttggaccaaagagagagaatttatcttttggaactgctgcttacgatgcctacgccagttgcagccgaggagaataatcacgtatccatcaagcttgaaatgcttctcaactatctcgaaaaaatggataggcctggcttttccgggctactattcgtcaagcagagagcgactgttagtgtgttagcgcgcattttatcccttcatcccaaaaccagagatcgcttccagtgtgccgcttacgttggttgggcgagtgataaaaatcgcaagggctgtctcggtgacttacttcatcgggacatgcaacgaaatactctcgatgaattcaaagctggccgaaaaaacctcattgtcgccactgatgttctcgaagaagggattgacgtaagcgcatgcagtctggtcatttgttatgacaagcctgcaaacctcaagtcctttgtccagcgtcgtgggcgtgctcgtcatagagaatctacatatgcggtcatgatctcaaatgaggacgagctgttgagtctccaaaaatggcaggaactagagcaagccatgattaaagcgtaccaggatgatgagcgacagcgtcgtgaagcttatgccatcgaagataccgaggagcacgtgaatgagacactttgggtggaaaaaacgaggtgagagcgatccagtgcttccccttgatattggctgacatcatttggccagtgctctgttgacagcagatgatgcattgcagcatttgcatcacttttgcgctgttttaccagttgatgagtattccgacaatcgaccaatgttttccttccaagagaatagtgtaggtttgcttttaggaacggtcacgctaccaaattcggtgcatccgacggttcgccggacaacggggaaagcctggtggcgcacagagcgagcagccagaaaggagactgcatttcaagcttacaaagccttgtattcgtatgggttgctcaatgacaatctcttaccactaacaagaaaaccagagttgcggttctcggaacagatgacgctcccatctattgtacaagctgctgagcagtatgacccttatgtagaacttgcacaaggttgggcttcgggtcagctgtgtcagacacgcttgaacatatgcagcaatggttctcccgataaagatctggccgtatgtttgattttgccaagattgacccccatgccacaccccattcccctctactggaaccccgagacttccttggaactctactttgatccgcaagtgtcgactttcgaggcgacagtggagacactcgaatatatgagaaagaccacggccctctatctacaagcccccagctcgcgccagcggggcgaagaacgcgacttcgtggctctcttcattcccgatattccacatgaatacttgggacaatggcttgcggtgcacgaaggaaaggagcctgcactggaagtttactcgaggaatccaactacgccgcctacgggtatcgtccgtgaccagtccaaattcagtgagccacggatattcaacaggtgggtcgttccggccgaggtgacaaagacgtcgcctattgaagtggaatgttcatcacttccacgccgacgaaatctcctccaggtacgaaccatcaatatcactggagatggagaggtagatgcaccaaagaagtcccacgttctacctgcagctgcttgcgtcatcgacaagctccccgcgaaacaggctgtgtttggactgttcatctctgccattttggaccggctggaggcatccttggtcgcacaccgattgaatgataccattttgaaaggagttggcatccaaaacatagaccatgtgattacagctatcagcgcccccattgcgcaggctagtaccaactatcagagatatgagttctttggtgactctgttcttaaattcaccgttagttgccaactatttttccggaaccccaagtggcacgaggggtacctctcggagagccgtgacaaactcatccaaaactctcggcttgctcgtgcagctctcgatactggcattgactgctttgttctaacaagtcggtttaccccccggaaatgggctgcaccattgatcaggaacaagttggacccctcgactgctaagaggaagatgtcaagcaaggtcctggcagatgttgtggaatccctcattggcgcagcatatgtagacggtggaattcggaaagcgcaggcctgtctccatcgcttcttgccagagatcgatctcttcacgaatgagatttcgtccctcctccccccacccgggaaaggagtgagtaacttaatcaaccatcaccgattggctggtctgatcgggtacacttttagtgaccctgccatactgacagaggcactcacccacgcatcctgcgagtacgatacatcaacacaatcttaccaacgcctcgagttcctcggagatgccgtcctggacatggtggtcatggcagtgatagcagcccaccccgtggaaatggaccagggaccaatgacattgctcaaacattcggtcgtgaatgccaacctcctcgccttcttctgcatggagctaagcgcaccagacgaaccttcccacatcacacaatttgccaacggcgaagtcaaccttgtgccacactataaccagatccacctctggcgcttcctccgctcccatgggcctaacatcacatctgcccgggaagcttgtctcgagcggcaccagggtctccgtgctgagatcttagatgccctgaggaacgaaagacaatacccgtgggaattgttcgcccgcctgcgtgcggataaattcttatcggatatcgtcgagagtgttcttggggcgattttcatcgactgcgggggcaatttggatgtgtgttacgcgttcgttgaacgtatcggtctggtgtggtacatccagcgtgttatcgctgacggggttgatgttgttcatccgcggaacaccgcgcagaacatggtgaagggagcaggaaccttggtcttcaagaggaagagggtcgaatctggaggcgtgggtacgtatcggtgcacagcagtggtcaacgacaccgagatcgcgctggtggagggttgcgcttctgccgaagaggctgaggtcaaggttgccaacattgctattgagtacttgacattgcacccattggcttctacatgatgtcgaaacgacgacttgggaaattgacgtgctcttgaatgaattttggatattttcgattttgcttggatagataccatttgagaagtcttgaattttgacagccttcggtgaaatcgtaagctatgtagctaattgacatgcccaaataaataaagtagtaaaatatggtcgactcctatgccttgtctcccttcgcaccgcgcttagaccgccgcacaggggcgggcttaggttcctcttctgtctggtcctccgcgtcagatccaatggagtccacttgttcctcctcacttgaagtcaccatcacaccctcttccgtactctcggaggaatgggtatccacgtcagccttcgacacaggctcccatgtcccctcagctgacccagtatcctgacgcaaactgctaaggatctttgttgtctcactttccacgccattccaagctccacagctgcaacaccgccagcggcccagctcttccggtgttttgatcccagggggagcctggccgttgacgagccgacacgcgctgcagatcatcgccatccggttgcggggttgggtttcatcctctcccagcagcacatccaagacacggtcataccaatttggttgttcagtgtattcgctgttctgagggaatgcgttcggtgcaaagctgggttgattggtgggtggttggggagagaaagaaggtggggaagacgactgctgcggtgtttgcggggcccgaggtagctcgagagggggagagggataattgggggatggcgggctgttctgcgatgccgagggaggacggcgaatgttggcagtgggtggcggcgggagaccagtgcgaggcacattctgtagctgctgtgcgaactgccccttctcggtttgtctctttgggctcggggaggacctgggagactcaccaccgtacttctctagcagttgctgggtggagttgtacttggttgcgaccttgagcttttcgatggtctcctcgcgctggttttggaagtcatcaagacgacgttgcatgcgggagattcggtagtcgaagattctggagctgagagtgcgcacaccatatatcctgaagagacaagaatgtcagcgatatgggaacgtgcagaataaggaaagacgaacaggaccggcccgcctatgatggctgcatattccttgattccccagctctcccatcccagtacgagggcgagaattatagagtaaaacagataggcaaatgtcgagtagagcgtccacagagccttgattcgccgggaagactgacgttgctggtcgagtcgcgtggtggcttgggcgatcttggtcgacagcgtcgacagtgtcttctcaaaagaagctgcagaattcgtatcgccctgagtaatatcagcgacagtaaagcaagataatcaagtaccatatatctcaccttccagggccaaaaagaaaccattattctacatacatagtatgcctgtgaactgggaaggagaagctcgacagttccaaatttaggaaggcgatacgcacgggccacctcaggtcggctccaactttggggagtctactaggaagtccacctaaatagggggtcattggattttgtttatttgttacattgtgcatgagtatttcggatatcattacatagattccagctattcatttttgttgagttgccctttctatgactttccgagctcagcagaccgagcagtggcagcttggacagacttgtcgacgatctctttaaagtcgagagactcaaatgtctggagagcagcatatgtggtgccgttggggctagtaacgttcttacgcagctgagaagggctgtcagcgctctcaaccagcatcttgccagcaccaagacatgtctgtgtagccaaccgagtggcttgttcctcagggaggcccagagcagttgcacttgcgatcaagtgctcgaccatggcaaagaagtaggcgggtccagatcctgattgggtcagatcgatacttgttgatggccttttacgtaggagacttaccggacaatccagtgacaacatcgaggagttcttcgcggtccacccactcggtagccttgctaacacttccgagcatagcattgacaagatccttctcatctggggtaatgtcggcgccggcaaaagcacccgaagcaccctcaccaactagggcaggggtgttgggcatcacgcgaacagtgtgggcggtacggctatcgctcgttgtcaaccaccccttcaagctatcaagggtaatacccgcagcaatgctgacgacaacgggcaaagtcgcacgcggcgaccaggcaccaccgagctcctcgcacacactcttggcaacttgtggcttgaccgcaatgatgaccaaatcggcatcgcctccagcctcaacgttagaagtggtggtgcgcactccgagtgcggccatcttctcgcggttgacatcccacggctccgagacgcagatattctgcttgttgacccccttgctcagcaggccaccaatgatggcggaggccatgttgccaccgccaatgaaggccagtttgctctcttgaatggaaggcattgtatagatacagctgaaagggtgcccaggtgtcgtactgtccaagtgcgtagtcggggagtcccgcacttatgtaaaaatttggtggggcacctggacccgcgttatcgcaccggcccggtgttccaagcggttggagaagctgtctatcttttggtttctgtttttattactcattaggtttcttgaatactctttatcaccctcaatgaaaagagaaataatgcaaaatttacttgtagattggaaattaataacggggttggcttagagacactaaatggaattgaatgctttaactagctgttatggctcggttacaaatcatagtatctcaaaaaaagagaagacaaagcaaaatccaaaagctgaaaccgtcattcgtaactcgtgatagtatgtatacagggtatcaatcagtagacacgtcgtgcgtggcttccacgtccatcagtgccatgcatgcggcgggttccagcagcctagttttaagatgttagcccgagtccaagtcgaatacgagtcgtttggtccttaccttgactgcggggcgatgcgtcaagcttcctttcagcttcaacatagcgccggagaccttgtcgccaagtgagggtttgcgctgatggcgagtatgggtagattttccataggcgtttcgatgaccaaaacgactcccagtaggaccagtacgaccagtaggaccagtccggccagtatggccagtgtgatgatggccttgcatggggttctgcttcgttgtcgttatggttttgacggagcgcgagttcgcgtttcgccccttaagtctggtcatcagcgtaggctttgtggtgcgggtggttgtggtagccgggcgacgtcgatgaaacatggtgatggactgatggatgttgtatgtagtttaaatgtttgatatggaatgtataatgtatacaagtgtggtaggttggttgtatttgcagttaggtggaaatcgacgtctttaaatcagctgcagagatggccttgggatgacttgatgtcaagcaaaacgtacgccaagcgccatgtcgccttcaaagatagcatacaggagacgttgacaaagaggcgctcagccggcgcgtcatccgaaggacgatcttctctgggagtctgcagttaacttgcacaggacaggagacaaaaatgccaccaaaaataagaatacatgctattggtataagatagatcgtccttgcagatcaaaaagctagacagggatatattttctgactatgtcttaatgacgaagacaggatgagcgaccttggaagatgacgagttgaagttgtacaaacgtacttgtgttgtgagacggaggatgatgtcatatgatattgctctgtgcgcctgccaagacatcgttgtacgcactgaaagcttggggaagatcaaatgatgtattcatgctaagctacctacggataggaggtcgcctcaagtcaccttaccgaccgacccaaattgcttcgtctgcatcgctctaagttgtcccaccatagttatcgactgttcggatgtctttgacgattgctcgcttcacgtccttattcatgctaaacccaactgcgttgcagcttgggttcgtcaacgacatcagacaggtcgacagctacgacggtacaatccaaggtgacgcagctcgttggtggggatagattttatcccttgggaggccatcgctggtgggatcgtctgcaacggttcctcgacaggctacaggagtagacaaagcccgagtcagggcatatcaacatcttgttttcgatcgttcacggccgggctgtggtagagatgtaacgccaggccttgtaagcttggcctgtgtcagagtgatgtgtttccggtctgattcgatgatcgccttaaaagtcacttgcaccgctgtcaggaggagctaaagcctaagaacgatcgcggatctgcgcaatagccttataactctgcttatatattccagcttatcccatctgccacataaaccgcacctgttcaaaacagaacaattagccatagatcatgcaatggtattgcaaattaaaaataacaatttcagtaactcagagaccaatatgaaacaatgtagatagacacggattcaacacattctttgcagaaagggaagaggtcaatcatcatagagactgtatatgttgtggtttgcgaggggaggacctgaatagttacctggaccagtcggagtattccccccagtggggacgattggtggcggcgggaactaccctgtgtttgtattagccactcgtgcctggagatattgttcctgaagcggcggcgagtgaggttctgcgtaaaagcgaatgggtttttcttttcaagtgacaacgatcgctatttgtcattcacagacgtggtggggagaggaatgaatggcttcctccatattcgtcttgaaatgagtgataatgggccagaaatgatgcaaaaaaggtgtggtgaattcctattgcctcaaggtggtttggaggttagatccgaattcccctgagtggtattaaatatctgtctctgggcagggctagggcatcggccctatttcagaaatttacgagtaaggggagattatggagaatgtcgtcattgaaccgtgcgacgacggtgtacccacctataaatatgtaagggcccatatgataactaggtgagatgtatgtatacacaaatgttgagtcaatctggcaaaaaaagaccatgattgaaggcgtgatcctgtctgtagtcctcgattatgcctttctccagcggctaccttattttgcctaggatgtctattcaatatcaactaaaacatgatatgcgccgagatccgtctggttgacgagatactctgtgcagagacgcccaaatatcattgattgtagtggttctggccaataatcttgactaggagctcttatattgaaagcggctaaaataggaaagccccacccagcagggaaaatatggcggagtgacctaagtacgagccggattcatatttcgacatgggcattttcattaactaattagtttcagctgtgggagttcttacaaatatcgatattgacagggtgagatcatctgaaactcaaagcaggcatacatacatgcacttctatagacgtcaggggtggccaggtgtgaagtgcttattcacaagcacaggtatcgtgctcgactccgtgggcagcatgatgcagaaattatacgccgccatctctccgagggttctccacttcctagtacggagtcgagggaaatcccaggcccagaacccccgcactctgccaagacgcaacgtttgagataagatcaccatatgactgtcaaaaaaggaaatgcactacaaagatcgtccaaaataaagccgtccggagatagcaatggggcagatatgtaaatgcagtgaaatctgaatacggaagtataaggttgaccttgagaggcaatttcggaggtacagtactttgggcaaccaattgcgacttcagaaggacaacggacacactattttatcctccaacgcgcatcaacttactactttaggtctgtatgccgccgattgcaattctcaattggcttgtatagtatcatcaacacctgtcacatgatttatgatattaccatgacaccatgcaaaagtacctttctatatttagtggatacggaggataaaaaggtgcgtccgtggtcttttcaagtcgtaatcagtgatctgtttttcactctggtcacagtcccctagtattgaaggttgaagctgcttaaaatgaccacggacgccaaaatattggatttttctgtgagtctctctacaagcgtcatgacattgatcttccgacttatcattgctggaatagacattccataatgtgatcaataatcagttgaccacaacaacggaaacccggcatggcatcaaccctgccaacactcagcctaatccacccgtaccagtttcgacccaggatgaccttgacaaatccgtaaaggcagctcaagatgctttcaagggctgggccaagacctcttttgaagagcgacgtaaagccctgcatgcctgggccgatgccattgatgataatgccgccggattcgcacaaaccctcacaatggaacaaggaaaatcattgactcaatcattttcggaggtgaagatggcaggtgaatggattcgtggtctcatcgttattgagattagcgacaatgtcatcgaggaaacagaagacaggaagattgttcaacgccatacacccattggcgtggtgggtgccattgtcccctggaacttccctgtccttctggctgtcggcaaaataacttctgcggtatacaccggaaacaccgttattttgaagccgtctcctttcacaccttactgcgacttgaagctggccgagcttgccgccaacttcttccctcctggcgtgatccaatgcctgagcggcgatgagtccctcggcccgttgttcactgctcacccacgaattgagaaaataagcttcactggatcaactctcactggaaagcgggttatggctgcatgtgccacgactctcaagcgagttaccctggaactgggtggcaatgacccggcaattatctgcgacgatgttgatattgatgttattatccccaagattggacttctttcttatctgtgcagctcgcaggtctgcatgatgatcaagcgactttatgtccacgagaagatctacgacgagttcttggagaaattagtcacgtttgtcaagactctgaaagtcggcgagggcaccgatgcggataccttctttggacctgttcagaatcagatgcaatatgacaaagccagaaacctgttcagcagtatcgatactgaaaaactgaaagttgcgcttggaggttcgatcgagaagtcttccgggtactttatccatccaaccatcatcgacaatccgccggagacatcgcgcgtggtacaggaagagccatttgctcccatcctgcccatcctgaaatggtctgacgagaaagatgtccttgagcgtgcgaatgccttggataccggattgggctcttctgtctggagtaaggatttcgaacgcgcaactcgcatggcagatcaactccagtctggttgcgtgtgggtaaacagccactttgacgtggcgcccaatacaccccttggtggccacaagcagagtggcatgggcgtggaatggggtcttgatggtctgcttgagtattgcaattcgcagactcagtggttgaagaagagtttctagtttgtagtttgtgtctagttttgaataagacagttaaatgccaacaccaaaaaattcgaaagactttgcttcagagattgcaccgtactagttcgttcgcccactttcctgaatatcggagatctccccagagaaatgtgtcaattctgagattcatttgttatcttatcacgcccctcgcggatcttttcgtccatcggcagactccgtcttgtgtttcgtctcacgtgagggtatggaatttgacgataaaaatggctgaggggtcttctgggctaaatcccattgaattttgcaattcgactaggaacgcccatcagacgattcgccatgctgtacacccatgcaacgattgtgaccgtggatgcttcgcgccgaataatcaccgatggagcaatccgcgtagtcggcgatgtcatcgtggatattggcaagacagatatcctaaaagaaaagtatacagccgatgaagagtgcgatctctccggtcggattatcattccgggattgatttccacccatatgcacacggcacagacactcctgagaggtgcagccgacgacctcgagctggtgtcgtggttatgcgagaggatttgggttctccagggtaacttcacggcagaggacgggtacgctgcagcacgattgagtatcggagagatgcttaaatcgggaaccacctgcttcttggagagcatggtattgtaacccgtcaatgccatttaataccctgagattgacatgaatacagtttgccgatcgatatggctttgacgggctatgtcgcgccgtcgaggagagtggcatccgtggctgtctaggtaagattgtcatggacattgcaaaatatgccaaagatgacgcctgggctatgcatcctggccttgttgagaaccgtgaaacatcattgcttggaactttgaagatgtgggagaagtggaatggtgcggctgatgatagaatcagagtttggtttggagccaggactcccggagggtatgagacgagactgttattgagtatcactttctaatgataaaccagagtatcagacgcactttataaggaaatgaccgctatttccaaggacaagggtatacccattaccatgcattgcgctgaggtcaaggccgatcgggatttcttcgattcggtctcgcacaccccgatgtcatattgcaaatcagttggtttgctgagtgactccacggtcctggtgcatatggttcatttggatgactcggacattgagtaagatatggaacatatgaattgatataacggatgctgacgatatcatgaagactcctttcttcttcgggaacgcatgtcgcacactgcccaacatctaatgcaaaggtaagttgtattgccatctggtttatatacggttggaacttaacgatctaacaatgtctagcttgcgtccggaatctgcagggtgccagatctgcaagatgctggagtcaatattggtctgggtaccgatggtgccccgtgtaacaatacatgtgatcttttgcaggagatgaaattggccgctattattcataaagggatctcgcaggatcccacggaagttccagccgaaaacgtgttggagatggctacaattaacggcgccaaagcactgggcttggataaccagatcggcagtctggaaattggtaagaaggctgactttgtggccatcgatgttcgaggaatccacagccagccttggttcaacccggtcagcgcagttgtttatactgcaactgggcgagacgtcgatgttgttgtggtcaatgggaaggttgtggtcaagaatggagtgcttatgactatgaatgaggaggaaattgtcagagaagcacaaagaagaagcaaagaggtagtggatagagctggattgggcaagaaagttcagggccgctggccagtggagtgatcaaacgaagattcaactttcaggatttttgttttcattctattatctagcaagtcagttcatgcgaggaccatgcctctgtataggtctatgatctaggtcatagcacattccattgctattcaagtcattaggacatgccttgcttacaacagaccacgcaacgcttcgcccaaagccataatagccatagcctggccataaggcattgaggtcaatggaatcgtcttataaaagtaaagacattcacccatcccggtgccaaagctggtattctgcaattctcctttctcatccacgtatcccatcactgcgctgatagccttctcagccacggggcggtattgggcaccgatgtaacgtttccgaacggccttgaggataccgtaggcaaagccagcggtcgcagaggcttccaagtacgagtcgggatggtcaaggagggtgtgccacgcgccggatgacgactgaagacgctgaagggcctcacactgtgcctcgagtgtatctatcaggtgaagacgaatagggtcatttggttggaggtcgagtagctcgatgatctcgggaatgacaattgtgacccagctgttgccacgggcccagcgcgcatctgcaaaattgtgtccgccgtgctcaaaagaccagccgtgaaaccagagaccagtctttgtatcgaaaagatatttgatgtgagtgaggaattgctttttcgcctcttcgatatattggggtcggttcagaagctttccgatcttcgcgagtggcataacagtcatcatcaaagtatcatcccagagctgctggtagttctctgtgatataagtcatatgctgcatgccaccgtagcgggtgcgggggagatcgtgcatcgcccactcagcccacgcatcgagccacggcaggtaggtgacattgccggtcttctcatagacgtaggcgagagtcaaaaacacagccattgtgttgatattcttggtagtgccaccctcggcaaaacgtgcagcaaaccagtcttcgatgatgcgcaacaatctctcgtcgcccgtcaactcgtagtatttccacacgccgtacagtccaattccgtgtgtccactcccaaccctgccatgactttgtgtcaataatgcgcccatcaggaagtggcagtaggaattttcctgtctcgtctttgatattgaccaagttatcaatcaacaggttgacggcgttgtgaatttgggcgcccgtaggcttaggggacgacattgtgtgatgctgggagactgttctctgtattttcgacgaataagagtctccacactttttgtccgggaaacaaaatattatgtgccggaagctccaatcctcgcaaagattggcaagagttcttccactaataagctcttgggtcaaacgccacgaagcatccccgtgggggccaagcgtgattcgggcgaaagaaggccgagttgcaaactgacggaaaaacggtggtaaggcgaatgtatatgtggcagaaaaatctcaataaattctctaactctctaaaactgacaatagtcctaaaacatgacaatctgatggacaacttagtaatcaaaacaaacaaaacaannnnnnnnnnnnnnnnnnnnnnnnnnnnnnnnnnnnnnnnnnnnnnnnnnnnnnnnnnnnnnnnnnnnnnnnnnnnnnnnnnnnnnnnnnnnnnnnnnnnnnnnnnnnnnnnnnnnnnnnnnnnnnnnnnnnnnnnnnnnnnnnnnnnnnnnnnnntgtggcagaaaaatctcaataaattctctaactctctaaaactgacaatagtcctaaaaacatgacaatctgatggacatcttagtaatcaaacaaacaaaaccatctgagttggtttttttctgcagaaaaaccagcctggtcagtcacgtgacccaactgtatcagggatggaaaatgacagtattcatcctagattctgacacaaaccatgaaaataccttcaaagtgtatttatccagatccaccgcaatgagccacgtatgttcggctatcgggctaatagatccccggattccccagcgcggggagaagactagcgtgaagcctcctcgttcgccaagaaagccggggaagcaaaggagaaggggctgactgcttgacttggttgaacggaatctgacttccggttaatatcatagacctagctaccgaaagggccacatgactctttcagcctaatcatctcacatgtagttagagcgacttctagttgggatcatgcacggccctggcaacaaaagcgcggcacattataagtccgacctatctcccctggtgaaccgtctttttgcacatactgcgtttattttgtcatggccgacggcagagatgacccccagcaggggattgagagcgtacctgttgagggaaccgaggcagtgaataaacagcacccaaaaattgatatgggagagtacgagaacaaacaagacatctcgcacgttgaacaggttctctcggcatccgatgatcttgcaaaagataacatggatatcacccgtgtggacaaggaaatccaagcatatgccgcccacagtcaggtggaaatcgacgatgccacaaatacacgcctcaaacgcatgattgatcgccgcattcttgttgttatgatttgcacatatttcctacaggctttggacaagggaactatgtccttctcggctattatggggattaaggatgacgcacatctgaaggatgggcagaaggtatggaatacttgtgaagcttttctctccatcagcatgctaaattcactcctaccggtagtactcctggttgaccacgtgtatttacatcgctgtacttatcgtcgaatatcccaccaactggatcatccaaagagtcccactcggcaagtacctgggcatcaacatctgcctgtggggtatggttctggcactccattcagtctgcaagaacttcactggattggtcattgttcgcaccctcctgggtatctttgaggcttgctgtcagcccattttcgtcactctttcctcgatgtggtataagcgggaagaacaagcggccacggtaacatactggtatgtgaatactcgtctaccggacagtgcacattgagctaatggtaaaataggtacatgatgaacggtgcccagcagattgtcggcggactattggcatactgtttcacccttattggggcagacaaggtgctcaagtcttggcaagcactcttcctggcatatggatgtatctccgttatctggggactcttcgtcatttggtggatgcctgactcccctatgcgtgcgaagtgcttcaccgaggaagacaaacgtctcatggtagaacgtcttcgttccaatcagacaggtatccagaacagaaagtttcatgcataccagatgtgggaggctttctgcgatccccagatgtggtgctactgtgctgttcaaatattcaccaccctccctaccagcggtctaggtgcattcttcagtatcgttgttttgagcttcaactttaccgtattgcaaactcagctacttgctatggtgctaggtgcttatattattgttgttctgttgtcgtctgcatggctggtcaacagattcaaacagaatacgatcgtgatgttgtgcttcatcattccgtacgttttttccctttgttttgctgcgaggccagactgacggttcacaggtcttttatcggaactatcgtccttatgacggtcgaaaacactactttgcccactaaggtgggccttctgattagttactacattactctgtcattctggtcggcccaaactctcacgttatctatggtgtcgcgaaatattgctggtcaaacgaagaagtccaccgtggtagctgcaacatttgtgtcatgggccgctggaaacgcaattggtaagtatctcagcttccctgtggagcagtttagttcctagctaacagattaaaggccctcaagtgttccttgacagggatgcaccacggtaccacattgcatggagtgtccatctggcttgctacgcctgtatggtttccgctgtcatctacctacgcttccatctcaagcgcgagaacgccaagaaggataagctgttggctgaggcaggtctcagtgccgcagatccaaccctcattcatgcattcgaggataagacggaccgggagaatttgaacttccgctacgtttactagatacgcaatatatttgcgttcgtgtgcaaatttcttctaggcttacttgctcggcttagttttgttcaattatatcttcaaaaattgcattctagacacatttcccagcatcacacaaatagaatttcgaatgtctcgatttatagtatttccggcgtatttagcggagaattgtagggcggtggaaaaggcggtatgtagaagaagccaatcatttcatggtcccgatttggccgttgccccgtactacgagttccaaggtccaattaaagctatcaagccacctagtactccgtatgcacctccatctacaatccaaacccagagccccgcagtctataaacaatcatatcgcatgattagacagtctatttgaccttgaacacatttcgaacttccccacgtggaaaccccttagcttgaggttgtcgattggaacctcccggcggaaatgtgaagccgatggtaaatatgtcaacgcggcaactcgcaagactttcacggagttattacctcactctcggtacggagtagttttctccgtcttggcgctagatcaatgggttcagatattactatgttgctcgtggaggtatcggtatctcgcatccatcatttttcccttgtctttcacccagtcgccaattttcgacaatgagattgatcaagaatgaacatcacaaattcataatggagtaacagggcttgaataataataccctatattctttcgacggcgcatctcctaaactagtgccaagggcgactaccgacactccaaaccggccagtgtgtcaggttctcttccaaaacaaccacagcttcatgcgtctgacctgacccctggttgcattgcatgattacttcttcttgatggatatagatcctgagctatctcgacacggagtcagcgcgaccccgctggtggcgttgtgactccttgcgaaaataccccttggcttgtccttctccgtgcagaatgatcactttggtcctaaatttgcgtatagtgtatccgattggtctttattcctggtactaatgaaattctcaatccgagacagattagaggtattgaccaggagcacagcacatgaaaccaagttgtactcctttagatcactataaatatgaccgtcttctgctacctaattcccactcaacgcatctatttctttgagaatccggctttttcaatctgcttattccaataaatccgcaatgtatagccttctcggctccgctctgtttgtgtctctcgttgcgggccatgggcacgtcaccaacatcgttattaacggtgtctccttcgatggatgggacataaacagttatccttatacagactcgcctccagttgtggtggcttggggtaccccaaacactgccaatggtttcattgctccgggtatgttattctattattgtcctctttgaccaagaccaatttcctttctaactctgcaaatatagatgcctacacgacctctgatattatctgccatctcaacgctacgaatgctaaaggtcacgcggtagtagctgccggtgaccgagtctttattcagtggactgccgactggccggaatcgcatcatggaccgatcgttgattatcttgctagttgcggcacgagtggctgtgaaactgtggataaaaccacgctcgagttcttcaagatcgacgccgtcggactgattgatgacacaaccgttcccggtacttgggctgatgatcagctcatagcccagaactcgggatggatggtcgagattcctcccaacatcgcacctgggagttatgttttgagacacgaattgtacgtaaatcccactcatttctcgaaaaagttgcgctaactaaccttgctgtgaaggatcgcactccatagcgcaggcactgagggtggtgcccaaaattatccccaatgcttcaacctacaaatcactggctcggggtcagatcagccagcaggtatcttagctactgatctgtacaatccaacggatcctggaattctcgtgaacatttacacgtctctgtcaacctatgtgagtgattaattggcatgatggtttgctgagatttcgcactcgcactcccctgctaatatcattttattcagactatcccaggaccaactctttacagtggtgccgtctcaatcacacaaaccacctctgcaatcaccgcctcaggtacacctgtgacagggacgggtgttacgaccggcggaaccactacaacctcaacctcaacctccaaggccaccaccacaacgctagtgactaccacgacgagcactacgagtgctaccacgacgagcactacgagtgctaccacgacgagcattacgagcgctatcacgacgagcactaccagtgctatcactagtacttcttctgctggcggggacggagcgtcccagactctctatggtcagtgtggaggaaccggttggacaggagcaaccgcatgtgcatcgtctgcagcctgttcttcgatgaacccgtggtattatcagtgtcttccgactgctgcttgaattgatatggcacaatgctcaaataaaacctgtcgcggaatggtgtattcaaagtatgagcagaaaatgattgcaactgataaagcctatatagttgacgcactatcggctagggggaagtactctagtagttagaggaagatttatctaattactttggacacttgtaaccttgtcatagtattctattcgcattcactacctaatggtttatgccaagtaggcgacagtaagcagttcataacaactctatcttgaacacgagctagctcaaaacgttgcctttgctaggttggaggcaaagtttccgtcgtcgaagggaacgttcgctgctccaaaatcagttgtatccagggcatcttgcacgacagcttaagaatatgttagattgcgcttccagaagttgggggtatatttggataacttacttgacaatgattcccaggcaaccaacggctgtgtgccgcccacagtggttgtcaggccgagagaatgattaacaggccagatggactggtacttgatcagagaggcggtcccatcaagcgtgtagccatctgtactgcagttccagtcaccgtgtgctgatggacagacggccacaatgttcgatgcagtggtacttccatcactggaaagccagataataacaccttcccaatcatggcgatggccgagatcagtcgaaggcgaatccttggggaaataccaggaatacatcagggcatagtagttgcctgaagaagcgcctctcactgtaaattgcaaatagaagcccgttagtcaatgtacccagggccaggtattcaatagatacttctggagaaactcaccgtatatctgccctgtgctcgtactgcaatcgccatttgagcttcctgttgggctgaggccggcgctacatcacagatattagatatgggagtccaggagatcgttaaagaggagattaattatttcgctcacttggtgttcccttctgcatcaacggccgggaaaggcacgcagccattgacaacataaagctttggctggtaggccaaatagaggtcgccaacggcaccagctggaactgtctgggggaatccgacaattgcgtcggatgcaactgttcctcgacgtgtcagctcaaccgggctagccgtcacaggcagaacagtgagagcagccagtccagctatcagttgaggaatcatgttgaaattgaaagcaggcatgctaagctcgtgctatgagtaaactggtttccttctaaatatttatattgtacatgtgatattcatccctttcgatcggcatccgggccactttcttcaggcagtttagtccggtggaaacggtcttcagtcccaatgcagcttagtgagtgataatagagtctgtcctaaattatattgttgttcgcccgtgggatcgacaggcccggtgattcgtttcgttacgtctctccaacccaaaaaatccacaccccacaagctgacgcaatttatctgcttgccaaacgggtatctatgcttaattgaagctagtttagattttagtatatagtagcggtctttatgcaccttggcagagatctaatattctcttgaacaatacaccatggctgaatataacacgtggtgatgatcgacatgatcggcacgttcttggcaccactgtttttttacaccaatcacggtagacaagtcaggaaattccccagcttcttcaaaacaatctcctgcatctcagcgtcggcatcgttcttcgaagctgctatccccactgagacacttgcatagcacccagacgctagggatacttcaacttcgcttggcaatctcgatttgccacacgtggtcacatcattcggagtaagaaatgggactgcgatatggatgcgggacagaacgaaagagaaatcggccgggcttgtgcatccgtcggaaacctttccgaaattgacgttcagccagacatcatccggcaggtatggtttaccagcagcaaccacctggttagttaagttggttgccaaatcggcgtagacatcactgtagtgaggccgcgagctttcccacgaagtctgagagccactagcaccggagaaagctatagctgggattccctcatgcgcagcgtaggtggcagcgcccactgttccggagaagtaaactgtgaggccaatgttattgccgacatttggacctgtgacagccaagtcaggggggccgttgaagaatttaggggcacgcgtattgatgccatattggattgatgtcaccgggtagctattgacataacccagtcggggctattcaagtatacgatcagtctaccgttctggtaacagcggtgacgatactgacctctgaggaattgaatcccacggccgggctgccagatgggcagctattgaactcgcatggctcagtcaagacacttggctctgcttccattgaccctgtagtggcgcgtcaataaaagggcggaatgtacggagtagagaggtaggcataacatacccttgccactctgattctcagcgggtgcagataccacaactgaatggtctgccgctcctagggactcgaatagagcgcggatgttcacttccgcccagccgtcatcattggatgagatgatgttgaccgcgctagcagccagagggagtatcgcaagaatatcgaaccgcatattcaagacatccaggggcgttgatacagtgtagaatccagggggttgtttggctgctacttgtcctcctcaacacgtgggttgtcgatcttactggaaacctcggaggaacctcgggatccgccaactgccgtagtcaacggctcaatccgcaaacagacgaacagaaattgaaatggtagatcatgtactctgtgacgtttgaattcagcatcgaacatttaaataagtttaattatggtggtgggacgatgtagacgaaaatcacatccatgaatctcgaaatatatactgcgcaacctcagctccgtaggccaactgaccatcgactatcttacaacacagcaagtggaaagcaaattggttacacaagaaacttatcgtgtaaatgtacctctagaagttgaaatttatctatggatgatgccgacactaacttaaaaacgccctatggtcggcttggtcgccatctctcattcagaacgagcactcttagtcttcttgctcctcagcttcatcatcaaaaataccaaggcgtaagatgagatgcaaaatagggcagtgagacccgtctagaagaacgattagcatcgcaatataggctagataaagcagggtatactcacatctctccacgaatagtatttctcttgaagattgaacgacttcgcataatcggaaccttccgaatacggacagaaggaacacatcccagtcgaggtctcatcgtctaggtagccagtctgtgaggcgaggaagttggccatgtattggccgcaggtctgaccagacggtgcggtgaactgcacaaattccgatgcttcgcacttgaccttgacatcccagatcacttcgccaaatagcccaccaaccaagtagtggaaagggtccaggtagtaaatccagtaacgccaaaatggctgcataagggagtaaggaaccaccacgccacagaaactcaccaggccggcaccaatcaggacggggttcatcactgccgcgaaatactcgttcggtgcataggccgcaattgcctgaccaatggatgtgtataggagctcatagactgtcttgatgttagatacttggacaaatgctcgttgaatacttggtgtatcttacaaatcatctggagatagacatgtccggaaacactggcctccaccggaagccccgctgtgaagtaccagcatgcaaaatatagtgtggcgcaaatgataaggtatggaatctccgtcagggtctgtgctccaatgaaggcgctccaatgataggttttcgactatatggacaccggggttagcgatacttgcacggcagtaggattccactagcgcactcacctttttctctcgggtctcaaaaatgtcacgactatgcaagaagaacggctgcatttggttgatacagcctggggcgacgaagatgaagttgaaaatggcaaacagtctcaactgcagggagaaagtgccgtttccaatcttccagaaggtgaatccactgaaaagtgctgcgaaaatatggagaaagaccttgttccacatgtaatcctatatgaaggtcagcatgtgtgacctggtttgtatgacattgcagcaacgtactggtgaacgccagatatgtatgctgaggcgcttagaaaccgtcttgaattggaaccagtgtgaggtcgcaaaatctgcagtatcttcaacatattcggaatcatctctgctgctttcgttgagagcatcaagttttgagagtgcttgtttgcgctcttctgactggttccagatttcgatccaatcttgtttttctgcagtaccaccaccttgaacgacatcaataatgtgctctgctggattggcatcgggggggcatggcgctccgttccgggcgaagtagtccaaaatcttggttgactccttgccagctataaccacaaacgagtcattagttgcttgatcatgaccaatcaccccaaaagttaaaactcactttctccgaaatatgtcatttttccgcccttagctagtaggagaagaccgtcaaatgcgtcgaataatactgcagatggttgatgaattgtacactaacacattagtaagatgaaaatatgtttcaagttattcagaacttaccaacacggcttggccgccatcgaccagttttcgaaggaaacgcacaatgttgaacgcactttgcccatcaagaccggaagtgggttcatccaaaaacagcagtgtgggcttagcaacaagctcaacgcccagggtcacgcgtttgcgctgttcgatgctaagtccagctccgggtactgtgaataatcagtatagctgtgcagtgaaatcaagacaccaggcgaacatacctccgattagggcttcgctgatatcacgcagctccagaaggtcgataatatgttcgacgtaagcgatcttttcttcgtgtggaaccgtcgatggctgacgaagaacggccgaaaagtccaatgcctccttgacggttgctgtttcgagatgtacatccatctgttcacagtaaccagtagttcgctggaagctgattccgactgggcggccgtcaatcaagactgatccgtagatttctccgctatccttgcgctgagcaaggacatccaacaaagttgtttttccggctccagaagctcccataagggcaaccaggtttccaggttggacaaatccaaacaccttgctcagaagctgtttcttctcaccatggaaaggtacatgatagtcaagatctttccatgtgaaggttgactgcttgaccgagcctaaaagtgcgccagcatctgcctcctttggcttctcaccttcttcctttccacgagtcttctcactgccacgcttgtaaagtagaacagatgatccactttggctgttccggagttcaagcccgcaagaagtcagaaagatgaagaaaaaccaaaaaccaatcaaaataccaaagcttctccagatgtgatgcactgaataactgtattgctcttgaatgtattttgccccatcaataataccttcatcgtcacttccaaggactgaacatccacggtggacagacactgagctggagtatccggtgccgtatggaagatagtcgggctctatgcaagtaaatttgcgtccaacaaattcattggccatgagcgcttcgaatgcatacgctcccggattgaggtagaagatccaacggaaccacacatgcattttatggaaaggaataaggtatcctgcaacttgtcagtttggaatgcttcgtatcaatgctgttcaaatactgacctccatagacaaagaagacggtggacagtaagccggatactttagatgcatttccaaactgtttgcacacagcgccaacggctcggaataactgtacaaaacacaatgtctgtgcaatgacaatgatccaaaatgtgaagaactttcctgcgttcatttgaagagcagccatgaagtaaaggatgagcgagaagcaggtcacctggaacaccacgactgggatatcagtgatggcgttggcaatagcgaaggccgtaggtcggtaaaatccgaatcgcttctgacgagaaagaattggccggcccatgaaagaagcagtcgtttcagacagactttcaaggagaaaatacaacaccggaaagaagcaaacaccgggtcgtaagaatattgagctcgaatccttgtagtttcaactgtcagccaggtgttcttgggtcgtgtcgggtggagagcttctggattacttacttctgccaagttatagaataaacttccacagactagagcctgtattatagctgacccgactttcacaaatagcgacagtttatcgccccagataacctgaaactgacgaagagcacaagcggcaatttgatcacagagattggctgtgtaaacactgttgttccgaggaatatgctgtttgcgcttttcactagatactgccgtctcaaggtcttcggcttcgtagctcagcttctgagggtccacgatagaatttatttgatctttgcagattgagctgttttgatagcagatttcgaagtcttccggtgtattgggcaccttctcttcccacccgggtctaactgtacgttccgtaacgacagtgactgatgtcaggaagtccgcgacatttgcgcccttggggcagatgaatccaaggtcttcaaaatacttccttgcgatacggcgagggccgtagtaagtgacacgaccttcagctaggacaaggaccttgtcgaattggtcataaataccgtttccggcttggtaagtagtcgtaatgattgtcttgtcgtttcgatccgcttcgcgtctgagcattcgagcaaattccacagctgatttcgaatctaatccccgagtgggattgtcccacatctggactggactttgcccagccaggacctcagcaagagaaacgcgcttacgttcacctcctgacacgcctcggatatactcgtttcctactaggttcttcttggtgtgtccgattcctagtgagtccagaatctcatcacgatgattctgcacaaagtccttgcggttccttaggtgctctgggcgctcattgggaaccttgtttcgaagggcgaatttcattgtacggttgacagttagggttgggaagtgaacgtcgtctgtggtgcagttagcattgagctcgatatatctcaagtgaagattgcatgccttcgttgttgaacatgatctgctgacggaaccttttggcagcttcgtgatccatgctcccgtagttgacttcgccggtcacttcatcaaaactatcccgatcattggagaggactctgagtagggaagtgcatccagagcctgggcgcccaagcacgagaagctatattgattagttacaacgttcctattctcgagttgtgggagcataccatttccccaggcttgacctgaccgacaacatctttgaggatcgtctagaaatcaagtcagtataggataactggaatcatagtaaagtatgcccaccctctttgggcgggcgccacgcttgaacagtgccccaatctgtcgcgggtccacctctgaccataaagtgcttcctaaagcagcctcaggtgccgtaactcgaacgttaagatcgcggaaggtgactgtaagccgtttgcgaatctggtcatcgccgtgttccagatcaacaggggttgttgtgccggacgatggagtttccatgacggaggtctgtattcctgaaatagaaacgaacgactacttgggatcgcaccaattaaagtgggattggagggaaataccatgatgtcgaggcgcagcagacagcagaactcttatattgcgcatcttattatggcatctatgcttttaaatccatattgccgagagtgggtcttgctaacagatcacatcaagcatgtatcgctgtagcggaatttatagataggggaaatgccttgaaacagctaaaaaactgcaagtactattgtgttagcgaggatatcactggggcgcggtgctcggaaatatacgaacggatatatgagcgacccacttggtcagcaacgatcgttgattcgctgattttctatctctgcgcctttcagagcttccagagcttcaattagatccacccttcggatatagatccacttgcaccggtcaccgatttctaattccgtggatgatccccctgattgagaccaaatatatacagtttgaagaagtcgtattctaggttatgaaatttcctggtgtgaggcccatcagaggactggggcagaatttgactgataaaccgaaaaaaaagcgtccaggtccatggtggagaaatcgaaatcccagcccatgtcagactgagtaaaatcaagcaagtcttccccggagcccgcagagcctccggtcgccggattttccagggtttccacctgtgggaggttccaaggagagtttgatatgccaggccgcattcctattgacaggttctgaggaattggggggtttttgggtagtaatcgatgcctgccgtcagaagtgagcccttgctgtatggctgtccctcctgggggcgcaatgttatccccagttgttgctaatagaggtacccattcgtacgatgggttgatattgcgaagcacagtctgcatggctgcaattgtgcttgcgatcgggtccccagctcgcatagttgacaaaatttgcattgaagcataaacccatggcaggtagacaggcgcgacattcgggttgtgaatgaactcatagatgagagtgaataccgaattaccgaagaagtacccatggtatcgtaattcctacgataatgttagtggaacttttataacaacattttgtctatttaccagaacaagattattgactcttgaagcttcacataagtgatggagtgttttttgggcagcagtgatggcatggttgcaggcttcgttgagccaagaaggtgtttctctggggtaatttgtgacatgggtgctagactggttgagtgcgatattcctctcgcgctgccaatggccgcgaaatatcaagaacgggcgaaatgtaagaagtagtgtatgatagtatactagctatggtcagagtaaggtcaaaaaagtgccgactattcacttacaggtaatgaaaattgtttgtcgaaccccaagggatcccgcctggatgctactatcaagaccaagacccaaagcttgttgtagatgtgcttcatgaccacggatgtcgtccgcaatagaccgagcaactctccacatgtgcagaagagactcatgccgctggccgtatatctcagtaacagaacgagtgatggtcttgcaaagctgcaccaacaatcgaataaacggatcctgtggatactctattgcgacatctttaagagagatagagctaggacgtcccacatgaaagcagaaccagctatgtatgaagttagcgagttcatcaagtatcgaactgaaaagggtaatttacgtttcgtagatgtaaagagaccagaaagttacccgtcgttcttcaatattttccggggtttgatcaacatcatggggaacatccttatgcaaacctgctgctaaggccttgcgagaagcagaacccaaatgtaggaaggctgagttgggccgaccttgttcattctggtaattggcgtaaaatccatgtcagtctgtaaacaacaagaaagggtgataagaacttatcatatgcaatgagatttggatagtctgaaggttcaccacatcatcaaacgcggttaatgaagccttgacacgctcaaacagcacatcaccccaggcaaaatgatccgtgccaagtgccgcgcttgccatggcaaggagaaggatcgcttgggcgaaagcatctagatggtctgtgggcgaagagttgtagagtttgtccagacattgctcataatatatctttgggcgaagtggcatcagatgataaaggctggagagaaatcgcgacagaaaaagcttagccaagtcgtacggcagaaacatcatagacaaatctcctttcccgagggacttgttttcatgaaagtctggtgtcccgaagaaaatgcgacgaaagctgaacaaatccaacccagctccagactcctcgactccgccagagggttcaggctgggaggcaggattggagacgagatcccggtagatatgctgcatgagagagaaatgagatgtggggccatagtatagctgcatccgacatgacggtgatgccatatgtgtcgcagaaacgctatttggaaagtcattcatgacggaggctgtgcgctgcggcactccagttggagaagcttgacgaggtgaattcctctcggtggcttcctcattctcatgtttctttcgcctgtggcgaatatagtctctgtatatacagggtgtgttgcgcagttggcaagttttgcacctgatgttatattagccatgtattcactatccgagcatagaccaaaaaatctcacggggtcaggccattgcacttgattttacgtttgcggcattcttggcatgcgcgagggattcgccaacctgcctgagctttatccgatgcctcagacatgaataaatttgtatgcaatctcacacctcctatctgtgcagttcatccgtttaatccgagggattatccgtatatatccgggtcacgtggtgttatgtcatcaagtcagaccacggcggtgtatctattccacgtctgcgtacgttggagatcaaaactagttctctccctgataagttatgtcgaactccagaagtatctccaagtttatgatatctgaatttgcgctcttatatcacatgacctagcaccttgtaacagacgcatctaaatccctactcgaggtcgtcctaagacgtcgcgcatgaatcactatctagtacggagtactccgtacactcttgaaaatagcctcaactcatccgatgcgagcagctttgggacagcttcgggacaagttccgatcggatgacatctttccgatgcatgtttcttgcaagactcggggttatggacgatcacaacgcctgaccaattctggggttatggttggtcaccacgacgactaagagatagtcagatgaggggatcgggatttcccgtacgaagtgcctaggctgtacctagactagggcttataatccattcggataaccccacaaagccaatgatacaatccggggtggatccacaagtctggggaaatctcgaagtcatctggggaaattccaagcgtggcttaccattgatttaatttcgctcgaaactttagatctcggagactttggcgtgctaacaatttttatgattgggtcttccactgccagttctgactagcaaggcatccctctcccactgggagcggcagattgggatttcagctgctgaaaaagccgaatatcagttcggaattgaatccgtgataccccacaacactagactcatcatctagatcttcggacctatataatacccggtcgccccctatgtcttccgtgatccctgtcatctgaaaacttcagaccgcccttttaccccttccaacctcaatccactgtcaggtactccaacatggctgacgccgagagaggcaccacgcctattggtgacgaaaaggtcattttagaccataaagagtatatgatgggtgaagtcacccatggtgcagcagaaaagggccaactcgcgacagacgaacatggccagcccctgctaaaatttgacaaggccgccgagtcacgattgcgactcaagattgatttatatattgtcccaactgttgcaatcctgtatctcttttgttttatcgatcgagccaatgttggtatgtaaccaaccccggttattattattatatcccgagttctatgtccagttcaaacactaatccgtttcttttctggaataggcaacgctaaattggccggtttcgataaggaccttggactcaagggctatgattacaatgctgtgctctcgatattctttatctcatacattatctttgagattcccagcaatctcatgtgcaaatggatcgggccggggtggtggctaccagggatcacattggggttcggtatctgttcggtcgccacggcttttgtcactgatatgcgcagcgcatctggtgtccgcttccttttggggtatgtgtcctagagttcgcaaaatcgacaatgctaacaacctctcccttagcatgttcgaggcaggactcatgcctggaatcgcatactacctttcacgttggtatcgacgaagtgaacttgccttccggctatcattatacatcgtcatggctcctctcgctggagcgttcggtggtcttttagcctcgggtattctcatgctagatcattttggttccctccgcagctggcgtatgatctttgcgattgagggtatcgtcaccattggaattgctctcatctcattcttcacgttgaccgaccgacctgagacagccaaatggctctcccaggaagagaaggacctagccattgctcgtgtgaaatccgaacgtgttggcgcgaccgaggtcctcgacaaattcgatgtagccaagacactgcgtggtatcttcagcccagtaacaattgtgattggggtaatgtttatgttggacaacattaccgttcaggggcttgggttctttgcgcctactattgtcaaaaccatttaccccgatgccactgtggtggctcaacagctgcatactgtgcctccttatgttgtcggcgcgtttttcactgtgctgttcccctacctcagctggcgatttgatcatcgcctaatctttttcattatctgcccgccgctaatgatgaccggtaagtctcagctccttgagcaaccttggttgcaaagcacaaggattgcagggtatactataccaggttccaggctaatcattacggggattgttataggttatatcatgttcctggctagcgaagccagcatggtccgatatggggccacctttattattgcgtgtggagcattttcctttgggtccctatgtcctgcaatcgcatcggcaaatgtgatttcggacactgcgagatcttcggctattggaaccacggtgatgttcggcaatatcggtgggctgatcagcacttggtcgttcttgccttttgacgggccgaactaccctattggtaatggtctcaacttcgcaacttcaaccgtcattctgcttcttggggccagtctatgggcatatatcatatgggaaaaccggcgccgtgcgcgtgtcgatgtccacagcgccttggcgggactttccccccaacagattcaggacctggactggcgcaatcctggtttccgcctgcgaccatagccaggttctatacctcgggtaatcgattttgccccggttcatgaccttagaactcctcactagccttcgtctcgaacatacaatgaattattggcaaagacataggctatctgaggactccattggcgttatacgcgtaaaattctctagatccagaattcttcggttcatttgagcagccgaagaatgaaccaaatgttctagagctgtacgggtcttacttcaaagatccgtggttggcagacttgaataacgaatcacaacaaacatatttggccaggaaattgcacatggctcaaaggattgccgatcatgtcggtacggtcttgttcattacaaaacacgcgaagaataactagaggctttggtgatcggcgtgtccaagcgcaccccacgccaaggaattcgtctttctttcttgttgtggtggtctgtgaaccaatcagtggcttcaaatcattcatggatggggttttctctagttttcgccccgcgataaataagccacgtacggcacagacattttcatccggacgttgtccgaaactcactgtcaaggttcgatggaggaaagaatagacttggcagatcatgtactccagtacgtcctgcgtcggagtagaatgtcaagagtatctgggaatgaacatacaagacaggaaacaagcgagccaccgtgaccctacagtgctcgagggaagccgcacatttcaatccaagggaacatgtggtgattcaggaactcggccatgttccgttgagatatccctggaacgagaaagacggcaacttcggacttgggactgaagacgcaagctctcttggcgctgttccccgggtcttggcttgtcccggtgtatcatgtgtatcatgtctcaccagtttacggctcatttggactacggagtacagggatctttcggtcttgacatatttctcgggctgggatttccggtccccagatttccccgcatgtcgtgggaccaacatctcatagctataaagaccccttgctctggctcacgtttgctttttttcctcttctcctactacccccggattatccccgtattcaactacatacttgagtgttgcccatcatggctggcggagcaaagaaaccagtcaatatattccgcctcaaagacctgggtgagcccaaggaggttttcaactggcgattatggttctcggtcatctcatttggcctgatgggcgctgcccgaggtgtcgatgaggggttgatctcaggtgccttcaattctaaagactttcaacgttacatcaactatgactcgtacagccaagtggaacagaccaacatcaagggaaatgtcactgcaatggtccagattggatctgttggaggcgctcttttgtgggttcttccttgatctttattatatcggatctcgtgtcactaacccggtctatttttatacagtgcgttcttggtctgtgatcgcatcggtcgtatctgggcaacccgccaactttgtgttttatggattgtgggaatcgcggttttcatgggtaacggtggcagcttaggtgctgtctatgctggtcgctttattgctggactcggtgtgggccagacagttgtcgttgctcctgtatatcttgctgaaattgtgagttgctcattaccccagtaatacatccatatcaactaacgaagaaaggcccccgcttctatccgtggtctttgtacctgtgtcttcacaggctttgtctatctgggtattgtccttgcatatttcgccaactatggttgccaaatcaacctcggcgacaacacgcacaaccgatgggtatgtgtgatccactccgtaccatatattatcaatactgactagaacagctcgttcccacgagtctgcatattatctttgccggcttgatattcctcctctccttcctccagcacgaatcaccccgatatctagtcaaacgcggccagctcgaaaaggccatctccaatctctcgaaaatccgtggcctaccatccgacgatgaatacgtcgtacgcgagatatccagtattcaaacgacacatgcagctgagatggaggccacaatgggttctggcgctatgggcgtgatcaaggaaacattccttgtcccatcgaacctctaccgagtctacctcacattcatggcccaacttctttcgcagtggtccggagccggcagtatcactgtctacgcccctgatttgttcaagttgctaggagtcacaggcaataacgagtctctcctggtcactgctgtgttcggaatcatcaaactggttgccgcaattctctgtgctcttttcttggttgatgttattggacgcaagcgagccctcctccttggtatcaccctgcaagcaattgccatgatctacattgccggcttcttgacctccgttcccgaaatgggagtcgacgagagctacaaggtaccggctgacaagaagagcgctagcgagggcgccattgcaatgatttatctctctggctttggatgggctctcggctggaattcaatgcagtatcttctgactgcagagctcttcccactgcgcatccgtgctctttgcacttctatggccatgactctccactttgccaaccaatatggtaatgcgcgcgcagttcccaatatgcttctgcccgtcgcagagggtggaattgaccccaagggtacgttctggtgctttgctgccattaccgttatcggtggtgtctgggtctggtttagtattccggagacggcaggtcgctcattggagagtatggatcgtctctttgctttgccgtggtacaagattggccggtatggtaatcgggatgccgatgaacgtgacctggtagtggatgagaagatggagatggcggtgcagacgcatggaacggctcaacatgttgagaggcaggatagagagaaccgagtctgaatatcatctagatatctctagtattcatttgctggtcatgattaatgaaactaacatcatgaataaatcccttttgaaatataacaaccaactcttgccccattagcccgctgaaatacgtgaatagtgcttctgttcccgccttatttcgaccattccttcaaccccgattgtcagaattccccgttgacgtcggcccgtctagcggaatgatcacaattctcgccttgagcgcagccttatcccgagacttcctggtagaccgtgctgatccctcacttgtgcgaatatccatatattccatatcattcaaatattcatccggtaaatcgacccggatcagaacacccctaggtccaaagaccgtctcgttccactgcgaaatatgacgagcaagatgctcaccacgagctccagccattgccgagatcagattccgttgttctcgtcgattcctggtgaggcgggcaatgaatatcgcggggatagcgcccagaatgccgaccatcaacccgcccactgccattgtgcccaggcctctgccaatcacagtggtccactgccgacgtgaaagcttagcttcgtcgcagactacttgtgtgaactgcgcccaatggtctttggagatgccgtaatgagagagttcgtctggatactcgaatcctgatgtgcaggcagcggatctggatggtatttgcaggcctcgtctcagagcagatgcaacagcaaacccgggctcacttttctcgggcaggaagattatgggattgtcggtcttttcatcgagggtggaattgaattcctcggacggggaatacatcggtggggcatcgtaatgtccagacgtgttcatagttggtgaaggactgtatagatacagctagtatttcttttaatgaagttttcttcttccacggggaaggattgatttgatattgaatgattttccgatttttgaacattaaaaaagggtcaccatcgcaaatatttatatttctgcttagccaacattcccaagcctcatttttctaagcaagcttttccccctcaggtatgagtccgtatgacttggccagacaccgcggcggtgttgggaggcttgtttcggcactcggagccatcaaaaatagctttcaaattggtgatgccttgtataggccgcaatattttgcgttcgagtcacttttgggagaccaatagtgattgcacgcgttacgagcaagggtccagatgcggtcatttagtacgaagataaggccgaactagattctcagtaattaagagtgaggctaaatcgaccaatagagtaatagtcaaccccgagatatctcatttccttcgtatgtctatactccgagctccgcgtgagtcacaatttctcacaaaagggacgtgcaccaaagcaaacaaccccctgagccatcaaggcaccacctttctccccaaaacttcctcaaatcacatcatgacaacgcgttatagggttgagtgtacgtcatcgcgtcttttttatctcgctgccctccactaacgtctcttagatgctctcaaggtacggctatctccgcaagaatatgtgtgcccctcactgacccatagccatgtagacccatcgccgggatcaactagtaagtcggtactacatatctaaagattaaagagtctgcctaacaatctgcagatcgaatggatcaaagtatgtcgctcggtcatgtcgtattcgccgattctaatccctctagggtctgctggccgtcccctttgtcctgcattcccagcccacggcaatctacaaggacaacggtgaggtgctgaagacagtcgccgccgacacccaagttcgctatgcagagattatgcgagatgtagagaatttgatgcttgatcatagtaagtggggattagaaaccaaagaactcggggatgatccctaatcggtacttaaagtccaacaccatgaacgcaatgcccccggaaaatcgaaattgaaccttctggtgccgtcagtgggcacttttttcaccaagctatatctggaagatgccttcaagtatcaagatcagcagcgattcatcagccgacgacgcttcgtggccccttcattcaacgatatccgacttattttgaactccgcccaggtgctgggtcttgttcgctccagcgaggtgcaactagtcacattcgatggagatgtaacgctctacgatgacggcgcctgtctcacatccgacaacccagtcatcccacggattttgcgactccttgaacaagaccgcaaggtcggcattgtgaccgcggccggctacaccgacgcaccaaagtattacgagcgccttcagggtctgcttgatgcgatgcacgaatcaactactctcaccgcagatcagaaacaaggactgattgtcatgggcggcgagagcaatttcttattccgcttcgacccgacatcaaatgcccgactaacctatgtgccgcggaatgaatggttgctggatgaaatgcagtcctggagtggtgatgatattaccgagctccttgatattgccgagtctgctctgcgagcctgtgctgacaatctcaatctgccggctgctattctacgcaaggatcgtgcggttggtgtttaccctgtgaacggtgtccgaatcagtcgcgagcagttggaggagactgtattggtggtgcagaacacgattcaacgttcggctgttggggcaagattgccattctgtgctttcaacggtggcaacgatgtcttcgtggatattggcgacaaatcgtggggtgtgcgcgtatgtcagcgctatttcggtggcatcgatccagctaaaacactgcatgttggtgatcagttcttatcagctggggctaatgatttcaaggtgggaagactatagaactctccttggctactggtcagactaacatttcttctgattaggcccgtcttgcatctacaactgcctggattgcaagccccgccgaaacagtggagctactcgatgagttggagaagacagtgtactcgtagtcattgaactccacgttgaacggtggaataatgcatctttctggagttcattatgtgcaagttcagtgtcaagtgttacgattgatacaccgggctatctttggactacctcttttatcctcacgatagcagtcgcccatagcgtttttaattcatttgaggtaatttcaagattcagattgatggttctatctacaacgcactttatgtcgcagatcaacagtcttcaaggggggtagaaaaccatcaaacaaaaaggcacgatcatccgaactcccaggcataaatgtcactcacgtaaaccaaccttgggtctcgaggacttattgcatagcaccatacaacgcgtaacggacgttcagtgcgatcgccctccacatcacaagttagtggatggctcgccggccagtacttgggggaacattcaagcatatcccgggtgtatcattggcgtggattccattgttggttggaaataagtggtcctgtgggtggaaatcctttcagggggagctgggaaccgaggggacagatcggactgtcgaaggatctgaagagtaggaaacacgacaatcgttaacattcgtatgagggggacaccagaaatgatcattgtacgggggagcaaagcgagcagcgacgaaacgatttgaacagggatgaaaaagcaaataagcagggtcgcagtcggtttacgtactctcgtagcaggaccaggtctcgtttttggtagcatgggtgcgtccagacagaacattgacaacgtcctgtagttcaagccagaactcggacttagggcgacggcggacccaatcagtctcggtagcctccagtccagattcaccacccatgggggagaatagcacctgtgaacctttgacaccaatgacagcactagagagagggtctgcggcaatttcatcaccgctcttattggcatatccttcgatgtgctgcatgcacctgatggccatacgcaaagcacgggcacgatccattggcgaaggcataccaccttgttggaagtgaccgggaacagcggcacgagactcgaatcggccccttgcctcttccttgataatgtcggcgatcacctgcgtagtgtatgtgctggatgcacattcgttacgcagaataatcttgcctgcacggttagcgcctttgtcgcggatgaagttttcacgcaggaagtctatgtcacgcgagagcatcttgatatcaacaccctcctcaggaatgtacactgccacggcaccaacagcgaggccagctgtggttgcaatatatccagatttgccaccttgggtctcaatcacaaacactcggcggcgagaagaggaggcggattgacgaatcgcatcacagaagacggtcagggtattcagacaggtatcactacccaatgagtattcagtcccggggacgttgttagaaattgtagctgggagcacgatgagcggaatcttaaacgcatcatactttgcacgagcctggcgcagttcgctgacggcagtgaaagcctcgaaaccaccaacaacaaacaaggcatcaaacttgtacagctcaaagcactgggcagtgccctccatgtcaacagacggcagggtacggttagttccaatgtccgaaccaccctcgttaacccagctatcagcttccagccaagtgacctcgcggactgagctgactggcttatcgtcgtggtgacggcataatccggggaaaccgttatgaatggccagtggggtgtggccatgagtcaggcagtatgcaacggcggcacgggttgcttggttcataccaccagccggggcaccaacgtgaatgatagcgattcgcattctctatgatatagtaagtatctagaaagcctgaggagcccggatgcgctatggaattaggtgtataccttgccttccggaagaatcatcttctggtcctggcctgcggtgtccaaataggcgttgtagtactccttgaattccggatcacgcagcttcatggcctcatcgaattcttttttgtcaatcaaggccgtcacatctttcgttgcttgaactgcttccatcagaggagtccgcatgatcttgttctcgcggatggtgatgactggtgaaggggaatcaggtgacatttcaagcacggcacgaacggcctccacaccctgtagagttgacagccagcggtcataagcgcacgctgcaccacctcgctgggtgtggcctagaattgttactcgggtatccaatcccagccgatctgtgagaatatccttgattttcgagctcgagaccttgttcaattgccgatcctgtgctccttcggcgacgataacgattgtacgacgcttgccgcgttcacttcggttctgtcaagccccttgaatcagcaaaaataaaacattgaacaacactgaagtaattccaaccttcgtgattacggcacacatgtcatcctcccagccctcctttggaggcatctcagggaggaacatccagtctgcaccggtactgatagcggacatcaaggcaagccatccacagtgtcggcccatcacctcgatgacgaaaccacgctggtgggaaaaggcagtatcgaagacatcgtcgacggcatcacagatacgggtcaaggacgaatagcaaccgatagtggcatctgtcccagacatgtcattgtcgatcgaacctaccaggcccacaatgttcaagaccttgtagggtgccacctgctcagctgacaactcccccgagctaacgaggtctgccaacaagctgggccactcggcacggaaaacatcggcaccagtcaaactgccgtcaccaccgcagacgaccagtgcatcgatacctttcaggaccatgttctttgctgccttcatccggccagcacgctcacggaatgccatgctgcgagcagagccgatcagggtgccaccgcgggacaaccaaccgcggacatcctcccagtgcagctggcggatcatattcccgccattaaccagtccttcgtatccttcgaaaatggcgtaggcttcgcagtcgctgtgaattgccatgcggacaacggcccgcacggcaccgttcataccgggagcatctccaccagaggtgagaacaccgatgcggcgtctcttagccggatgagtggcaatcttgattggctccatattgaattgaaggcttcgacctatacctcaggtcgatagataaaagaatgagacaaaaagtgattaggaagaagaaaacaagtcgaaaaaaaagaagccgataagggtttcaaagctccaagttatgaatgggtggggtgtggaggggtcaaacccaatccggtgagagaaattgggcggtaggtggatgctttgcgtcacagaaacaacttgaagctaaaagttatcaagttggatttcaagaaacataaggaactgttgaggaaaatgagaaaatgctgaaccggactggactgtatttattcttgactacctgtatatgcctccccctgagattacagtggtctgacccttcatggtacctgcgttcccttacattttggctgcaaacacatgtcaccggtcgatttaggtttagtacgggcggtgagatgtcaagttgacgtcactgatattatttgatttgtttgatttgtttgttctgtttgttctggcccctttccaatgttgctatttattgtctttctcacgagtatgttgtactccccatagtcgtcaacctcgtattcattattatgggttcaacaattattgcacaactagtcacccgtgtacccttggcaaacatggtctgaccggttcattcacacaacctcggtccatatgactcgcactaaaggagcgatgccacgcatattgtcacatggttttccctactaatatcgctcctatacctagaacgtgattgctcctgtgaaactcgattcgctcactcggaagcccctggtcctgtatagagtgttccaccagttgtaagttttttgcagtgacacgttgtgcctgcaactccttgtctaatccttgttcgaaatgctcctcatacccctgagatcccacataagaggtatttacaaaatagctttggcgaaatctccaggcaccatagttatggtacaacaaatgatcttactatcgtcggacacatgcatgggccctcgggtaacagcggaactaaaggcgaagagaaaacaaaagttatccttggattcaacttggcatgattaaaatatcagtgtgatgccgtcttggcgggctaggctgacacctatacgaatatggtgtctccctgaaagaagatggaataccgtgccatttattgattcgtatatcttatcgtgttcatgaaccttcaattgcgactatagaactatggaaaagcaagctaataataatatcaaattccctgagaataaaaacaaaacaacgcccccaacattcattaaaacaacgcactttcacgtacttggtccatcctcattatcagaaaagctccccgacatttgtcttacgtcctcggttctcaatttcggcagtgaattgcccaggcattgcgctcgtagtcagaacacggctaacctcaaggtaccgcttgcgaatctcagaccaaagctttttatccttagcagtggtcaactcgggtgatgagtagtaggggtcattccagataaaaccgtccacgagtagtttcagacctgcagggctcttctcgaactttgcgcacctatcgacatgttagcagtatccagcaatattcggtaatagcacccacatattaaaatcgataagccacaggctgattgactgacgagaaaggtcaaatcgatgtcctagcgagcactcatcctctcccgtaatctcatctgaccgtggtattagagacaacaagggggagctaccaagaatgaactctacgtcattgccatcaacgccagctttccagtgtagaatggccagggcttgagccatgacctgggcaaacgcagaggtgtcccgctgcaaatcctccatttcgttgacatgtagcgggaaattgcgtaatttgaaatccttcacattcgggtcggtcctgttcctcattcggcgtccgagatagactcgaatcaagcagtgcttgttctctggcttggcagggaactccggcttgtactcatgaagggttggagggcaaagaacatcgactatagcttccctgactgggagagggatgggaaagacacggcttgagatcagagcgaaactctgcacatccatttcccagctgtacaacttgggaatgtggatgtccagtttcatcagattttcaacatcgtccattgcttccttgacagaggcgtgcatcttgaagtcagtaagcagttgggggaccttggctggggagttgggaagtttcgcgacggtatctgttccaacaatggcgtagacagtaccgcactgtccttgtccgatctccaggaagcgttgttgcgacgggttatctcagactgcattgttcagttcttcgaggctagaggtagttgatatgtaggatttagtcgatagcatgcgtgtcaggatatcttctggctttgcggcagcgatgtgctccggggaaaagagggtatcttttgccaactggaaaccagtgggagcaagatccttgatcaattcagtgatagaatattccgaatcgtcggtactggcctgctggcgatccatagtatgaggacgtcttgctggtcaaagtgtcaagaaatgcatgtaaagtcgtcgtaaaaagtaagagaaaagtaaaggttcagggaaaccacgaggtgcggacaaatcggtgggcgcagagaaaagtagaggtgaagagaagagcagaggtagaaaactgcctatctaggtaatataagaagacaccaactttggaaatgtaccgcccacctttacaggttgcaggtttccatggatagctctgcacagaaacccaaatagtgtgtgtgtacttcggtttatcccagtctgcagtagttcatggctgcaactaatatcctctctgccagtttaccttagctatattgtaagcaaattaaccgcatggttgagggaatcttcgagtccggcagattttggtttcgtgcgttgagcttacagggttgaagtcaaccctggcactttttgttcctcacacgagcggtacaaacaatgacaatgggtttagaccaggcttctataccaccgaaagtctaacccacagtataatctacctacgaggggggattggcgccatcaaagtttttgaagccccagctcttgtgcgcgctgctatctggcagcctagtctagaagactggcaggcttgggtgacgaggtagctatcgcgtccgccggccattgctagccgtccagccccaccgcagtatgatactgcggacctcatccctggggccactagggttacgcaaactgatcctatcaacgctcgcttacaaatgcccactcagtcaaatgagaaaaaattagtggctgttagctatcaaggctgtcaaattctcgctgactcgctgtacatgattatttttgttgacgcagcatgatcaccctctcgagtcaagcctagatgcaaggtagaacaggtcatatttgcattctctagtttcctttttcaaaaaaatgagacaatcgaagagaataacaacatttaggaaactctttttagaatgtaaacactggacctgtgaacaactgtatccatcacatatccaagatggctgtgaatatactaccatcactccttaatgctggacaccacgggatcgcttatattaagcaccacgctggcgaagttctcgtgaaagagctgctgcactctgggtaggaaatactccgtaatcgagttttcaacagtagccggcagcagatccttgtaaatccaatagtgccgaacaaaatccccagtgcagtttatattagccatctcagggtatccattcgcctcggcgcatgaaagagtctttatttctccctctagcgcagtgtcatatcgaagataattcccgaaggcagcttgctcatgagaccattgctgactccatttggagcagtcggggtatcgaatgtcggtaggacatgattcccacgcttcaaaaagcgcctgggttctggggtctttctgtccaataataaatcccgtgttcaagagcgtttttcctttcgcgtcctgattttgtggttcatctgggtcgagtgccatggcgacgagtgtatcgggcgttatgtcccagtagttgaaaagccattccataggaaggtgcggatggcgaatcatagcatccccatcgaggaatataacaaattcgtaagatttcagggcttccttcatcgccgtcactttactccatgtgccatgaagacccgtagggcaagaagtctggatgagcttgtaatcatagccatgtattgtagctataatggtcagtgttgggtggtaagggacatacatagcagagacgtaccgtatatgtagtggcttagtctaccaattgtgctatgatgagcgcttgtcatgttcagtcggctcccattcaaaagttcacctggtccatcaagtggccgggtatcaacgtccaaaataaggagtttatctcttaggggcttcgtaaatctcggcatttgtggtagtgaataagtttttccattctgatcatcgaaatctagggcgtctattgggtgtatgtagggcctgtaaagattttggataaaagagaactcgttgttcatctgcagcgccgggtattccctacaaatggttagattgccgaatgaagtttccgcggaataacgaaaatacaacgtacctcgagatgtttcggacagagaaattgtgcgaggcaacgaaaaagtaaaacagaccgcatagtaacgccgtgagtgttaacacggaaataattggctgtggcatcatggtcagtgctgaagaaaggtaatggattgtttataacggtgatgacccgcagacactgcgcgcccaagagtgtgaaaaacgaaactccaggccattcctctcggctcgtcttaaatagataggagaattgtcacgttctcgtggtatttacgcaagcgggtggaggtatacgaggtatgtgaactgttttgaattggggataagctatgattccttccggatgcggaaagatcattacctacacaaactaccaaacgagaaaatggcaagtgaactgttgattttgctcttaatctaaagggctctataatttttccgacttagatttcaattatgttttacacaaaaaaggagtgctaagaaagacctagatttaatcaaattagtattatgtcttttgcatttgtctttcaaggggtcctagaggtgcccatagatgtctattgagaataatcagccgcaaactgtagggtagggtgaaaatgatggtacctacggggtatatataaaacaaactgagcgctataaaaaacttaggtagccggtttttagctgccaacagtcgctatccactacggtactccacctttttcatcggcgtctccccttctcttgtctacttctctcattctcttctcccgtccccctcctatcttatcttcagtgttcggcgttcggcgttcgatctcgactcaggggataggaccaaatcgcccaaggttgactgctaaatgtttaaatgcttagcctatccagaaatgccaaatttagacactagataccccggtccttgatacccctcggctcctagcccttatctcccttcccgaggtctcacctaaagcttggtcgttgctatgaataaacagacactgctatggttatttacctgattagaaattttattggttttggaccaagcaattcatgtaaataaataacatactctatcattccgatatcggtataccacacagaattcactctattcccacttgggcagttcgatcctttgagatacgatcaaccccgcatgttagctgcatccatatatttactcgataacagctttttttttttctccaaagaacttgcttactctcgaggaaagcatcaatcgcacatttcgatttgttttaccgaattctgggccttctacatcatttgccatggcgccgaatgatacaggtcagcttgactctgccgcagtataattagaaggttaacacagtctagttttcagcctcgttacggctgatccaggcctaccacgacccaatcccaccgaatcctattggcaacatattccacatgctctcgccaacgtccaatcctcaaaattgccaactgaccgagattttgcgatcattgggtccggtatcacgggtctatcggtagctagatccctcttggaacgccaccctactgccacagtaaccgttctcgaagcccgtacgctctgttcgggtgcgactgggcgcaatggtggacagatggctgcgaatgctggagagcagtatatgaatcttgcagaagctcacggggtcgagacggcgggcaagattgtggactttacattccgcaatttggagaagatgcaggaattgattgaagaatatgatgccgtggagttgagcgagatgcaacgtctgcggaagctacgagtctttttgacccaggggaagtttgacgacttcaagaaaagtatcgcccggctggaaatcgatcatccttctaagaaggggctatatacaattttagatgcggatgctgtgctcaaggtgagtcttttcgccggtgtgatctatggtgtcattctgatctttttttctctaggaatacggaattcatggagcatctggaggaacactgcttcctgctgggacagtctggccatatcgtcttgtcaccaaagtgttcgcggcactcttggaaaaatacccaggtcgcctgacaattgagacacatacaccggttgagtccgttgagcacatttcaacacttgcctatccgtatacactgcacacttctcgcggtccactacgagcacggactgtagttcattgcaccaatggctacagcggacatctccttcctcacctaagagggcttgtctatcccttcaaagggacaatgacagttcaagatccgcagaatgctgtgccaaatcaaggcacagctgtgtcatggggcttccactaccctccaacctacgatcctgcaacccaacgtcttggatttggactgtactacctaggacagagtgcaaagaccggctatttctacttcggcggcgagcatgcgcgttttgatgaatcaatatccgcagatgacagctttgtgaccgatgactccgtgaagcacttggaagacgtcctcccacgattctttggcaaaaacgacaaatccgattggcgtctggtcagttcctggagtggagttatgggttattcccctgatggtctgccaattgttgggcgattgtcaccggagatgacggggaggggaggggacggcgaatggattgctgctgcattcaatggatacggtatggcaaacagcctgctgagtggcgaggcgttggctttgatgattctgggtgaggatgtcagtgattggctcccagtttcatatggactgggcgaaaatagactccgagagacgctcacagtctcaagggccgtcaatggactaaggtcgaagctatgagttgggcacgccggtcctcgctcggtatgttcgtgactcaaatggaagtgcatttcaattcatccttttgtagccatgatttgtacagggtattcaactcttgtctctattatgtattgatttttgccaaaatagatggggaagaaaatttttgcggtagacccactacttcacttcgcgagcgagccatcacgacttcttgctttacgcaaaaaatattcagaaacaaaaagacatggactcgcggggaatcgaaccccggaccactcccatgctaagggagtattataccactaaaccacaagcccagttgattgaagatcggggagcgagtatcggctcaaggcggcatagagtggagtggcaatgtgtgctctctgtgggtcactaccgtgacacagcggcggacacaaaatccattaaagagggttggttgggtgagccaggattaggagatggtttccaaatatgtggcattgagtgggaagaggggttttcccaattcccacgaccggtcccgtcgatacagcgcacggagtagatctcgacagacagttcatgacgggacaaagcaatcttcatcttttttcggctttctgatttggagctagggatcagaagttcaccatgttgagggtaaatcgcttcccagctgcctttcgcttggtccttgtcactttcagactttaatgaaccactattggatgagatagtaaaaacaacatccagcaacaagaggtggttgatggcggcttccacttcttccctctgagaaagtttaccaggagactcaaggtccgggtacttgggcatattgaatgacacatcaaaggtggtgccgaagggggttgaggaaaggttggtgtgaattgcgattgagaaagaaccccgaggggtcaaaagcttcccatggaaggtagacagcaagggagtaaggaactgtccaatgagggtctccactactggagcactagaggtttgtttctgcctctttgttgaaaagactcttgcggtatatgctggaggtttcaaccctgctgattgcaaaacaccgaagagatccttgagtaatgactggagccagcgtacatcagacatatgcttgatgtaagctagagccgggcgaataagttgatgttcaggaacaggtcgcgttttcggggttaggggaagcggaagcatagtccgacgacgcaagttttgactgtgggcatatgccaataatatccgaatggtatgtgccaaaccatctgcaagcgaagttccttgctgtgagatatcatgttcgggttgcgaggtatcttcatcagtatcaaccaagtccagtaaaatttcgaggttatcggaagcaggaatttgaatgagattctggcgtgtcgtcacgccaaagctagcgatcgctcgagcctctcggactagctcatgaaacagctcctcttcgtaaacagtatcacgcgcttgcagaatgcgatcctcaatcgttgcgttgctgttgaaggtagaacgcgtcggtctagatcttcccgaaagcttgccatcctgtatcacccgcacccggacaaaacgggctttggatgggatcagtccttcatctaataacaaagccccatcctcggctcgacgtaaggaagcaaggccgcggtcgcggaacaccggtgtggctagatttagtcgtggtcagtagatgcttcctgcagtatccgtcacatcggtatgcgctcaccttcgaggaacccatattgcacgcctagcgattgcctttcacgcgggagacgagaaattttccaccccttgtccttgacagccagcacctcattccaatatcgagtctccgacgcgacttcagtttcaagtctagaggcggcctgcagaagcttgtttgccgccgcgttgaaattttggatccgccatccccttgataccgctgatatatctttgattgtagattccggcttcgggggagggttcacgacctcggcatttagggaaccaagaggtgcgacttgcttgaggaaggccgacatggaggtttcggcctgacgcggggcctgcttagatagcaaaagggagacgaagtcgagggcgaacatggtctccatgtgagcttgcctggaaatttatcagttcttgcgcaccgagtatgactttaaaaccattagacagactcacatggcgaactgagtgatctcggcacgccgcttgtacagttgctccaagcgctctgtagagtcaagatcggtcgcatcttggtcactctcgtctaccccgtccaagccatctttttcttcctcctcggcaatcttgtttcggagaacatcttcattcacctcgcgaaaagagccccactgattgttgatttgcgcgatctccacaggcaaggtatctggacgctcacgcttctcggggatagggcgcaaaggcagagtgaaggagtcggccatggtgtcaatgcaccttaataacctccctctgtgaaacttggaaaaaccaatggctcgagaggaaaaataaggaaggacaagtggacgacctaatcgggagctcaattcggtgacgtaagttgcacgtgatcgtacctaacgctgggatagatgctcagactcacagttgactaggtagtttcctcggttggtaaagttgttttcttttcatatcttggcaatatcagtgataccagtaactttcagtctgttagcttggtgggacttaaaagtagccgttgttcaaaatcacgctgtcacagagtacaatatatatctacagcctttgataacctcaacatcacgtatcttaaacacggatactataaacattcaattttctcgattattttctgaatgttcttagttagaagtatgaaggaacctgcaacctaatatgtctacattatactgtatgtctaacctggaggcaagtcccacaaggttctgtttatctacgagtcacgactatccattcccgggacatccccatcatattttctacgcaatcaccacacttcaagcctcccatcctatctttccaattaagatactgcccgctagctttttctgaacattacccccataaataaactatggcgtcgtatctagtgaccggctcttctcgagggctcggattggcgctgatcacccgtctagcaacattgcctaaaaccgaggtggggacaatcatcgccaccgcgcgccaggacaattctgctcgactgaaggaaatttcaagtgcatcagcaggacgagtgcagatagttaagttagatgtcaccaatgaatccagcatgaaagaggctgtggcggcagtggagcgccagttgcaagggaaagggcttgactatttggtcaacaacgcgggagtgagtgactggtccccaaccggactggaaggaatgtacgttgaatatcttatcagaacactcgcttggtactgatttgacagggacaatctgaatgagacgttcaatgtcaatgttactgggccgcatcttgtatcgcgcgctttcctgccacttctgcgcaaaggcgagaagaaaacagtgatcaacatgtgagtatagtgggaaagaccacacggaggtttttatacgacgctaagaagctgaccgaaatataagatcaactactttaggctccatggctatggctgatgcgtttcgacctctgccgtcaccggcatataagatctcaaaggccgccttgaacatgctcactgtacaatatgcacagcaatatgcagctgatggcttcacctttcttgcgatcagtcctggtgtaggtgaagcctttccactcatttgttgatctactaacatcgaaagtggcttcgcaccgaccttggtagcaagcgagcagatcttccggttgaagtcggtgccgagaaggtcctggatatcatacaaaaggcaacgccggagcagaatggaaaatttgtgaacatacatgtccctggatgggagaagcgagagggctcaaatcagtatgatggcaaggagatcccttggtgatccggcagggaatcttttgccacattgcttgatggctacaccgaattatcaaagggaaaagatgaattacctcataggaagtcctccgccacgagatcctatatgccaatttcctttcttattactacttatggtctgtaagaaagatgattcaatctgctagttcatcaagtgtaccctaggtttgtcactctagctacctgatattagctctaggccacattagtctttgttcggctgtcgagttttcacaaaatcaaccaggtcaaagaagctctttttgtagtgccgctgctgggtggtgcgattgacactttgaatgccaaattgttgtgtgtagtccccaaattcccaattgtcgacgaagctccaagcaagggctcccatgacgtgcacaccgtcttcatatattgacttgagaatttcagacatgtaggaaagatagtacacgctcctaggagagtcaaatagctggtcagagagctccagttctgcttctgcatgtaccggaaacccaaactctgataccagaattgggtgtcggaaagtattccacaggtaatagagatactctcggagatacgtcggtgtgatatacacgtaggactcggagcgatacccaatgttccatccgtaaacattctttgtttcttgcttgacgcaatatgggaaaagatcattcgagattgacgggttggcagcgcaagccttgatgccttcctcggccggagatactaccgtagcggtatacggatcaataccaaaaaagtcggatgtgtggccgatgtatttcagttcggatttgctcaagggtttggctccggggagtgtttctaacacagactttgggtactgcttacccaagaatattggatttgcgaagatacccagttgcatttcttggaagcggtcagccgcgaggacatggctagagtttttcggatccttaggcactccaaagttgtcgttgaactttatgccaatcttccccgtggccttcaaggtatcatgatagaagtggtagatctgggaatgtgccttgacaacgtggtctgctcctttgaaattgaatgcgtagagcaggggctcattgaaggtcacccagattgggactcggtctgcataatgagaaagcagaacctagggagtgatccacgtcagacttggatgggaattgatgacttgtggaatagaacccgtacctttccatagttgacaaatgcgtcgacaaaagtttcgttttggtagccggcattgttgtagccaatatctgggtgtcgcgtgatattgtcgctggcgacaaacattaatgggctgtcgaaatgaagcattgtgacagctggctgcaaatgtattagaatactggcatttaacaggtatgaattgaggtatttgggatgtttaccgtcattcctgcatcgagaactgtgtcgatcaagtcattataatgatcaatggcttgttgattgacaggtgttcccggaagagcaaaaggcaaaacccgcgtccaggggattgtaaagctataatactcgacacccattgcagctagtcgctgtatatcttgcttatacaagaaataattttcgttggtgacatagtcctttggcttgctgtcgggtaccaatttctccaacaacgaaggtgatcgaccatccaacccaattgcaccttcaatctgcgccgcactccctgcaaccccaaacacaaagtccttggggaaattatagcagtcggtaggaccaaaatagtcgcgcggtggcaagaccagctcactgctgggcacgggtgtgggactgacagttgtcgagaataacccagtggtggtctactcaagtaagctacaactgcaatttgcgaggaatcccagagcacacgacatacatagttgtgaagatctgcctgtagccacatcgaagaccacgcagcttgtccatatgggtcctttgtgtcagtggcgctgataacagtttgccccggaacccagctgccccacgttgaggtcgaccagctagtggtaaaatgtttgactgcgtctttataacgtgggccatatgtccgtgtggtcgtcggggaaggaacagaggttgcgtatctcatacttcaattagcaagcgatggtgtacactagttctacgaatttcttaccgaactgtttcgttcaaagtataggagaagggctgaaattggtatttcggtgccacgttcgattgtgtacattgtggccgagcagaataacctgttgttgtcaagtatacttcctgggcctgtatagccacagccaaagcagcaagggaaatgaacggcaatcgcatttctgaggtatctattagacagtttttccgtatcatgcctaggaagcggtcccctcaaataatgattcccctcagaggtcagtgtgtttgccggttaattgtcggcccatggtaatatggcgtcaaactcaaattaaggcttcaattggaacgccaagtgccaatgcgtcacgtaactagcccttcatagcgctgatcgacagtaccgcagacgaagttggtaaggaggagctgcaatgtccgatttcctctgctaggggcactggacagtccccggcttccccgcatcgtgcgcccttgcagatccctatatggggtcgcggatatttatcctgttgaataagaaccttgtcccgaggagattgacaacgctttcgctacatttggctgccacgtcatatcaacgcgtccatattgtaccctggataattggagaagaccgcaatcacgcccatttaggctgctcaggcacaaccgtaccttggagaactgtcattctaatgtaattatttgaaaatttctggaaaatcgacctcgaatatgtcggtaaagagcaggggaggtcgcaatgtggcacaagatattggatttgggtcatagtacattaatgagcggctatattcatcaaactgggcttgtggtttagtggtataatactcccttagcatgggagtggtccggggttcgattccccgcgagtccacttttttgttactgtttttttttcatagatctcaggttattctagtcaagactgaaatgaatgaactatatttagtaaagcagtccaaatgtagtcaaattcatgccacgggatatatttcacccgtctactcctcccaattgaaattaataacaatccggccagccacctctcccttccgtagtttctccacagcctcgggcatgcgattcagtgggtacacctcactgatttgccgtagagcccctcgccgtgcgaaatccaacgccatggcggtatcactacggctaccgacaagggtgcccttgatggtaagattcttgaagacatactggcagggatcggctcctatcgtcatggaccctgcaactggaagaccgatgcacatcacaatgccgccgatacggtcgccgataaacgacacggctgttttgtaagcagcaggggctgtcacaaacactccatgagccccgaccccatcagcaattccaataacagccttggtagagtcggcaacttctttgaaatccacgaaggcctctgcccccatctcaagcgacaatttctgcttggattctcccgtgtccaccacgatcggacgcattcccattgctttagccagctgcacaccttgaattcccacaccgccaccgccgccagggaaaacaacccaagcccccgagcgaaggttagactcaaccagagaccggtagatagtgctggcactgcacataattgggcctgcaatttcgtcggggaccccatccgggatcggtgatgcatatcgtgccggtgataccaagtattgctggtaagtacctggtatgatgagccgcaatccagagcattataaatgattcaagtcagccttacctgtcgtcatcagaccagtgagaattgcgcccttgcagtatgtctccttatcatcccagcaaagcgcacaggaaccgcatgtatccaatatcggtttaattccggctctatcgcctaacttgaaagtcttcacgttggctccaactttgactaccacacctgcaccttcatgccccggagatcgcacatcaaacgctgacatgaacgggagacccagatctccttgcatcatatggatgtcggacgagcaaagtccagtgtagttcagcttgatcaaaacatcatcggggcctacaccagagcatcagtggccgtgaacttgtgtacagtggaatacctgacacttcagtcaagattggggtcctacctggttctggaacaggcactgtttgtacctcgacatggaaatcggggccttcattgatcaccactccggctttacagtgggtgggaatctcgacttgagagtaatctatgaccgaacccatgttccgagaagctgtattgcaagactcgaaaagtgcaaagtgttgtctggaaagtctcaatggacaatatacaaaagaattcacaggagaaagtctaagttccacgaagtcaaaatctggggaaatacaaaatataccgtgatcgtaacccctctttttgttggtctcgtcgtcaatggcttggcttgactgaggagtagggacatacgtgccggataatgtctggcactcgacacctttccacttccaatttagctcatctcttgccgctttttaatcttacaggaaaattgaagccgctaaacactctggaaaagggagactgtaaaccataagaatacattttgctgccaaccaggagtgatgccaatttgaacgatcttgccgtccagacgtttatagaaaaacacttgacaaacaattgagcctgtctattgaacgcacccgacggcacggcaagcagtccatcctcgactgctttaggtgctgttcggtggccaacacaatcgatacccctcgtggtcatcccgcatatccacagttgctttccccgcatttgttcttgacgcactgcagtagagaatgcactttctaacgttggtatacggtgtctaagttgtattaatgatgattggtctcattgacgataaaggtgtatgcgccccactgaagtacgtggctttcccctaatttgagtctgccagagaaaggaaggtgataatcgaagacaaccatcgttttgttccaataggagtgcccatcagctagggaagatcccgtacatatacggagtaggtaggtacatgcgtatacgggggatgcagatacaccggaattcgggaaatcagggaggatagaacagggcaagtcagagcgagaatgatgatatgttggattcgaaaaattattcacagaatgccactaacctcatcgtctaggaattaatataaggggattagagagccgcgaaatctatgtcgacaccgaaataaacgaccgaggacgaaaaaaagaggcaagaaatgttaaaagagatatatcaagttcaatcccaaatcagccatccagtcgaaccgccaatggcaagcatgaatagcacggtcaaaatacccgcaccagccttgtcgcctgaagttatgtcgtagtcgagaccgggcggaattgcctttgggggcttatcacctgcattcgggtttcctttactggtcccaccgtcatcgttagtgactggggctgccacatgcgtgatcagattcgcttgaatgacctcaagggcagccatctgctgaccgaagtctttcgtcttatcccatttttgcgctgtccacttcataccacacacattcttattgataccaccggtacaagtcttggcagcggcctgagcagaggcttttagccgtttcatgactatatcgtatgtgaaaggagccatctgggcagtttgagccatccagcgggacaaatatcctttgaaagaccgctggtcgaccatgcaagtattgacagtctcgcaggctctctcgtacatcacgtcgggtgggtcgtgagagaagaaaacactggaagaattgatgatcctctcggtgcgatctttccatttaggatctccggtctgttcatagcattagattggataatgtagtatcggaaggcctcatcaggtcgagttcactcaccaaattatacatattagctgcgccaagcaagtatactccagcgttgtaagtccattcaatctggttgattggcttgcactcagtgaggtcactagctccatcccagaagcgatactcgggggtcatgaatccaacctcggcagtccagttccaggccttctcagcccaatcgtggtacgtttgattgttggtgtactttgccaggcgagacgcaagattgaaaaatccgccagtagagatggtgttcttataattgtagccgttattccatgtaaagatttgccagcgcaagccacccccacacgaagtagtgtcccaccggggaacttgagtgttgaagacagcctgggccatttcaagccactgaggttggtctgctggtgggtttgggaagttccgctccgctgcagtcatagcagcaaagccccaaaaaacctggtcgtcgtttccttcagttttactctggttggccggcatgaatgctttattctctcccgcctgccagagcataccttgtatcgtgatgttgttccaagtatcatcgcccgtgtagaaccagtaatcgataagggcgttgaacattgcaccggcctcccaccaatagtaaggatccggcaaattacccgggttgtcaccggggttcataccagtgtagtaactcatcatgttgttggcgacctgtttggctgcttttttgatagaatctttgatcgtcaattagtcgttgcacagagagagactggtgacagagtggaacactaacctccattctcaagatccagctctatcgcttgcacagttgaagtacccagtagagctacagccagtagacccatccacgaaggttgtgatgcataattgaacacgcgcatggcaactgatatacgccttcgcctgatagaaagcgtaacagaaactgcttgcaagggtctcaagaagaacagctaagcttggatttctcaaggatgccgttgaaggttggtagcgacacgtctccaaaagtcagtgcagttattggaagaagaggtataaagtgattattgatacgaccatgaggctcaaagtctcgttaggatgaatagtatagcttggccccggtctttggcgagatgaggatactgagagacgaagaaaagccgcccagccagcgtcaagctccccaaaatgaaaatgagaaagagatgtatttgtgggtggagtgagaaccacattccaaccgtctaggagcactggcatggtaacaaggcgtggtttcccaggccatttgcacctcctgtagggggaattgtatgagtgtaccttgaacatccgactgcattaagaaggagtccacaattgcattgtagttatatccaagattggatgacaagatgaggagagtgcaacgcgcaacgtctcatttccatggtttccttattggcgctcccgataagggatcgctgtggcattccagagcagctgtcaaaaagatcaatttgatccaatcgagaagactggcgaatcaccgagaggggcatgattgatcacaggagacagtggataaagggcgtagacaggatggtctagggccgcaaacgaacgagatgcaacaattgacgcattccgaagttgtaacttgtgcccctgtccggtagggcctacgctctatggcttgtccttccttgcactggtgaattaaatgagtacaattgtattcctattttgtctgctgtaagcaaatgccagccgtgttgaaggagttgtacagtgcaggggttaaagcctacgagttctcggcataccacagggggacccaccccctgaggtacggagtacattgcaaggaatactttcccgagctagcctctagccataattctttcaacagactataatcatgcgagtctgtccatgtgcataagaattgacgtggttatttgctaaacgagatgaaaaccgattggcgcctggaagcctcgatacctggatgcctgaaccttatgcccgagacatcaggcataaaccatcacgaaatcagacagcatagtaaagcttaccgcctttctcaccgcttatcactacccttttttcctgatctgccacaatgaagctattcagagatcacctgatctggcaacataaaatatttgtttttattccagattcagattaacaaaagatatgcactacaaaaagcataccccacaaatttcaagaggactcgctttggaagaatagggaatatggtcaattcaaaaatgagtttcgatcattttcaggtttctctgttaggaaattaccttattcggaaacggagaacataacaggtttgccggagtcctagcctagaaagttgtcggagaacacctacaaacaacccaatcccacggtcgtatagcccttccatcgcgttacacaatgtaacttttctatgaacaacccatcgcataaattctttcgatacgagctcaacatcactgttggcgtctgaggaaccagaaaaaccaagtgatcatgttaaggaacatgcataaaatttgcatttcacttgctttcagtgcatgtgcctgcgcagcgactaccggctccgaaccccttgttgccactgctggtgatattgctgctatcccgggatggtacctccaatcatcgaccaaagtattagaagggatggatgtactatccatgccgggaaaagatgtctcctcatggcatcgggttggttctcgtggcacagttatggctgggcttattgagaacgaggtatacaacgagacagaattgttctactcggataagatggaatctatcgctgatccctccacgttcgacgcaccctggctttatcgagaagagttcacactgcacccatccgccggtaaatattttaccctaaagacacatggaatcacatccaaggcagacatatatctgaacggagtgctcgttgcgtcaagtgacgagcagcaaggctcctatggcggccatcagtacgaactgacccatcatgttaaggaaggagctaattgtcttctcgtttgtgcattcccaaccaactatcttcgcgattttgcccaggggtttgtggactggaatccctacccagcagacaatggaaccggcgtttggcgaaatgtggaggtttctcagactggagcggtttcgatgtcgtcgttccgcatcctcactaattttactcaccccaattctgagcctgtgaaggtcacctttcggactgatttgagcaattttgaatctagtggtcagcaaataatgatcaacggcaccgtcaaagggccagatggctcggtagctgtgcaaattagcgagacatttgacctgaagtcaaaagagaaaaaggcggtgtctatgagcgtgtcaattgtgaaccctgatatttggtggcctgccctttggggtgagcagcctctatacacgatacatgccagcgccatcatccaaaaaccccagaagtcagtgtcagacagttcaattcgccaaaaattcgggattcgccatgtatcatcgagattaaacaagtccaatgataccgagtttgctgtcaatggcgagcccttccaggtcatcggagctggttatgggccggatatcttcttgcgattcgatattcacagggtgcagaatattttcgcctatatgttagatatgggactcaatactgtgcgcttggagggaaaacaggagcacccagaactttatgatctcgcagataagatgggcttgatggtcctggcgggatgggaatgttgtgacaaatgggaagggtggaaggcaagtcttctcatactcttgccgcaacgttagaacactgacaaagacagtataacgacgaggccgatggtgtcaaatggggaaagtccgactacccagttgtgaaggcagcaatgctgcatgaggcagagatgatgcagagccatgcttcgatgcttggctttttagtgggctcagacttctggcccaatatccaagccaccgagatctatttagacgctctcaaagtcatggattggcctaatccaatcattgcatcagccagcaagcgtggttaccccgaagctcttgggccatccggaatgaagatggacggcccatacgattgggtacccccgaattactggtacaacaatgaagaaggagcggcatctggctttggatctgaattgggtcctggagttggtacccctgagattggcagcctgaaaaagttcatgtctggtgccgagctggaaacactttggaaagaaccagatgcagaccaatatcatatgtcccgttatgattcgcaattttacgaccggaagctctacaacaacgctctatttgctcgatacggagagccatctagcctggaggactacatcgtcaaatgtcagatgacagattatgaggccacgcgatcccagtttgaagcttacggaacgcaacaaaatgcgacgcgacctgccacggggattatttattggatgttaaatagcgcctggccgaatctgcattggcagttgtttgattactatctcagccctatggcagcctactttggcaccaaggttggagcgcgtatggaacacgtggcttatgattatgagagccagaatatttggttgattaaccactcgctagaaaacagcggaaatcggcacatcaaggtagatctcattgattcaaatggcgaagaactgtccgaggccacagtggagagcaacacaacgcctcattcctcgaaggtggtggcttcgcttaacggaattaaaacaatcaaagatattggcttcctccgtctcacactcagtgataccaaatatgaaggtttccttagtcgcaatgtatactggctctctcctaccacggatgtcttggactggtcaaactctgattggtacaccaccccagttactaagtttgccaaatacactaagctggagacactaaaaccggctactttgaatggttcattacacagcctggagtcgccaacagacgatggtttgactcatgctgaggtcctgctcgaaaaccaatctgcagggccggcagtttttattcgtctgaatgctatcaatgcactcgaaagtgtggaaattgcgccgctttattggtctgataactatgtgactctttggccgaaagaaaatctgcggttaactgttgcatttgaaggagatattcagcatactgtggttgaaattacaggaaggaatgtggagaaagtgactctcaaggtttaagcagtgagttgatatgaatcgtttcagatagcccagagaatgatgtgggtttggattaagaggcaacatcttacttgtaatgaaaaattcttcagcgtcttttaagcaaccatttgattggtagaggataatgtttctattcttgtacattgtttcgcttgccgctccgttgtgtaggactcgggtggtgacttcgccctgatataaaatcttgatggctactggtcgcagtatccgatccaggtccatatttagaatccgggccgttggaccaaaaaaacccagtcaggcgcagatgcgtctcactcgatacgaaaaagggggctgtacctctcacttcgtgtaattgacataatgatcaagcgtctgaatcgattggatgcgtagatggctgagggatccgaatcacacctgaatcacatcttgtggcgacggttaggtagtagattactaggtacataactgacgtccacctgtagttcctgtgtatgctacaggtacttcgtactggttacggaaggactccaccaccctatacggaccaatgacctttcttcggaaggttcgggtctatcttctccactcgtttaaattatcaccagtcgcgaaaatgatacctaggctgaatgtgaatttctaatgtaattttgtttttcattggttaatatttgcaggcctgccgaaagggaaggtctcaactctgtacaacaacatagagaaacgagctataagccaataggaattaagtcgagacgtggccgctgttccctgcacgtgccctccccgtgaggacggtctaggtaggaactgggcctgccaccctctccagtcctttctcagacttgcgatcacatttcgccacctactctctgatacgttcactatcggcacccttctcaaatgactggcattccattggtgcccgatggcccacctgatttcggcgacttcgcgaagaatgaagacggggaggtcgatctcgaagcagttgtagagccctggcataagtacgacatcaaaataacaccggaagtttttgatcccatttgtcttggagaagtgctaaatgagagatatctgattgagcataaactcggctttggcggcggttctactgtctggatggcttatgacattcaggacaagacagatgtggcccttcaagtcatatgtttaggggactggggtgaaaacaaatgccgcatacaagattaaaattgtcagaatgtggaggatacctctcatctagtgatgtatctaaggacttttctcctccctggaaacgaacctagacatagggttctagtataccctttgatgagtccatgcattgattctattttgttgagaaaaatctctatggctagtcgcatgtccgctgctcggcagttactggaagccttggaacaactacacaaagcagaaattgtactctgtggtaagtcagcctatccctcccacgagaacttatgagctctatcatgtgcaaaatatttcaatattccccagaaaaacggcttactgcaacgcagcttctacaggacccgtcattccgagctattatggacagatatggttgttgatcaaatcttcattctatcgcttcttgctttcctagtttcttatgctctaattttatttcttcatcaccagagctgggtcaacatgcttcgattaaacgggtcggcactgggaatctaaatctacggaatgtccctttcttgaaaagcaaacaccttcaagatgggcaaataaaatagaggaaagagcttccacggactccagaagcttctagaactgtgcttgcgagctgacttagaatggaagggaaaagagagtctgttctcatcactaaaaaattcgggaatgtcgacggagatctcatacaataggtaacttccaaggtaagcattgtctatcattcaatgctgcatatctgctgtcaaatcctggcgccaccctaacctaaaattgaaaatcccgtcaatcttgaacctagttagacggatgggtcctattcgcaactttccacatctatacagatcgatgccccaggcaccaaatccatcacatgactcgaccataatctccccttagctggcccacttgtttatccgattctccggcagcaaccccggttacggcccgttaacgccaggctgaacatgagatgggaaagaaaatcgagcttgagataaagcgcgaccgccatgaaaaaatacaagtagtctgggtgggccctgaaaaatgacgttcctatctactccatagacttctcggacatgcagcctgcgcaatcggattcttgtgcaaccggcccgcgtccatcgcccttgtgtgaggttggacatgtgatcaatggagaggaggaccctcacaccctgaatccaaatcattccaaaaaaccagaagttgatcagaaaattcaagcggtcggcgatgaactggtgcctctttactgtgtcctgccaaatggcgagaagactttcgttattatggcgggatcttttgcagcccttttttcacctctctccagcagtatatatctaccggccctcccatctttggctagcgacatgaatgtttctgtctccctgataaatttgactatcaccacatacttggtaatgtccaacgaggtagataaggagaatatgaagctaattatttctagatattccaaggactcgcaccttctttcattggcagcttttctgataactatggacgccgtccggcatatatcatcgcttttgccatttatcttggagctaatattggcctcgctttgcaagacaacttcacggcactgatgattctgcgctgtatgcagtcctcgggcagcagtggaaccattgcactaggaagcgctgttgtagcggatctctcgacccgcgccgagcgtgggaaatacattggatacgctggaattggacttgcactaggaccgacccttggccccgttatcggtgggctgttggaccatttcctcggatggcgatcgatattttggttcctggttattttgtcggctgtttgcttggtggtgatccttatcgttctccctgagacgtgtcgagctgttgtgggcaatgggtcggtgccgccagcctcgtggaaccgcccactgtggacattgttcgtacgaacatcacgattcgatgacaaccaagggactgccgatcactccaccgtccaccgattgaagaagcgcccaaatccaattacagcgctcttgatagccacacaaaaagagatggggttggttttattgtacggatccttcttatacgcagggtacatggccgttattagcactttgtcgacccagttggcgagtcgatttggattcaactcgattgaaattggattgtgctatcttccgatgggcatcggaagcataagctcccgctgggtagttggccgagtcatggactggaactttcgccgcgaggcacagttgcagggaatgaccattcacaaaaaccgacagcaagatattgaaaagttcaatgtcgaacgagcacgcttgacgatcactcttccactgatctatatggctagcctttgtatcttagcttacggttgggtgatgcagtatcgcacttcgctggccggcccccttgtgatgttgttcttcaccggtcttacaaccacaagtgcattcaacaccttgagtactttggttgtagatatcaatcatcaaagcgccgccactgctgcggcagcaaataatctatttcgctgtctattgggtgcgggggccacggctattgcgtcgcctctaatcaaatgcatcggcattggatggacaggtacattcatcgctggtctttgggtgttaggcagtcctgctctatgggttgttttctaccgagggtaccggtggaggagcgagcacaaacaggataaactcaccaatcagacgcacgcttgagcccgaaattcaatctcatgatttgtgtgaatcccgctagagaatgagcgaccggaccagagatgaagccaaccagagccaaccacattgaatatcagatctactctatgctctgcatattatctccgatgtctccaaaccaaaaaagcttgtaaaagcttggcattaggccccaccaccggccttgcactccacaatgaaatgagttgacgacgctagcgccgaggcttacgcatgctcttctataattaaaaatgatagtatggaaataagattgctcagtggtgtccatttttagagaaaatattttctttcattccttgatgtatcagtgactattttcgagcacatcggtctacgctattctctgatctcctatatccctctctggtgaaacttgtatggtttcccatacaccaccttgataagatgcactttctcggggtgtctccctttgaaggggctgtcgctgcactactcctttccggcgtagcacgcgcaatcgatttggatattagcgatgaacgtacgtggtggagttgagattccgcgcctccccggcccatgtcaattaccagagaagttaacttttgatctcataacagaatcgatcaaagatgccgcgagtacctccacttacgctatgatgaaatattattacggcaacgagaccggtcaaattcctggagcctttccagacaaatggtgggaaggagctccactttttatggccctgttagagtactggcattttactggcgacacgacatacaacgaggaactaagtgttggattgcaatggcaatcaggtacggatggggactatatgccaagcaactacagttcttacctggtgagcatcttcagagtctcaaaaggcaacaatctctaatgccgggtatctaccaggggaacgatgatcaaatgttctggggtctagcggctatgacggccgctgagttctcatttccggaccgatcgactgggttctcttggctctctctagctcagggtgtcttcaatacccagatcaaaagatgggatacaacctcttgtggcggtggtctacggtggcagatttggccctaccaatctggatatacaatgaaaaattctatctccaatggggggttatttcagttatctgcacgtctagcccgctacaccggagatgcaatctatctgcagtgggctaacaagatctgggaatggtctgtctcgtcacctctgctaagcaacacaacatggaacgttgccgattccaccgatgttagtaatgattgtgcgacccaaggaaacgcccaatggacatataactacggcacgtacctgatgggggcggcgtatatgtacaactatgtgagaaatgcccttttcaaattcatgttggctttgttcaagtacgtgtactaacctctactgcctacagacaaacggtactacccaagctcaatggctgacagcagtaaatggcctactgaacgcgacaattgagaactttttcctcacgggtggggttatcgaagactattactgcgagccttcagaaacctgcaataataacgaggtccttttcaaaggactgacttccacatggttggcattgactgctctccttgttccatcgacatttgacaccattctcgcgaagctccaaacatcggccaaggcagccgctgcatcctgcacgggccacagcaatggcacttgtggtgtccggtggtataagtctacatgggacgggtggatgggaatggaggaagagatcagtgtgacaaaagtcttcacggcaaatctgatcaactttaacaagacttctccggtgacctcgaccactggcggaaacagtaccagcaatccaacggcaggtgaaagtgacagtgatgcttccagtacaacgactacagtgacaaccggtgacagggcgggcgctggcatcctgaccgctgtttttgtggctggatggattggactcatggctttcatgatgcttggtggttgatttttcgagcacgtgtggacatcgtttacttgcttcctcatttgtgcatttggagttttggcaatctggcaacggattgagtcaatagtgttgtatttatatttacgggagtttcttgttatttttttaattgataccagatttatagacccgtcggtgagagcaagatggttgaaccgactggctattgtatataacggtttacttcagctcacacaatccagaaccatattcgctacatatgtgctggataatgtctagcaactcttgggggtccccttccgttctagtgctcacccccctcgaagaacggcgtagagcactattgtcacagcgatgtcctgcagttacaggggttagtcctaattaggacaagtactttttggcattccattttcaagagcaaaaacgtaaggggagttgtattgatgtcgtgcgagagaagcaatgaccacgttttcagcgtcaagtgtttttcgggcaagtttccaagtgcgtcctctgggtcaatatcgaagattgacggaaactggagccctattttcgcaagtaatcgggcctcgtacatagctccgagtctatacgcggtgatttctgtcaattgctgtaccttttcttttgggtagctgactcctttgagaatttgatccagacagttatgaaagccgatattcggaccggcattgtcggcaccgcggttggaggtaaggtactcttgggcgagatattgtagacgtttgagccgccgtccgagctctagccacttcgctacttgccgcgcatgtcaatgggggaacctgacgcagagactgccattttccttgaatgacacaagaggcaaaccgaggcggttcggggtaggtggttggaagagaactgcttcttccctcaggtgaccttgtcctgactcttgacgatagccttgaatgcggcaatggcatcgtccaggtatacgacatctgtttcaactcgaagattcaacaaccttggaaaaagcttctagatgtgcacaagtagcggtcagttattttaggcagtagaggatacctagtgaaacgaacaggaatccgatcagtgagatagtcccaatggtaaggaaatagatagatgggcgcatgccaatgttcgatattttttgagcgatgagagagatatgtagaaggttagattctctacaacgatcgagatctagtcaaatagctaggtgaagcctggcaaaccaggcaacggcatgtgatcggcacgtggccaccacaacaatatctatacgaaaacaatccaagtttataaatcgaaatttcgaccagacaaggtttagtgccgggaagcttaattgtatgatcttgctccttcctcccctcgactcttctctttcttttcctcatcccgccagctaggtgaagcctggcaaaccaggcaacggcatgtgatcggcacgtggccaccacgacagatataaagtgtccggggattcagcatattcaaatccggggtacaaatactctcttcggtattccagccgcgaaagactagagtaaggtacaaagtgtgtaacttcgggaagaccaaatttcccagagctggctgtaccactgcttcaatcttctggctatatattttcacagttgcagctttcacaatgtcggtatacatctggcggcgctctggggagacgtttatcatgacctcgtccaggtgcatcccacttgatatttctatagagccctacaatatacgtatcgcgacctcatggcgacgaactccacgccagccttcggtggccgttgaatctccagtgaactggcctccgccatgcctttgcagaggatccccagaccgggtgggggacgatgaggatttgctacttggccagctgctgctgttgctgtcttatgtcggggactactagccaactgctggagtaacatgaggtggtgaacaaggtcacttgaggcgtgtttcggatctttcggcgcaagtctcccgaaattcagccgggcggatagtggccattgcgacacgtagtcctggttggatgggaatagaagtggtgggggctgcaatggaataagatatgtgggtcaggcgaagttgcaatgattcgatgtcattctaccggaagaggaatggctacggaggcttgcaagtgcaaattaggaaggcggtactgagtattcaggcagccaagggtatatctgattggactacagtgtagtgctgcgatgaaagagagagttgtatttccgaaggggcagaatacccgactattctagttatggaaggttggtgcctgcaccggactgatggtcaggtgatcaccatatccaacaatatctaataagctgctaaacgtacacataccaagtaacttgcgaggcttaggttcttcctatgcgcattttagtcggtcgaactcttctttgcttgaccagaaattcttgtcgtctacctcgacaaactttgttattttcaggattttgtaattcaaaagaacacaagcaaacatgcaatgtcaatataagtgagggatgaaggtcttggcacataaatgacaaggaaagaaagcaacaaagccattgaagaatgccagtcaagagaaacacttgaaaagcaggatatgaagggctggggaggtgactagaatgatccgcacggcagagaaaatggtgttcggctagtagtcgataacaagagcagtcgcatttacttcaattggtcactggaattaagatctacctggtgttcaacagcagagtgaaatgacgacctaacttccattaccgggcagtgttcccatgtacgcgtctcgatttattgcttcactctggatcgaaactattgacatcaattcggtatatgtgactacgtcgatgtaggcccagccaagaataggagctgatctgtttcaccctagaaagtacgaaattgaatatggcttgagccggcacagcaaggtgcccatctccgtcggaaccctgccacccttgtagccttaggttctggggtgctcatgatgcttcatctcgtccgcttttttatcgttcccctctatatcccgtgggtggattttggcgctgcatcatattgatcgaggaagacgctacaaaatatattattcgacagccccgaacggtcagtgcttttactatcggccaccaatctcagcccaataggcaatataatcccaccccctcttagttgctgatcggcaggcagtcttatcttatggcagaaatgtgtaggtcttgtagagcgattgaaccttctcgcatggaatgttaccgcgcgcgcattgctattttcgatacggagtacaatttcctccaacccctcccaggtcttcattttctatttgagcaattaacagtagtgtaacaagtctgattaatctgaaactgaaatcaatcatgtttttttcgtctccccattacacagatcgtctgtttcgttgatcctatatgttgtttacttctataaaattaccactgagctgagtacactctcgcctttagcctgacaattgacattcttatattagtggagtcattagattctatcgaatatagagtcttgattgaataccaataaagagtgacctgtttgttgatctggaaagcaaaacgcctgttccgaactccaccccgacggcttcggcacgggagacacgccaaaccggcttcacgaggcgtgtcggaatcggtccgcaagtagtctatactatggtgtcattgttgattatatttcagcctgaaaataaaaaaagatgaagagttttccttcgctgagacaaacctgataacggctatggtcggttgtcctcggcagtccactccatagcgggtgtcagccacacctccgattatagccgagactgacatgacttctgactggtcacttatttactctgctagagcactgtgactggatagtggatatctaaagcacctcaagccacagcggaaaagtatggatctttcaaaggtgtctttttgccctagttgaggtcattttccgacaatcagggcccattttacaatggatcaaggattaggccgaagacctagaagactaggaaggaaaaatgtgattgatgggccgaccgaaagagggacatatactgcgttgccttcctcggccagaggcttgtatattcccacaccaactctcggtctattccccaaaccttgatatgatagcatacaatggagtgcctcaatcaacacccagacaaatatgagccagatatcgacttccccattgactctcacagccatcgatccgacgacacaattgaggaaatcgaccctctcgagcttacccgtatcaacacatatcgactgcaacagaaaactaccgtaggctctacaagagggcctactccccgtgacaaatggctccctatgggtgccaataaggattacccacctctgctcccggattctgaagactatgtcgtcgagtttgacggagccaatgatcccttacatccatacaattggtctacatctaggcggtatgttcactaccgtccctccctatgtaaggtacagttgctaatacctcgacagaataatgttagtttgcatcctgtgttatggtacattcgccgggtcgtttaccagcgcggtcttctcggctgctatttctggcctgagcaaggagttcaacacatccgccgaagttggctcacttggtgtgacactctatgtccttggattcgcagccgggccaacaatttgggcaccaggatcagagctgatcggtagacgttggccactgtccctcggatttttcggatgcgccatcttcaccatcgcctgtgcagttgccaaagacctacagaccatcatgatctgtcgcttcttcgccggcctgttctcggcgagtcccatttcagtcgttcccgctgtatttgcagatttgttcaataatacacaacgaggtgtcgtcatgtcgattttctgcatggcagtgtttatcgggcccttttcggcaccgtttgtgggtggtttcattgcaatgagctctctgggttggcggtggataatgtacatctctgcaatcatggtgttcctagggtttgtcctagtctttgtgttccttgaggaaacatatgctccagtcatccttgttcgcaaggcagccaccctacgccgacagactcgcaattggggcattcacgcaaagcaagatgaagtggaagtggatttgaaggagcttctgcggaacaattttgcccgacccattgtcatgttggtcaaggaacccatactgcttttggtctcattgtacatctccttcgtctatggcctcatgtatgctcttttgggcgcataccctgttgtcttccaaggcgtctacggaatgagttcgggtgtcggtggacttgcgtttatcggcattatcatcggcgaacttcttggcggcgtttatatcctcatgatacaaagttcacataagacaaagctggcggcaaacggtgataagcctatacccgaatggcgccttccggcggcgattataggagctgtgtcctttgcaggaggaatgttttggtgagtacccttcttgaaatcctcaacaatatttgatgttctaagctaatgcctaataggttcggctggaccggatacacttcatccatccactggatggcccctgtagcttcgggacttctcaccggagcggggatctttttgatcttcttgcagtgtttcaactatatcgttgactgctatccttcgctgtatgtaaccatgtttctcctgtgaaaactagtaactaacacaattgacagggctgcatccactattgccgcgaacacaatcttacgctcagctattggctgctcattcccacttttctcccggcaaatgatggagaacctaggggtgcaatgggcaggcacaatgcttggatgtatcgcagtcgtgatgattcctattcctgttctgttcaaggtatacggtccatggctgcgggagagaagtaaattggcatgctcgccagtttttgatgttgaaaagaaaccttatgatgtctaatatgaattcatgtgaaaagccaatatacccaattttattttgaagaccagatcgaacacagctctagttagttagttaactagttagtcatagtcttagttatttgtcaatccgcaagggttctttcgttcaactataaatgacgtcaccctgccagtcaatccgccgatccatagatcgatcggattgctaggcactccgcagttcgcgagaatcccacaatctagctaacacctgcgcacttctctcctctcaatatctttcagttcacgatggagtaccctaccaataaccaaataattttcgggccagattgggacctcagtcgctggacctcctccgatgaccgcgtccgtggtggatcatctgtgtcaaatctcgatcctaccccggaaggggtgctttttcacggaaacctcgacattgagacactcggcggtgctgggtttgcttcacagcgcacgatcggagacgaacaagtatgggacctgaccggacacgatggtgttgagctacacgttggtccatcggataggaaacgttacactttctccctgacagacgaaataccacagcagaggccagacggccgtgaacaaagtgctcttgtctgggaatatgatttctgcgagagtgaaacagggcgtgaagtgcgtatctcatggaaagatctgaaaccgacgtatcgaggcaagccggtagaagatgctaggccgttggacttgtcgtgtataaaaaggttccggatcatgattcgaaggtgagttttatgtcaactgagggcgaaacatagatgctaattatatagtttctttggggcacaacaaggtgactttagcctgaaaattcagtcgatcggtctgttccgccagagctaccttgatgatcctagtgtcccgaaagattccatgggccacggtgacgacaagacgggaccggaggaaactgaagagaagaaaagctggtttcgaagttgttgcccattgttttaacttcgtggtcatctccgaaatctaaatgatcctcaaagaattgcatcattgaactcttgtgggatgagtggtgtcatgcgaagaacttcattttgtggatgttgaacttccaaactaggaagggtgctcagtcgttgtaatttaactagcgtttatacaccttcgcaccaaattcttccgacaacgaattttgggaggctacttaggtaaaccatgcaagataattccttacaaatgagccttttttcgagagccccggaagggatttggttgtgggaaatgtgggtttccctcatctcccattcgaggctcttgaaaaacatggatctccgtcgtcttctgtattccgatgtgctccaaaattttctcctgactcgaatgacgactatcatttcggttgacttctggctcgatatgagaggcaaacagcgaagcgtctggaacaagacggataagagggattggcttctgtcgaggagccgactctgtgtgcgtgtacgccgaacccttgcgggagcgctgcagtatggctgcgtaggactgtcggagggtaggcaatgacgagcagatgataataacgtacatctaatatcttcatgagctagaattgcttaaacagtacatgagaacttacctcaatcctagattttatcaacttttgtcaacaattcggagaaaatccctgggggtatgacttacgtataccacatagtaatgtcggcccatgaccctatatacgattagtcggtgtactcgtgaaacatgagtcgaggaatacatacaggtaatgtcagaatggacaggtaggttcttgagcaaaacgcatttgaccagcgttgccgccgccgcactaataagtcagcttgagcctcccggggtgtgatgaaaggagtgagatacaaaataccagctcccatgactgagatgatcgcgaccttcatcttaattgcgagctggacgtgccaaaagatataagccgggaaaacggcgagggccagatcgttgaatgcattgaaggctgcctgggatgttccagcaaccaactgaaagttgagactgaagcaggagccatccaccttcggattccagatacgctctgggggtcggcagaatccaatgatgatcacgatagctaacacattccacgctactgacaccgccatcatgatatataagaaccatcggcgcgctgcggatgcagattgtcccataagccggagcaggaaaatggtcacactcatcttaccagttgtagtgctgacaacagagaagttgggtgctatgactgtgtacttgatcgcctgaatttgccgattgccatctggaatatcgctcaaatggcgtcctaatccgtatgaaatggcgacttggaccaatgaggagcataccagagcatttgccagtgacaaagcgataaagaagtcatcccacccagcgcgcctcagagccacacgtgtgtataaccgcagaccgacaacgaccacggcgacaccaccaaaacaccaggaaactgccgtgatactgacaccgggatcgctcatcatctttgtcaactttgctgccggggtcatcaccacccaaaggccttaaaagcggacgggaaacctcgtatagcgaccataatgatcgcaacgcataccccttattcatccatttcatattagcaaaatcctacagagtactttggcgtacaacagggtactactgtgacatcctgatgagtacatccctgtcattaagccgtcttttcacagccaacccagtgaggaaatcccattggcttgaaatctattggcgggccggggaatgcggtccgggacggggtcatcgacctagcgtgctccacacaatcctttctgatgtcaaatgtggtgaacaaggcgttgttgttgtttttattcccatatctgaaatatcacctttattgtacaactctattgtacaaaggtgaccgagatgcacttcacaccctcatagcgttggctccaaatttaactccgtatagaaagaaaaataataagcggcaaacttgtgggtacaacgtccgaaaatcctttccgacttgaaacgatcgtctagacgccgtacagtatggcactacgcttggatacttggggctagaacctcgaatctcatgagccaagcaagcacacccacagcccaatttatccaccgtgtcagttataaacatgattcgcaaaagcacccaaaaggcgggaaaaaacggatcaaagagtccagggatcattgcaaattcgataacctgattttccttttcagctgctattatacacctttgtcaagttacaactcatcctcttatagagatatctctatccataacactgaagatggcaaccgctgtgtcaaacgagtcattcgaccagctgcagcaccaattgaagcagttgctgggagctttccaaagccaacacgaagaggcagatcgcgtggccgccctgaaggcagcgcagaatctagtgaatgcactacaaaagccgcaggattcggtctatcatctggcctattctgtaaatattgtatcatgcagggtgatgatgatatttgtgctaactcgggctagcctactcatgccatgtgtgtgcgcattgccatcgacatggatatattcaccacactgacggagcggaatcggccggtgtcgctcgatgaactggcagccgtgagaaatgcgagtccaattctagttggtatgttcttgtctacggctttttctattttgcatgggtgactgacgatgaaccttctgtgtagaacgagtcttgcgtatcttagttggcatcggctatgttggcgaatatgacacgcgcgtctacgttgcgaatacaatgacacgccagctgactgaccgactcagtatttcggtaatcaaatttatatttgatgtcggcatgcctactcttgccaaagtccccgagttccttcgccgacaggactaccgaaacccagagggcgctaccacaggcccactacaatttgccgagaagattgacgagagtctttggacttggttgccgaaacatccggagtatcttgattcttgcaataccttcatggagggtgaccgcggcgcccggcctagttggcttgaatggttcccggtggatgagcgtcttctatgtggcgctcagaatgatgcggagacgcttatggttgatgtcgcaggcggtcgaggtcatgacctcgcagcattcatggcacggtatccgcatgtgcgagggcgcttggtgctcgaagatttgccacatgttttggaagagagcaccgtagatgcagagcgcattgaaaaacaaccgtttgacctttttaagccacagccgattcatggtgggtctcgtactctgatgcacgatttggacaattattaacgtgagttccaggcgcccgtatttattatatgaaatttattctccacgactggtctgatgaggagaatcatatcattcttactcagctggctggagcaatgaagcagggttactcaaaattgatcatcgaagagtttgtgctggctgatcgtgacggtgttatgttaccggcgatgtgggattgggaaatgatgattttctgtaatagcatggagcgctcccagtctcattggactcgcttgcttggagcagctggtttccaggttatcaagttctgggcacctcctggcgatgggcaaggcatcatcgaagccgaactcaaatagtttgttaggagctatgaggaagcgagtttgaactatcctgatctttttatttagtttgacaagtcacatgtgatattcgctcgatcgtgtagaaggtaagatgacttatcaagctctgatttccaccctaacatcttgtagatctcaaactatatttttcgtcgctcttgcgcgttgaagaagctattccgataacgcatttccaaccgtacaaaggcagtaaaatgcagacatctttcgacatcaatattagtaatagtgattaatttccaacctcattcgcacaagggcaaattctacggtcaggcagctctaaaactgagagaaataaagggtctatacagtcggtataacctcaacgcttggatatggccaaaattaccgttgtggggtgggaatagaatcaattccgcggtttaactacggagtacagaaaagtatcagcactctacttctccgtaatcgtgccaggcgcccaaaacacataccgtgtgttggtacgccccagtcaacgataattttcactcaacgataaaattgccaaaccaggtgccttttgtatggtatactaatacaaatagtacttatcatacaaaatcttaatatccattttctcgatcctctactaaggcaggggaataataggtctatacatattaattaaaagggctttagtttatttgacatctattcgaaatatcaggtagacttaaaattataagatattcaagtttttacatatacacacacatatgttatgtggtgctttttaaatatatttgtcatacttctatagttattctgtaatttagtaccagctacctgtaagcgaccgctcggggtggtgacgcatacgggttatagtttgctgagcgtagacgaatcaaagtctgtcctaatgtgacctactacatatagggggtagcctagtttatatactctatataagcctttaggcattcgaacctaccccccagcctacctggttggggcgcaccaacacacggacggtatgtgttttggcgcctggcacgattactcatggcattaggcggtgtagaaggcggtctaaaatccgtgggagctggacagttcacccaaccggtggagatcttacgtgatttaaggccacgggttgggtgaaaaaacgacgcaggttgggtgaactgtcgtctcgctcgtccgctcatcccaattaggctacgaaaccataaaaatcaggcactagactgttgatagtaactagttaactatgtaccttcgtagatatatattactcaaatttgggattcggctctgtgacataacaatgaactaaagatcttccttcaattattcatgcactcactgctagtattgctactccaggcctcatgaatccaagtagggtttgcatgaattttaaaccagtgcaatttgtactctattgtcaaattctaacaaatacatgatgatgcttttaacaaatcgaccaagaacaccccaaccccagaagcaatgtgaacgctcaaaagaaatctgacatctcaaaccgaaggtgtagtctgttcattggtgtgtgcttgcggtctgtaatctctagtagacgccgtagtccgagatgttgtggaggtggtgtggctgtgatagtttgaaagtgacggtgcgcttcgcgctggaaagtattccgtctccggctggctggtgaacatcatggaggagcggtcaacctcaacgttggtggtggattttcctttcgtggtcacaaggggtaacttcgtgtacgacggattggaatgcaacagcttccgagccgcgattcgtcgtgtctttgctctctggcgcatacaataaaagagactgacgccgctaaacagcgagatcatacagacgccaaatataattcctgttatgttacccctgcggttccattctgtattgttagtatgatgggaatcttgcgcctagtgggcttgaagactcactgtccagtgccgctgcggcactactcttcgcagttgaagttgtagtacttgtcgtagtcgaagcgctgctagttgtcgttgatgcacttgtggttgatgaggtgctgctggttgtagccgtggagctgctggtacttgaactggtactcgaactggtagtcgaactggtagtcgagctggcagatgtggttgtagatgttgtagatgtagatgtctcggatgtagaggtagatgttgaggatgtggaacttgcggtcgtagatgtcgtagatgttgttgaagtagatgttgtagatgtggttgtgtcggttgtggtatctgtggatgtagtagagtcggttgtcgcagtggtgtctctggcccgaagaatctcgccatatctacgtttcccgtagagatgggctacctcactcggctctgggtcttcccataaatcaacggatgtcgctgtggctgagatccatggtgtggtttcagaggcataggggtgaccgagcacccgagagcacagcactgtgcaaagtgcaaataatagaaaatgcatggttcttcaatcgagaaaacagtacggagtagacaaagaaagaatgaatgaacatcaccgaaaaagaatcggaataatttaagacttgctttggcatttgatagtcttgaaaaaaaggccacgcggcataactagacacacgcgtaagacaatttccctataaatctagtctccaattatggttgctgccatggcttagtgtttatttttgtaccaagcgttgtggaatcagccagtggacagccggtgcaggaggcttggttgaactgcacacgcatatgccgcgcggcaccccacaaggctgattttatggttcaatctgtctctattttttggtcagtaatgttctactcaaatttcaatgttttcaagtgaacagactcaacagagtacaggatcctatcttataagtagtatagaaaaagccgtcccccagtcggctggtacatacgatctagttagttacttactgccaagagacactaaagtattgcgccattgagagataaggagattctggaaaagaaaaattgcctgatcatgatcattctcgttgaaattcaagacgtagagatttatctaaatatcgaatgttttccaatattgaagtcaaaaatatcagagaacttccgatttacgcctgagatatcaggcatcaaaaggtaaaaaaaggttaactaaggtagaaagatccaccatcaatattgacgccaagcgttttggtaggagattgtatttgcacgctcgctacggattaatgtcgtatatcttgaggatatccctggagcacaatgacgcagttggatgctccccaaatacttcccgagcgccacccgattccgcatacgcttaatgcctgtttaggaagtggggaatgaagccacatgtctatttccactaacttcagatcatccaagtaattaatcccaatatccccgggatcgtttttagtgtccgtcagcggcaatgacgcagttgagcgttgtacacgcttcccttatgaaaggaattactatatgtaggtggcattgtgacaagaccatgtggctttctagttacagttctttacggaatgtaacccccgcaaattttataatctgctgatagtttctccatatgaaaatataatgtagtatcattatctaaaatacttcccgttggagccatcaaaccccaatgagaagacccttgtgggttacatgggtagtcagctgctgcatggaatgtaattgctaacagtttctccacaaaggacatgtttgtatgtatgtagacagaatcataaatcttttcttccgttcagattgtatagtttagcaatttgactttgagttattgtctgtatacaaacatcgtcaagtgtttgatctgtaggttaaattcgggagattactgatataaggccgacgaggtaaatcatatttcactacatttgctgagctattataaaaaacctctagtccaaaatgcgtgaaaaaccacgggttacagctgctttagagtcagaaaatcaatttaaaatcaatggaaatgaggctgtgtattattatggatggcgggaatgtagaacttgaactagcacagtatagagggcaactgagtctctacttgcctgaaaaaaaaaaacaatgttagatatatacacgccaaggtatcattgatgttgtcgtccttcgaaatgatgtccctattttacttctataccttcgtacgcatgtatatataaaataaatgagacactactaccctgcaacatccggaggcccgtaaacaaaaaagaaacccgcatcatcagcaaatttttgatcgtgtggacattgacgcaccaactctacggactttccgccccaaagctccgtaacaaccacatggttccttgtaaatatggaactgattggattcggagagatagggaacaaacatcacactcattgccctaatgatgaaacttcgtaggtcagctgcgagaagtctccgagtgatttggtgaatcaatgatatatttaatgatctgacccataagaaaaatgaaagaagatgccagaaacaaaagagcagctcaaggtaaactaagagaatttaaaaacaatgacgaagatacggttcattctgggtgtgattactttactatctactctagttcatgctgcgtctacgggaaattaccacatacctcgtgtcagaagacagtcgacagaccgactcgtatttgctcactttatggtaaatattccgtcgagtgccttatttgtgttggatatgtactgatcatcgaaagattggaattgtgagcaacagaaagagcgcgtcagactttgacgatgacatgaagcgggccaagtctctgggaattgacgcattcgctctgaacattggcgtggacccctacactgaccaacaacttcaactggcatacgaatcggctgccaacaatgacatgaaagtcttcctatcattcgatttcaactggtggcacattgaacaggctactgaaattggccagaagattgcccagtatggtaccaaacctgcgcaacttatcgtcgatgacaaggtgtttgtttcatcattcgccggcgatggactggatgttgcagctttgcgagccgcagtgggaagatcaatatttttcgcacccaatttccatccatctactggaacagacatctcgccagttgacgggctattgaactggatggcctggccaaacaacggaaataacaaagccccaactccaggtcacaatatttctgtagccgacggagatgatgaatacgtcaacgcccttggcggaaaagcttatattgcccgtcagtttcatttccattgaatttaaatcgattttctgactcttaagcagctgtatccccgtggtttttcacgcatttcggaccagaggtttcttatagcaagaattggaacttcccatctgatctcctatggtttaacagatggaatgagattcttgcgttgaaaccgagatttatcgagattgtgacatggaatgactatggagagtctcattacattggtcctttgaactcaccacatactgacgacggggcctcaaaatgggtcaatgacatgtaagaatatcagtccctcatccaaaggaatccctatttcaactcgaccaactaacagataactacaggcctcatgacgggtggcttgacatttcgaaaccatatatcgctgcgttcaaagcaggccagtcgtcccccgacaaccatatatcatctgatgagctggtgtactggtatcgacctgcaccacgtggggtggactgcgactctacggatacttgcatggtaccagcaaacaatgggagtggaaactatttcatgggtcgtccggatggctgggagtccatggcggattctgtcttcgttgtttcgttgcttacatccccagccacggtgcaggtcaatagcggcgggactgtctataattacgacgcaccagcaggtgcaagtgcaaaggaggtgccgatgggagttggctcgcaaagctttacggtaattcgtgatgggcaaactattctgtcagggaccagtttgaaggagattatcaatgactgcgtgtgtggtctgtataacttcaacgcctatggtatgtgaaggtattaccactggttattaccccatttctgactttgatgatagtcggaacccttcctgcgggatttgatgatcccctccagcaagatggactctcggcctttacacagggcttgcgtatccatacatgtcaaccgactccctcattaggcacagtacccccagctcccccatcttcaagtacgagcagcacgttgccgagttctcctccaacaacacccccgagtacaacacccccgagtacaacgccgcctgcaagtacaacgaccccccctgaacaatgctctactaccacatcgactgccgtgatcactgttacagtcactcagactctcagtccatcaccttctactcctccaaacggtggcagtggagataaggtctgcattgcgggaacaggatcggataactacgtaggattatgttccttttgttgcacctatggttattgtccagctgggccctgcacttgtacggagtatggggatccagtcccgtctccaccatcaactggagctcgtggggcacctcttgtaggcgaagacgattcgtacctcggtctttgcagttttgcatgcgatcatggctattgtccccccacagcctgcagggtagtttgagcgcgagtctcaaaaggggtgagatagttctcttaacatattatcgaattgtgatttaaaatcataacatgacttgtcgctggccgatttaggttccaatgtattcaaggctatgtcagatatgtttactgtgtgccggaagaatatattccaactgtatgaattcatgaaagtcctcaactaccaactgtaacaataacatcaagctttattaaactagattttgtagcaatcccttttgtggagattgaaaggcaaggaacctcagacaaatggagaatcaagacaaacactatagcattgccagcaaagcttgaactgcagcaaaggctagtacgagaccagcaggtcctgaccttccagccgcgctcgccgccggagttgtggcaatggtggtagcagcagcagcgggggatggaacgccagtggtagtaccatttagagtggaatttgctgtcgctgcgaccgcgctagcagtggaagttatggtaaccgccaacagagttatctggtcccaagcgacggttgaggtgctggtgccgggcgtaccagctgtccctgtaacagtgtcggtacaagtataagccccggtggggagatcggtcacatcgcagacaacgtggttatatctgttgaatcaattagcaatctattatggcttgcagcaatagttgagagttgagtaaacgcacaggtcggttgcggaacttatcaagtattcgacgctcgttggagctgcggtaaaaaaaagcccagggcccataccgcattctgagctattggtgccattcggacaattgatactgtaggtagttgttgctgaatgctatttgaaatttagttcaatgttcgagaatcattcccattgatacgaaccgcgcccaaaacttcacccaccaaggattgggagtgagcgtttggaataaacaaagaaaccacagagtcgttggcagcaagtcccagcgttgcaaatgtcaggagagcttgcaaaagcattttgtcctagtctttctctgtatatggtgattgagtacaagacaagaggagattttgccgggcactggatcaattaggaaagtcagcattagaagaataaattatagttgtgatgtaaacgttatcatcatcattttctaaggctgtcgtgttgttacggaaacttcttgcgtgttgtatatcgaaatgatgaaactgccatgtcatacggatcaaaagccggccatcatcttacattttaatattacaatttggcgctcaaagcccaaaagagagagaagaggtgataatgagaagtgataatatatcctagtgattggaatatttatcttactttgtgtccacgctggtgaatgcgccatattcttcataacaggggcatccatatgatatcgtcattattaccattcacgaatagagccatctggtccatagaactccttgggctgccaaggctctgtctccttgctgattttccgtaccaggtcttcgtcaatatcaattcccaagcccggtttagaaggagcagccacgtatccctcagtaatatcgaagactgtcttgtccaccaagtagctgttcagatcaatatctccagcttcaacattgtagtgcatacccagcgacatctcctggatgacaaaattaggtatcgacacggccacttggagacaggctgccaaggcgataggacctagaggacaatgaggcgcgatagcaacatcgtaggcttcggccatattggctatacgcatggtttcggagatacctcctgcgtgggcaacatcaggctgtaggatatctaccgacgaatcctccaagaatctcttaacttcccacctggagtataagcgctcgccgaatgcgataggaattgtagtatagtcggaaagttgctttatcgcttcggggtgttcggacagcagaggctcttcgatgaatagagggtggtaaggttccagtgccttagccagctgcttagccataggtttgtgcaagcgaccgtggaagtccacaccggcatcaagacccagagccttcacttgtttcactcgttccacacaggactgtaagacggcgggcgagtctagccagttgacatcttcggtggcgttcatcttgatgcacttgaggccttgggcgattcgttcttttctattgacagaggttgttagaatttcagtctcctttgctctcctttcgtttcttgcaactcacgctgcagccaccacatcgcttggtcggtcaccgccaatccaggcataaacctgtaccttctggcgcaccttcccgcccaggagctcgtggactgggacacccagcttccgacccttcagatcccacaaagcgatgtcaatccctgatagtgctgacatgaataccggtccaccccggtagaacccgagccgccatactgtctgccaaatgtgctgaatgtcactgtcaaaggtggttagagcttttatctgtgaagaaccatgattcaagcatactccgcttcatatcccacaatgcgagtgataatttcatcgagtgctccttcgaccgcaagagaatgtccctccagtgtgccctctccccaaccgaagcgcccctcatcatcggtgactttgacaaacagccagcgaggcttgacacggaagtgctcgatggacttgatcttggccatggtgagttactggatgaattcctcgtgtattgaatgattccggagtaacaatttgagtgcgactgaattatattcgctgttcacgacacaaccccacaccatgaacgcatcccacgcgggggcctcgggagaagtccgaactgattgccgtggtatcagttctatgaggggattgatggttgaccgttaatctttatagttaaatcagccaagtcaactcagcccatatgttccttagagatgtcgaatataggttgggagcgtgagttgcctcgtcagaatgagatattgaaagcattcactgaaacgcaagctaacttcagggctacatcgagctataaattagatcactgtctgagcagctcgttcccattcaatgacatgccaacactatatcatctcccctggttatccatgaagtccacccccacgcggccattctccgatgcggggaacctcgaaagtacggtttttgccaggcagaaaattagtaagaaattaataatccacgctcatggccgcggggaataggtgagaccaaggcggtaggaaaggcgttaaagacaatatgcgcgatggcatcgcaaacgtagaaaagtctcaggaaaagacaattcttttcttttggtcgttacaaaatgtcggatcgaattgatgtcctcgtctacggcttgggagcgtgagttcaacctcttcataaaaaagatgatatactaacttctataggattggctccttctatgccttcatcctgagtcgctccgaccgcgtgcgactaacggtcgtggcacgttcaaattatgaagctgtccaggcaaatgtgagtgcttactagacatgaggctattctagtattaatatctgggccccaatagggaatcaatatcaatagcgagaatcatggccagcataactttcgtccacaccgaggtatgcgagatatgcacgattaaaatcaagctattttgctgacaagccaacaagtggtaaaatcaattgcagagatttcaccagtcgactatgtcgtatgcgctcacaaagcaatcaatcaagatgatgtggtagctcagctacagccagccatcgacagcaggactaccattgtcatcatccagaatggcgttggtaacgaggaacccttccgaaagcacttccccaacaacacgatcataacctgtgtggtgagttctctttacatcataatcccacagtctcatctgacttctgcagacgtgggtaggagtcatacaggcaagtcctggaatcgtcacgcacggcaaatccgaggctacgcagatgggcttatttcccaatcccaaggtcgaaagccaagtcgagcaacaacgccttggaacatttgccgatctcctccgccgtggcaagactcaggtccaggttgctgaggatatacagacctatcgatggcggaaggtggtttggaacgtagcatggaactcgttgactgctctcactatggtggatacacaaacttggttgaagtcatcagaagatgcaacgccttttacacgccagttgatgcaggaggtcatcaacatcgcccgtggatgtggtgtacccctcaaggatgatctggttgaccagcttatggacaaaatcaattccttgcccggcattggaagcagcatgcagacggattgcaaaaatggacggccaatggagatcgacgttatcttgggcttcccagtgcggaaatctcgagaacttggtatacaagccccctttttggagaccctctacgttcttcttcgggcggttgatggtcgactcagggccgcgcagtagatcatgatacttgatttggcttcacctgatgatgtagcgctcgctatagagttcatacacctgaagattgtagaaagttatttgaattgtccgtgatagtcgaatatacttgagacttaagaccaagactccacttcccaacggaggatgccatctatagcatactacacacttctagtctcgactgacgacgtcgattatataaatagggctcatgcaagatattcgacatatcgcgatctccggcaacaccaaaaacaaagcccaaggagggcaatatgcgaaagaaaagtcgctccagataatataaacacggctccggatattctacagtgtaccgatgcgacgtcccgctcatgacgtcgaaaatgcaagtaaacagagcgagggccagcctgcttgttcgtccgtctatttcgggaggttcatgaaagtcagaaacacccatgcgcaaatgagtatataccctaaaaatattatatagcgtattgaaatcggaaaaaaagtcgtagcacatatgacaggatcatcagggcggagtaggagaggggggacttcgaatctcctgtagctgaattgaggtggtcttgtccacctccacttctggggcaacgtccggcggatcgggaggtttgatattctctggttcctggtcaacggcgaacctccagcggttatcggcacccaagaacatgcggaaagcgtagcgtttgttcagggatacgagatgagcatgacgtttggcactgctccaggtatgtgtatcggtaaaatcatgaagcatttggctgtgcgaaatccagggaatgatggctccaatggagcgcggcattcggggtgctcggaaccggccatgtcgtgttccgaacactaaaagcacgacgatcgtgtcgaaggcaataatggctagcgcgatggcaagtgacggacccgacggaaccatgctccaggtaacgcgggtaatggtggaatttgtggctgggaccgggtgggcgaggggttcgagataaatatcacgccaaatcgagaagtaggtgctatagacccattggtatacagtgcgagtcatggatgtcagaagcgcggggttgagggcgctaaagttggggtcttcgcgttcgtagagacgggcaacaaggaatcctgcccaatcataggaagagatattgtatgtcccattctgcatgctagtattgcctacaaagctgctagggatagcagcaaagactttgttgaactgaccgagactcacggtggcattgtcgtacatagttccttgggtgacggatgttgtgggaacaggttcgtgccaactgatctgtcccttctggtcgaaagcaatagaatagttttgcaacttcgcctggggttcacagtgcaaagcaattgtgttggcatccgtgattggcgtgtccggcaaataatcccaacggccgacaaccagaacggtcgacgtctggcagatgtccgagtcctcgacatcatccggggacaggaaatggatagatagtgagattccttcctctttgcttttcaggggtggcatgcgtgccgtgcattccacggaggaattgccaaatagttcatagcgccactgttgatggccattggctttatcatagacaagagcatcggatgaaaggggctcacacttgagctcagctccaactccaagcgttgaggcaccgtaagtcacatccggattgcgattggacacgtgtattgggacaaaagattgatttgggctagtccaagagagcatagggactccactgctgatactagtctgaatcaaatcatactcagtgaattccacagcgaagtcggtccgccaaaatattgactggctgtagttcattgacaaatcgctggtttccaatgttgaggttgtcaattgttgagtgaagagcgcacccgcaacgacagtcaaagccatgttgacgaggcacgcaattgatacgagaacgagcaaaggctgccggttgcgtactgccttgaagaaaatggcgagcggactttgggacgaatagttcaatgacaacgacgtccttgccgaggcgttgcctcgttgcaggtggacccaaggctccaggacgctgaggttccggtgaatagaggtacatagagcccccacggacgatgcaacgacggaaggtaggaaggaaaggacaacctggaatgcacttgaatcggattgggtcaaatggcggaagcggccgtttcgaagtaaagatgagaccactaatccgatgagaataatgactccagctagcgccaagaattcaataagaaagaaaggaattacgagaaagtgaggcatccgatcaacacgggtttgtaggttctctccaagctggacgggggagcctaatgatacagtcagttataattctcgacgatgaatgtgattcgaagggtcggggtgatacaaaccgtcttcggtgagaatatccagcctgttgccagaaggtcccggtcgccagtaacatcttgcattcttgaagatacgacgaagttgccgagtagagaattgatgaaattccgccactggctgtgcgaggatgttggatgggtggaaaacattaacggcaatactacacatggcaccaatagaccctgggtcgctttggagaaatagttcacgagaactatacatgtaaaggaggtacaccgtggtcaaagtggctatggcaagaatgaactcagaccaaagggcggcaaaggtaacgacagcgattgcgacttggttcgacaggcgctcggcagcgaggatgctgggtgcactatccggatcaaacaggcgaccgagtgtgagcacgaacgtctgcttaacatcacgcgcaatcttggattcaaattcggtctcggtcatgacggtcgatgtgtcgagcaccagcacaggctggatgtctcctaactcctggctgatgataggcagttcagtcactgtgcgagcgcccgtggtagcattttcacgaatgaggagcatgtcactagtgaatggagcgcgttgagagagcagggcttggaagtgttcaatgttgaactgagcttttgtcagcgcgcgggtggtggctcgatcgactttgatagatatgatggagctgttggagtgcatggtcacgcgagcctccgctttgtgatagaggatatcacaggcaaatgccataccagacgtggggaaattggtcgaatctgggctggtcgtattgactccgatgagcataccatacagatcatacggaccgcagccatgttctgtgaaggcctggattcggtccggaaatgcttctttggcagcagcactgatcatcggctcccaatagcgtacttgcagataatcggtggtagggaagaagacactctcgtattgaaaatcaacggtacaatttgaggcgccttcgtgtgcattattgaaatcaataccagtggcattccatgaaattgttggatatgccgactcgggatcattgatagcaacggtgagcttgtccccaacagaaacattctcgcaggaaaggtgcgcccaatacagcgtctgatcaagagtccacattatgctctcgtcttgctggctgtcgggtatctccacaggcgccacggcatacttgggtgatcgggaccggcccaatagctcatgtgagagaaccacgtcgccattggcttgcgttgagatccagttcgcttgtgtgtccaaatccacaaggttgggccagctttttacggtcctgtcgtcgatcaccgtcacctcgcgtagctcaaataccgtactctgtagagcgggaagaatcattcggattgagagcgtgacaaatgaaacccagagcacaatccaatggcggcggattgcagcattaatcggagtcataaaactttggccgaagttgtagttgatgaagaggacggtcgccggcgctccctcggggcgggacaactggaagtatggttctaggcggaggacatcaaaatcggtcacggtccataccaagacgagcacgagggagatgattatagggaggtaattgtaggcaaaagattgtatggcgttgacgtcttccgtgtagctgaaaaagaccaagcccccttcgcgatcgctatactgccgcaacccttccaggcccagcagcatcgttaacatcaaacatataagagtggacaggtagggcgggcgcagagccattgggcgccaacctcgatgttgagggcggactcggggcaaaagaaacggggcaaaacgacctagttcgcatctcgattagcatactcgtatactccatgagggttcaatgaagaatgcgaaaggaaaggggtgtcaggcgaaagcagccactcaccaatctgtgatgcccagcgccctaccccatcactaccggacatgctggatgaggtcccgaaggcggacaatgtacttgatacaaccgaagggcattgccaaatcaactttcaaccattcaacaaacctctggtgccagcacaacaggccatgattccacaaagggggtgatagaccaaggttcaacaagacaaagggaaaagagagcactcggccgtaaaaccagatgaaaacaatgaccaacccagaaccaacaaaatgagatggatctcagaaacggatctcagaaatgacgaaggagaagaggagaatcgattttgttgtggctgtgctgtctgtgcctgtacccacacgtggggcggagttatcctcaacaggcacgatcgactatacaatcattccgtacctatattgtaggtgcaaatcgaaatctcttttgactcaagaatccaactaatctggaattctcctatgtgaaaatgaagtttagtgagatttcaattgatcttctagtaggacattggttgatcaagcagtatatcataccttaaaataacctaattcaaacgagcgattaacaagcaatctctagaaaattctatggtttcatgagtgaataacggttaagttctactatttatataactggagataattatgaaaataaatcaccagcaaccaaactagaagacgacgagataaggatatactaccaagtagcatagctgggaggacaagcaacgccggaagagaaaaagcgtgctgggattcttagacgagctagttccaaggagagcagtagcagtgagggtatgggggtcaagaagtaaagtaagggtctgtatagtgaaaagctcatagataactatcggcttaatcaattatatatattcaagcatcgggtgacaaacttgattgatcacggttgaattcatcctaagattgtaagtattgcatcgccatatgtcaaattagacccggctatcgaagtttgggcacgcacgtggagcttctaaggttcagccatatgggaattccctatagatatagggaactgttgtagtttggcatatgaagtccagcggttcaacaggtaggagacttgggcgatccaagtgtggttgggaattgggatctttgtatccgtggtctagatagttctggttaagaatgatggcctggctcatcgccacttgaattttccgattatcgggcctgccgagatcggtccactggttcaccatcggcatgcctaatttacgggcaccgaaacctctccacgcttgacttcaatatgcatatccgagaactccgtacatggacagccaatcataccattgattctgattggccattctttatccttatcatgtggatatagtgaatatgctacctagtaatctatcgtggaactacatacggaccatagagtcatatgttgtagtagtagcatatcagtctcaaatgcctagacgaaagtgggtgttttgttgtatcagctgtatgtgacatcttgatctgtatttgggcatggcttgcttgatggcctatcaaactaatgatcatgaacccggagtgaatcacaatactccggccggatatgcggccacttctcctaacgacgcaagattttgagaatctgattatctagctcaacgttacaatggacgttatcatatgtaagataacactccgatatctttcaaaaagtctcttgaaatctattttcttcgctgcgtcatacatagctacgaagaagttgaacactagatttcccttgagtctagttacccttataaccattgcaccaactcgactttgttcaaggcgacacagacgaatatcaattccaaagtcattaatttcgagggttaaggataatccggaattgcctccgaatataacaggaaaaacagagaatgcttcacttctcgtctctctgcatttctcaaaagtatctgtacaatgctgtaacccggtatagctacatccctcgtttgtcttgtttctttcgagctcccttgaggaaatctaatcaagcccattgaatatccgagtgccttctttatatatagaaaagtaaccgatgccaaggagagaatggttggaagctggatcgtcagacgtttgttgacgttggggaaatggcccgatgccttggtcttggcagtcggagctttccccgagagctcgcactcgcttccctcttgctactccccacctatttccaactcctctcctctcctcagcaatgggtattttcagcaaattggtcaagaccaccgtcgcaggcagtattgcctcggtcggtgtcttctggggtgccacgcgcaatgacgttttcgaagccatggacagctccgatcccattttccaatcagccttttacaagaagttcaacccaaacaacaaccctacccttcatgatgtctgcgttcgtcgcattcccctagacaagattcaaccctcactggtcgaggagaagggcaagttggtggaagcgttctgtgccggtgtctggggtggcctgggtaagtcctaccctggggaaacgagccttgtcgcgatgtaacatgctttttaacacgttgggtttctctccaggatacattccccagcgagccatccttgaacgaaagtaccgcggccccgagactgccggtcatctctgggaccgatcggaccttctcaaaaacaaatacgaagtaggaaccatcgtcaccgaccactttgaggtcgtcgagaagaccgaggaccgtattgtcgttcgctgtggtgactctccacgtaaccgtgacgtccgtccctccgatggcctcttcgaaatcgccgctaagatcaagccgaatgaaggcgttgctgagttcagtctgaagagctgtttctaccaggggctcggcaaggcggaaggtgcgcctatggatgacaaagtggcttgggcacaccgtcagtatactaagttattgctggaaaccgccgtgttgaagaagtgcatccggtagaagggaaggacctcgcatacgaaagaatcctaaaccttcggttgggccatgtcgtgtatatattcctaatcaggtatccataatcatggtctattagcattcaacttcaactcaatcgggacaagcataaaactttcaatgtttatgtttttctattcttctactttacatctatatttattcgaccacaaagattctgcactttcccctatctaaaggctgacatacaaaaaaatcaagacttcaccacctcggcctcgggctccttcatctctgggaagtccttctcctcgacggcgattgtttctacatcactggtcagagtgatagccaggacggttgggatagcgataaccaatgagcccatgcaaaggccccagtccatagcgaattgggtcatcgcgggtttcttcatggcattgatacgccacgccattgcaccaccaacactctggaaggtcttgtacgctccgaccagaacggccgatgtagcgggggaattggactgagcgcccacgatccagtagcagaatgattgccacagcacatcataagcaccgtagaagatgtagaggaacatcgggcccactgagatgctaccctgtgtgtaatcgatatcctgcttcaggcccttatccagacgggcagtagaccacaactggaacttataaccaccaccccagatgcccattccagtgacgaacaagaatacccaggcgatgcgagcgcgcatgggtcggttcagacccgggaagtcgagaatgagacccatgacgagaccacccagcatctgcgcaatccaataaagcgcgccgttgagcgaacgcgtccggatattaaagttcataccattcacagcattctgctggtaggagtagaaaacattggcggagaagaagagcggcaggatacacaacacccgccagttgcagatagtcaggatggcatggcgaagaatgtggcggaagttcttttcgctctccggtgtgatctgcaattgggcacctttgacatacgatggcgggcaaatgaatactcccagggcccatccgaaggccatgatggtaagtaaggcgatgtacgttgagtcgctaacagtgccgctcgtcgacttgaaattgatgccgaaactagcgagagatccaacgccaccaccgaggttgaagataatccagaagactgcgattgcgcgacccttgtgtgattcgggcacataggtagtcatgatggcgccctgtgccacccacaagaatgatgcgccaacaccgagaagggcaccggaggcaatcacaaatgcaccattgttggttgctgttggaagtatacgttagctgtgtatacaacggcagtgcggattggaagctgaacatacagttgaaacacagaagactgccggaatacaatgcataagtccatcctccgagcaagagacaaactctgggtcccacacgatcgaagatagggccgacaacgaagagtgcagttccggcagtacaggccaggagagctacagtcgcatttgcagcgacggtctggttaacttgaccggaaccaccaagaccgctgagagcattgtacatctaatagcattgttagttcttggaacttgactaccagtccttgccaaactcactcccgggcagcagaagcagatgaaactgatcaagctgatctggaaccaagaatcggtccagatcttgaacaaggtagagcgattctcattgtgggtgccggcgacacgcccttcttcgactgattggttcgacatcttgtgcgtatgaaacaaaaagtccggggagggaacgacggggatcttatgctaaagacttatagtactagtcccgacattcccctatatcggacaattagcgcttatcgagtctggggccccacgcgatacggcagttaggttgcacgcgatacgctcatggttgcacgcgagaacggcgtatgatatgcgtatcttcagcgtatagtatgtggatatctgctgtgaagtagtagcaaaagtggagcaagactgtggcctttagattgaattgcattatcgggccttatcacacgacttcttctttctcggccgacgaatcctatggtagataaactccactacgccgccacatcggttcatgccgattcctttctgggaaaagtctggagaagttgaggtctccaccccggtcgcttgctaaccggtccaatcctgcgagggcaagatcccgtcgttgtaactctaccttgtaacggctcccattagatcgggccactaactgtctttttggtaccagggacttctcgctttacgtacagagaatctgtcaacttcccatcttggtatagacctcgtggaatggagcggtattaggcacgtggctgacatcgcgctatctccgaaatggatcctgttcgtctccccaatcgtctaaaagccccccttatcgccctttttccgtgtagtttgagctctgactcgtgattcgtgaaaaaaattatattaatattctgacaagcaaaggcgttaagcttgtcatctcccaagcaatcatcccatccttggaagaacacccggcataatggatctcggaagtctatctcaactccaaacggagggggtcaatccccgaaccgtgcatattgaccgcatgtcgacccttgacatgtgcactgtgatcaatgccgacgatcaaaaagtccctgagagtgttgttccttgcttgcccgttatcgcgggagctattgacgcactgacgccgcgagttcgacaaggcggtcgggtgatttatgtcggcgctggcactagcggaaggtgagtcacgtgacagtggtccggtagtcaataaacaaaaagattaaaccgattctaggcttgggatcttggatgcatcggaaatccccccgaccttcgctgcccctcgcggacagttcgtcggcctgattgctggtggagatgccgctatccgagaggcccaggagggagccgaggatgatgagaaagccggtgaggatgagatgaaatccctcaacctgaaccccgagcttgatagtatcattggaattgcaagctcaggccgcacaccttatgtcctgggctgtcttgctttcgctaagcgtctcggttgtgtgaccattgcggttgtttgtacagttccttctgcgatcggcctttccggaaatgtggacttcctcatttcacccgtgtctgggcctgaagtggtcactggtagcacccgtctcaaggccggcactgctactaagctggtgttgaatatgctaagtactggtaccatgattcgcacaggaaagacttatggaaacatggtatgtgatttgcccccgaccgttgtactctggctaaatgttgatattcaagatggttgatctcgtggcctcgaatttgaaactcgagcaaagatcccgcaatattctacggaggttgagtggaaagtgtcagtccttatccgacgctgaattggacgctctccttgcgagatgcaatgccagtgtcaagctggctatcttggttgcggagaccggggagtcagtcgagaattgtcggggatacttcgacgctgccgggggagtcttggccaacgcgctggctgccatctctaagcccatcgaacagaaggccacagttacccctactcaaaagtttgccttgtgcattgatggcggcggtaccaagtgtgctgctgctgtggccgacggtcccaatgtcgtcggccagggctctgctggtccatgaaatctgtatgannnnnnnnnnnnnnnnnnnnnnnnnnnnnnnnnnnnnnnnnnnnnnnnnnnnnnnnnnnnnnnnnnnnnnnnnnnnnnnnnnnnnnnnnnnnnnnnnnnnnnnnnnnnnnnnnnnnnnnnnnnnnnnnnnnnnnnnnnnnnnnnnnnnnnnnnnnnnnnnnnnnnnnnnnnnnnnnnnnnggcggtcccaatgtcgtcggccagggctctgctggtccatgcaatctgtatgatctcttctcgttctgattctatcctatgttcaccctaatgctaactttgtctagaaccgatagcattggaaatatagacggagtcattgccacgttactcgacgccgcaaaggctgctctgcaagacgccctgccaagcgacgtggaacagacagaatcttcttggaaggaatgtctccaaacatccttcagctctgtctggattggactagctggtattgaccgagctgggctcgagggagtactagcacccaagctgagacaagcgttcggaatcactcatgaaaaggacctccggttaaccaacgacgtagatctgttgactgcgggtgttccacaatcattcggtacaccctccgtccttgtggtcattgcaggcacggggagtgttgccatgcggtacaaatggtccgaggatcaacacagatacgcacgttgtgcccgttctggaggctggggccatatgctcggtgatcagggcggtggctacacaatcggtatcaaagccattcaacacaccatgcgcgtcttcgagaatatcaccttggggcttgataaaactggcggtgatgatctttccaaggcggttgcggagaaactgggctgtcaggtgtccgatagtgctagccacgacatgttgaacaacatcttggcccagaactactctcaaggggtaaaggcacgcattgctagcattgcgccggttgttctcgacttgatggacaaaaatgagaccgcagcagatatcgtgagctcccaagtagctttgcttgttggcgaaactctcggtcgcttggtcaagcctgaagctactggctatcagccatccgaggcctccgtgttggtgttggcaggaggattgatgaagaatgagagatacagggccacattcgataagcaactggactcgcagaaattgtctttcaaaggaacggtggttgttgaagatgcagctcgttcaggtgccacctactcgagtcgttgagcctggttgggctgctttttccaaaaaatcaataaatagacttcttctacttcgcttataatcaattttcttctcttttttttctttgctcaaacactctattcgtctttcatctttttgaattgaaataacaatcggctcaaatttcactatcgttctattttaacattggaaccgcttcaatcaccgattccatcgccggactctggttccaaatccccgtgatttccaggccggcactatgcaagagatctctccactgtcgctctgaccgctcgacaccagctcctatactcatcatctgaatatctagggaggcctgcatcagcggcgtatcggtgtctggcaggacgaaatccacaatgagaatccgagaatagtccggcgccattgctgtcaccgtattgcggaggatcttgcgactgatatggtcatcccagtcgtggaagatagagcgaaagtagtacgcacgggcacctttgaccggttgaggatccatgaaattgtatcccatcacctcgattcctgcactctctgcctcgaccccttcgatcacgcttggtaaatcctgcagtaccattctgccaggcagatggccatattcccggcggaacttgcccagatcatgcccctggttgccaccaatgtctactaggaagacggtatctttgtatggcacggcatggccaaacagtcgtccgacggggtatatatcgtaccacatcggtctaccctcgcgacgactagccatgtacgagttgaagagctcctgctgctgggcatgactcgaaagccactcaaactgactctgaccaacggcccattgcataggcgactgagtataatcctggggattggcatagccgtgggagcgcagatactccggaagtttgctcagggttggaaaggtaagatcatatctaaacaagggtcagtgagtaacggcgcgaagagacgcaagccaccaagccacatcacatacatgcatgggattccatctctcccaatcggctgagtgagtgccaccgtcttctcattggcaacatagagctcgggagtcggtgtgacgcacagcccaagagaagccatgacacgcatcagtcggactaattcacggagttagccgaatcacaatgtgtgacgaactaatgatattgcaggaaaaagtaccaattaaatcacgctcagcgcccgtgtattctgccagctgagcggctgaaagccccgttcctctgtgccgcttctccacaagcatggcgaaaattcccaaatcaatgacaacgcgcaatgcagcattttgaggaggctatagtccagtcagaatgagaagtcagttttggtccgtggaacgcctcacctggtagatcagacgcaacacggtctccgtcggcgtttccactgcagacctcagctcgtcgatcactcgtaatagctcaaagtgggcttgtggcgatggctccaaggcttctttcagagccatttggccgagacggctgaccaaacattgaaagggtgtggtgatcgtcattatcgctgttcaatggaaagaaaacaccgatacttagtgtggaattctctgcttcgagtagtacaagctaggatgatggaactatttggctggatctcgattgcatcttatagttcatggcgcaccccttggtgacagtaacatcggacaagtaaatgaattaaagacccttgtttccatcggcgttcaattcattgctacaacagacggatgcaatatgggtaagcttacaccgaaaacagctgaaacccggggcatatcacatctagacgctccactgttcgatcattcttggtccatcgtctgaatacaccgcatttgagagagaagttaacccgatcgagatgacctagggtgtacgatttgaatccggaccatctgcgagtgtctactttctgtactcacattatcctcattggactttactttttttaataaaaaaaagcaaatcactgaacgatcggcacaaaaaaggaatctggcgatgtggctttgtgacttatgctataaagactgtgatagtgatcactagccgctgccaggtcaatccccaaaacatttcagtgatgccttctcttccaaataccattaagtccgaatctgactcgcgatggaagccagctattgcaacagttagtctgggagcagcgcatttacaccccattatcgccaaactcgatgctgccgcctggaatggtcagcaaggactcgaactctttcatgatgatatagcgcagctcgccaagacccttcgcgcccatgcaactgacagtgccctctgcactgatcgggacttcgagatcgacgcagcacatgctattcgagatctatcttctgagcgtaatctacaagttctagctctccaacctttccgacactacgaaggtctcattgatcaagaacggcatgcggaacgtatcgacgaactcaagcattgggtgcagttatgcaagattcttggcgactcagtcttcatcctgatcccatcatctttcctcgacgcctcggagatcacctccgaccgagaacgtctcgcagcagacctggccgaggccgcagatgtagcattccccgtgcgcatcgcatacgaggccctggcatggggaacatacatcaacacttgggaagactcatgggatgtgatcaaacgggccaatcgacccaatctcggcatctgtcttgacacattcaacatagcagcgcgactgtgggccgaccccaccgccgcaacagggcgacttggtccgagcgcagaccgagatctgcggaactcgatggaccggctggtacgggagattgatccagaccgagtgctgatggttcagcttgccgacggcgagcgggtagcccccgagacgcccttccttcacgcaccaggcctgccaactctgctagcctggtcgaggaatgcgcgtctgtttccgtgtgaagaggaccagggcggataccttccgattcgcgaggtgacggatgcctgcatcaacggtttgggttataccgggtgggtcagtatggaggtcttctcgagatccaccggggaagataacccggccgtgccgatggagcatgctgcccgggctagtcggtcctggtggcaggttctggaatttttgaaagaaaagtcggggaagggatccatctaggtcttgagaggcttgaagatcagcgcattttgtttcagtcagtgttattctacattttttcggttataaatggaactctgagtgcattcaattggcacagaggaatgatagtcttggtggtaaaataggccagtgttttgcaatatccttttatcgtattctcgttcttgatgtcgataaaccagtcatgctcgaggcctacacacatacccttctgcaatccaaatgtgttagatctcaaatgaggaaaccaataatcattccagaactccgaagaactgcatacccaaccaaactatcgggtgcatctccttctaacggaacgctacaggatcattcccgttaactggaatgttatgcccaggtctgtattttgagactgagaaaattcaaaataaggttggaatgatccgcgtagaccgatcgaacgggtcggcattcttgaatggttcccgagaacgtttatcctcctcggatactcctccgtatagagatcagaactccacagcacattccccggcttcccggatgcttctgccggcccgctcccgatccaatttttagagtggagtctgcatactagatgactcccaacgctgtagtgttctctaaggttcctagaaaaaacagctaaatcccgtttgacatggacctcgatgtctagacttaccgctgatctatcttcaagggtggtgcgtcactcttctgtgtcattcccctagccaggggtgaaaggagacgtctcctgcaatatacgctttcaggtgagacatcgctgagcccggccctttattcgttcgctgtctagaatggtcttagtccgatttagcactggtggaagagtaagactgttgtacgttacgataaacctgttcaacaactttgggatatatatgatggccaatgaaaacagagcaaacacttcatcggggcatatccgagcacagcgctttgtgtagcctttacttatgagacccaaattgttccagactgaaggccaacgttcaccgccgagctcggttacactgattggcacactaggtttcagagtcccagcgcagatctagacctaattttatgcgtttaggtatgttgcaactcattatcacattgaagctctatcacacaggttccttttttttccggcgtctagtagaaagccttttggggctatcccaacggcattttaatcccaactgaggcggatgtgtcccgggcagctctgcggtgtaacaattgccgctggttgcgattgaaattccactccgaatatggagggaaatgcagaatgtatgcacttggttaaagctagacaaaggaataattcccaaaagttggaatctggccactagcaaggtagctagtcagtagcctgagccacagtagatgtagtagaccaatctcgacgttaacggaacgccactgttggatcctcggcgaatgaaatctctggttccaagctgagcgtttgctagtgacacaaacgagtccctcggcgatccagtcctcgtgcattgaaattgtgctgctgtacatggagtgtatgcatatgactatccctgagatattattccctcaaatccgaactattcaatatgcgccttgatgacttttgttggaatctgcatagtcatcacagcatagtatcgggtcctttgtttgctactaggccgatccctgtgatgtgtatatccttctcccgatgcagaaggacttcttttcccggacatcccgaatgcagtcagtataggctcatttggaaacatggatcattgaagcggtctataggagcacccgtcccttaaatacgggttggccctcaatattgcactcgaataccaagctgctgtgatacccttcctctcattctagaatcattctgtactcataatgggtatccaacgtgggagtccggcagcacaggctggcccctccggcactatcaacccgttggtgcaagagtttggatcgcttcaagttctcgacgacttgattcgcttgcgagctgctgattctgttcaatctcccattcttgcctatccccgtttcgacaacgatgcagcttcctatgaatactacactgggaaacacttggatgctatgataaaccaagctgtcatcatgctcatcgatgatggattcaaacaggttggtaataacttgcgctgcgtgatgtcatctctaacaaattaatcgctaggcaacgcggagtccatccatcgtggcacttcttacattgtccgacttgaacatggtgatcacctttttcgccctaagtcgactgggttatactgtcatgatgctctcaccgagactttcgggcgaagcctgcgtgtcattgctagaaacggtcaattgcgagtcaatcatatatggccaatcccccaatatccgctcaacattgggcgagatcctttgccggaggctagtgagctgccgcccaatgctctcatgctcttcatacaacaaattacaatcgtcatcgcatgttctgcgtctgcgtcgcaatcgaaatcctgaaaaggtcgccttgatccttcattcatcgggatcaacaggcaccccaaagccgctcttcctcacacacaaagcaatcatgactcatcctctgcgaggtcctggttttacttctttcaataccctgccatggtatcacctccatggcctatccactgcattgcaggcaatgtggatgagaaagacagcctatatgtggaacgctgcgctgcctttgactgcagaactcgtggccagggccctcgaagaggccagaccggagtctgtagcagcggttccatatatgctccaaattttgattgatgatccccgtggtataacagcgctaaggcaatgcaagttggttacgtacggaggtgcaccctgtccggacgagctgggggatcgcctagtaagcgaaggagtacactttggaggttcattcggcctgtaagtactattctgcgagtatctacagccatgcaaagactaacaatctgcagcaccgaagctggccttgtggcagaatcaatctcacgaccgaaaggtgacccttattggaactatctgaaattcttcgacaatatccgatcatatgtctggatgaagcccatctccgaatcagatctgctcttcgagtgcgtttatcttgctggtcatccagcgttgacaacctcgaattcaaacgagccgccaggatccttccattcgaaagacgtcttcacccctcatcctacaattgccggaaggtggaagtacatctcacgattggatgatcgaatcaatctagtgaatggcgagaaggttttaccactcccgattgaaggccacatcaaacaacaccctttcatccatgatgcagttgtcgtcggggtaggaaaagctgctccgggactattgatttttcgagcggacgaacctgaagccaatcgtctctcagacgaagaatacctcagtgcaatctggccgacaatccaagaagccaactcccaggcagaggccttctcccaaatctcccgcaatctggttgctatattgccacatggcgccaagttttctcgaacagacaaagggtccatgatccgagcacaggtctatcaggaatacagcgaacttatcgaaggcctctataccgaagggaaacagatgtacgggaatcttcagcttgacgttgtggagacagggcgcatcctggttcaactagccgagcacgaacttgggatagccctctctggtgtcgacgccaatttcttctctgaaggcgttgacagtctcaaggcaatccacttccgacgtctcattcttcagcatttcaagtttgaggtaagccagcctcctggtccgaacgtcatatttgaaacgggctgtatatcacagttggctcggcatatctgtgctttacaaaacggcgagatattcgaacaggtcgggagtgatgtctcggcgatgactgaattgatcgagaaatattctgtgtttgagaggcacattcccgaactacatgattgttcaggtccgaacagtgtagtgagtgtttatcctatcttgctgtcgcgaatcaggttcagaagctaacatagccaagcttttaacaggagccacagggtcgattggagcccacgtgttgtacgagctgcttaatgacgactccatctcgacggtgtactgtctcacacggcgagaatcgccactggaagcaatactctgcactctaaccgacaaagatcttctcatatccccagaacagagaatgaagatcgtcgccttcgatagccgcattgaccaacccgatttcggtttatctctggacgaaagtacaatcaaccacatgctggattcagtctcgctcattatccacacggcatggcccgtcaacttcaatctcccactgaccgagttcgagccgcacatccagggactatacaatctgatccaattctccctgtcggtgcagagacgcgagcctgccgtcatgatgttctgctcgtcagtctccaccgcgctcggttcccgagcagccgaaatccccgaagaaccagtcgatttggattgcgcctttatgggttacgggcagtccaaattggttggggagcggattgtgagtaacgcgcggcggagtggggcgagggcttattcactccggattggccaggtctcaggccactcgaagaagggcttgtggaatgactccgaagccctgccgctgatgatccggtcggcgctgacactgggcgcattgcctgagctatctcagccatgttcttggttgccggtggataagcttgcgtccagtattcttgaactagctaggacttgtgctacgccgagtgagtttggggaaagtcatgcgtccagctcggctttggagtacgttgatgactcgattttcaatctgtgtaattctcgcgaattcacctggtcatctttgcttcatacgctgaaggattctgggttccggtttgatgccgtgccttttgaagagtggttgctgagacttcgtcggagtgagacaaaaggtgaggaacttgtcaatccggcggtcaagctcattcatcattacgagacgatgcatgggaagaattctttcatacagaacagtctcaagaggtttattacggacaaagcagagaggagtagtgtgactttgcggaatggccgactgagaattattgatgatggaattctgagatgctatgctcaagattggttggcgaggtggacagtctagggagtgaaatgtttaaatttgggctaaagggtgtctgtatatattgttggatcactaatagttcgaggaatcaattcttcattaactacttatgcttccttttgtgtgcaatgtgcaagaaaaggcaagacgacggcctcggaggcaaaacacagactgaatacagactgaatcgaaacaaaaccaagcaggatacggccatctatagggcctgctgtactgtacaataaaaaagatgaaatctgccaaatttggaccagtttcaaacgcgatctagaacaaatatttaagccaaaaacgcaacaattagtccgacaaagagagctgggatgctcatggacaactgatagccagcaccggtgaagaccgggctagctccagactcagacccggtgggaacatagtagccagttgtagcggatgtagtcgtctccggagaagcagcggtagtggcagagctctgtgctttggaggctttggaggcctcatatggaacgctagaaacaatggcagaaggaaccaaagaaggaaccgcagaagaaatagtagaagacgcccatgatccaccgaaggtctcggtggggagggttgcaacggacgtagcagcgacaggaacagctgcaggcttcgagttggtgtggctctgagcagttgggacgtatgcgacactggagggagggaccacggcagctgcagaggtccgtgcctccgtagcttgggcggtggctgggatttggacggattgcacagccggagcggagacagttgtcgcaacagaggactgtgcggcaatagatgaggactcctcagcctcggggcagaaggtcgcagttgcagtgactatagaggtgatagtccgggtcttcttgctggcgatgctggtcgtagtgctggtgctagtagtgctggtggaaggttgcgcgactgcttcggtggcaatgctttcggtagtagctgcgacagtaggaaccgaagtagaagtcagttcctgaactgcgccagcggtttgagtttccttggaagcaactgagtgcacagtggtggcactgtgagtagtgtgggtctcagtagttgtctgcgagactacagaagtagcggcagtggtagccgacgcggactcggatgacgaaatcgaggcaactccagtctgatagatcttgaccgagttaatctcccagtacgtctccttgaacttggccgggttgttggcgacgtagttgtggcagctctggaaggaatcgctatcggtcacggggcagccggaactaccaaacacaccacctgcccagtctccgcagaaggtgacatcaaatacaaacgactgggccttgaaggagttggcaacgtcgcacgactcctgtaccacggccataggagtgccaaattccgttacatcggggttgccgctagtaattgaggccgggatcgagctgcgagggaagtaccaaatcttgaggaaatcgtcggtccactgcagtgagtagacaccaccgttttgtttgttgaaagatgtgccatagctgccctcctgaccctcgaccttacaaccgatggttcctatatcctcaccacaccctgtagcattgaccgaaccggtcatatccgtatctgtcaaactgcaagtgccggctgtgtgcatgacgatttcgttgtaatcctgcaagttgacaccttcgatgatatcaatctcaccgtctgcaggccagttctttccgacagaccaaaaggcaggccaggtaccgcagacgctaccaggcatgtgggcgatatcggcgataaccagcgactggtcgtagtatttcttgctgccaatacgtactgagtcacggcccgtgttgccgttggggttcagcttggtagcatgatcgacaccgagatatacactgccggtatcggtgaccttgacgagccctgaactttcggcggtctccttgtcgaggtagttgacgaagccattggtcgggtctgaaccaacgtgaaaattgaaatagtccaggaaattgttcccctgccaagtctccaccagggagtaactcgtggcggccacgggggaagataacaaagcgagcatcagcgatccagcgctcaatgaaagggttgaagaaaccatgttggaggcgtataacaagaccagatgcttgagataatccagaaagcaacgagaataaaatgagcgagagtgagtttgataaaaagagagactaaaagaaagaccgacaattccagattgtcaaagattgtcaaggagaaaagaatgtgagcgtgtccaacgtacaacgcagcaaaagtgggaagtatttggcccaaatacctttcaccagccgcacacgcccatattgctttatgctaaaaaactggagatcaatcttgtctatccagtgacaatgcgccagtgcctgagaccttctgtaataggctgcaactccggagtcaacaaaccccgtggcgctctagtccaggaggccagtccactcatgatgatccattcttcagactaataggccgaacaacataaaggggatcgactggtcgctgtcacagcggttaggagtcactttttctcaatctgaaaccactagagtccaccaaggggcgacccaaaacaagcggtgaaacaggagaatctttgcatttgaagaggagaataaaaagagtcgacaaagaaaagtatctagagagtaattcacatcgcgatctcccctcattccttcatcggcacattccacgtcagaatcaggatcaaaatgtgcgatgttatgatcggagttgccggctctccaccttgcctctttcgatctacatatccacttggctgccgttgggcgcttatgtgtaggttctcttgtaagtctagactgtcctttgtttgtctttgttcagctaatcagaatatatccttgtcctggtgctaatttcaataagccacataatattaaacattgaagagacgtcacattcccgaacccgaggaatgtcggcaacaaagcaaatcggggaattatctaccatcgtctatgctggggtatatattctaggaatagacggtgatgatcgtggcaatcccccaactcctacaatgttataccccgtattggtggatagcaaattatagattaggtatcttttgtgtggcaatcctatacaaaaggtacagaaacacagcatagtttaattgttccaaccccacgataatgcagtcatgtgttatattaaaaagccttatttcagtgcagattaaatctttcttctcgcagccgagtctagatccctaatcaggccgccatggttgaccgatatatatatgtgacgggtgatgtgctggcatttctcatccaccaatgttggccctttcttgaaggtggaatgcttatcgcgattgacaggttgctgtccgactcttccaagatttgttcaaatcgtattctttgagttcttgactgttttcgtggttttacatcgtcgtatactcggattccccggacccgctatatatatcaaggtcctttatggagtgatgaacatgcccttatcgtcttcaagacttttccatgggagcaaattcctataatctcgagatagggttgcagatattattggtggtcggaactatgcgctcggggcatttccgatacttttagtacctattgcccagctgtgatgacgatgtgacgttgttaacccgggcttttctgccgctatggcctccgatattttaatgatcttatcagaatcctgattttatctttgtaggttcagatacctaagtccatgatgtcaagcttgggggaagccaaagatgtcaatttatctatcgaagaagaagtgaacgcgagacgaggctattcagcgtaagcttggatgttctgattttatatagcgattattaatactttccagtgctcttaataatcctaaagtatccagaaagtccaaggataatgcattagacctactcaatgatgagcttgacggggacacacctcgacattaccgtgatgaggttccggaccagagtacagactcgagtggtctagttggcgtggaaaagtaagtgatactcatgtacaataccaagtcgattactgacaatatttttccagagctgcacctgagtatcacgataatagtgaaagcgaggatgactaggtggagagacatcatccaggatagaaattgaattacgttcacgcattagcatattctgcaggctataaacaagcttcttcgtagggcaagtgaggcaaaagaaatgaaatatctatgttctataactcttgttcttttcttctactccattggcgcggtcagagtgctttcttcatccggccaccttcggaatagatcctggagatgatccaggggagctgtgagcaggtcgactgcagtctcatagcgtgggttgtccagatcatgtggatgcgagcgagagggcacaaaaatcttagtgcggctcagagattcagccaacttctcgctctcgtcggaagtgagggactcctctaatatggccagatcattggcctcttcgtctttcatatgctgggcaagaccttccatcaacaatgtaattgtagggaagaagcgcggatcggaggagtttagatcctggaaaacgttgagcatttctttgagctatgtcatatcagcatcgctctccatgaaggatatcaacacttaccgctttatgctcacgccgatcatcatctagctgctccttgccagctcgaagcttttccagtgcagggaacactaccagctcctcggcgacggcgtgtcgtgcaagctcccaggtgaactggttctgatatcgggtttgttcatcttgatcttcagagttgacaatgatattgtaataagattcgagtttccggtgatcatctttgatcacgtcgcttatccgaaccatgttggctgatatagtgaacaaccttgagttcatcttaacgttgcctttttgttagccgcattttttctggttcactgaagttatcatgacgtttcgagggttctatatagtaatcccagcgtcccgtggaacgtgattccgaactgtacaactccgaacatttactctggttgagataacgtgatcggataaatatgtcttaaagaaatccctaaggacatgctagcttccctcgaccccatgacttggatctgcagctgcctgatatgacgtccgaagtgcggtgattgcttatttgctgctgcaggaggcccgagtgcctgaacggggcatatgctttgccttggatacatctctcgtattccagtttttctttctacctcacctccactttggcatgagcaaaattcgcaatgaacgttttagtaaaaggagaacatgaacaccggttagagctctcatggttattcaaaggttggatgaaggctgacagtactacagagaacagatccctcgtgatatgcctacatacgagcagatggagagtggactttgcggtcgcgtctcccagtggctatggtctggatggcggggtacggcattcgaaggtgcttccccagatttgcaaaagccataccagctgaatcatggggactgtaaggcctgtcgtgaacaacatactacctgtgatcatacacgacctcagtgctctcattgttggtcacagcagctcttgtgcttctatgtggacccgaaacggaggaaacagaaaaatattcggaaggcaactttcagtgaagtggaaacgagttccgggttgatcaaggacacgacagcgtgactgtatcttttgttctcttgctcttattctcctttccgagtatttatatggatgataggtggttgtaggcctaacgtttcgaggctatcaaagtcctatatgtacttacaagtatttttgcatttctaccatttatttttcttttgagatacacattctaaggcccaagttatattccagtctcatttcaacagaattaaacgaggttcttttgaatctcatagagtgcaagctgggtgtaacgttggaaaatgcaagatttggcatcaaagtcgtctaaatgaaccaccacctccaatctcccccacctttttatgagttaccccacaataaaacttgcgacgaacgccgagtcggcacaacagcgcaacacccagagctgtgttcggaacactgtgacccgatacccgctccaccaacttccacataacttgggcctgcacttttcttagacccttcgaggaatacccggatagctgctgaattgctctttgctttttatgcagtatgagtcgttgattgtcaccagccgtggttgaggcagtttgcgtcactatacgttatatccatgtgtgattgattcgaggtgaaatcctatatagaccctcaaggtggccaatctaacctcagcacacagatggaatcggagtaccggcgactagcggatgctatccggaaccaggccaacgctcatcccaaatcacgctacctagttgccatcgccggcatccccggttcagggaagacaaccacagccgaggcagtagtgcaacagttgaatcagagttcgacttcgcgtgctgtcctactctctatggatggctttcacctttctcgggcagctttggatcagctgccgaaccccaaagaggcacatatccgtcgtggagctccatggacgttcgacgtgagccgctttgtagcctttatctctcgcctgcgaacttgggccgacgagaaaccgctagcagctccatattctggaacctggtcgtcagcggatgtcattcgcgcaccgacattcgatcacgaagcgaaagaccctgtggagaatgggatttctatcacgccggatgtagatatcattatcatcgagggaaactatctacttctcgatgatcccggctggcgggagcttgctgagcttgtcgactatcgcgtcttcgtcgactctgatccgctagaagcaaggtgccgattggctgagcgacacctacgggcaggtattgagaagacgctggaggatggatatcgccgggtggatagcaatgacttcttgaatgcgatctccattcgagagaaattgctggccccggacattgttctgaaaagcgtgacagtggatggtatatgatatatatcattgatactacatattggacaaactgagcaacattcattcatttgtaactcattactcctttatcatctgcttgtggaatacatctaggtatatttgtcagatataagaaaaagccaggatattagcatattaaactcactcggaatctccggcatccagctcgcccgaaccttgcagaagaattccccctttgggggtaatgcttctgggtcgtccaaggatccgacacagatgtagcgaaaataggttttggcagcatcctgattccatttgttagaagacatccgtacccattgtataatgctgacataccccatattccaggatgaagctaccgcaattttgacaaaattctcgatgaataagagctccagatccgttatctgcgacatgctcctttggtacccctttagtaagattgaatgtatcctttgggactttagctgtcaggccatagttagtcccaaaagctttctgttcaatgattttagcttcggtaaaatgatatccccgttcaattcaaagtgtataccttgcagttacggcaatggcagagagatgttctcgcatcatcaatcgaattgagcttcagctcatactcgatatcccggcaaatacaagatcctgtgagagtaggcatgttgaagctttggatcactccgatattcgtgtgatatttcacgatgacgtcactagctttggaggtcacaccatctgatttctggcatgatgatggtgatgagcttagaaaacttaaaacgggagagaagacatctagaacagcccatcaaaaatttgacaaagctgtttatcctagtgagctgtcaaaataataatagaattgtctactaaagtgatgatgtgatgatgacggcgttgatatccggggcgaagctttgagcttatctttatcaacctttcttccgcagatctaataccttaaaaaacttatatctcaaacatctgatacttcaacgtcctacacccgaacagcaagatgaagtccttgaagccaagatcagtggtatcctctttcatctgctcaaatgcaggagaacccaaaattgccatttttcggcgaagtgataaagtcagcacatatcagtatgtatcctcaagtcccactttactataaattactgtagtccagatgaactgatttctctaggcaccacctcgctcccatctcgggcagtatagaaagtcccgaaagtccactagcagcagcatggcgggagctgagagaggagactactctcacctcacgagatatggagctttggcgacagggaaaggcattcacattcagtgatccctctgtcggtcgacaatggaccattttcccgttcctataccgactcaaagactgcagtgaaggtggccgcggcgaggcgggtcttcaaattgactgggagcatgaaggctggcagtggtatagtcccgacgcaatccaagacgatgacaagtttggtggcgtaccacatctgaaagaaagctttcgacgagtctggttcgaagttgacatgaatgatggcgctagcaaggcactgataactggcctgaaacagctaaaggcagatcatcagagcggatcgcacgagctgacctcgattgcgctgcgggcctaccgagatgttattgcgcagatgcacgaggatattgacacgcagtggtgggagaatgctcgcatggctgcatggcatctgtggaaaaatggacgagaaagcatgggggcagccaccttgaatgcatttctcggattgctggccgacatggaagttatcatacatgagaatctcgactccacggtcaaacgggaacgcttgttggctttgatcgaccagcatttggacaagcgcaaggagatgcccatgcgcatcaagcactcctttgcgacctatcttgaatccaagttcttgtctacaacacgctccaggcctacgccctctctcgttattctcaccctctcgtcgagctctaccatccgggacagcatcatagaagccttcgcgtctcttccaattcctaatctggatcttcgcatactggaatctcgtccgctttgcgagggtgtcaatatggcatcttccatcctctctgccttcaaaacaagatttccctcatcttccgatcggcatctcaaattaactgtgtacaccgatgcatccgccgctcttgccagcaaggacgtagatttcatcctgctaggggcagatcggatctcggattcaggctcagtgagcaataaaactggatctttgccagctgttctgagtgccaagcatgtctgtcctgccgccaaagtcttggttctcagtgagctggagaaagtggccgagcctgacgccgagagcaatcggagccaggaagagaatgatccaaaagagctggtgggctgctgggtggaatatggcatcaaaggacttaatgctattgctgagggaattgatgctgatcgagataacacaaactacacagttgaagttaagaatatttacttcgaatgggttccggctgaactcatagaagcgtatatctgtgaagaggggactttggacgccactgctattcaagagaaggctcaacaagtaaagcaaaaggcggacagatactttggtcaactttgagtggaaattgattccagtttacttctgcctttccaacattatgtagtcgtgctattccgaatgacgtcacagtttgttgctgcacgaaataaaagttggtttcgattgcatattcgacctaccatagctagatactacatctgactctttccaaatgtcggaagtactcgacccaggaatccacacctttagtgttccggcaaaagagttgatatttgaatatgtggtccgtcgtccattcaccgaaaaggaagatccacgtaatatcattgttgttcaatgccctggctggggcttaggatctcaatatcttcaaaatggattgcaagggttgtggaccccagaaggccataccagtcctgcagttactagtggctatactgtcatcttcttccattctcgtggaacggatggatcatcccaaccactagcatcccaaatgagcagtatgcccgatcttgcgtccgatttggaggacttgcggcagcacctgcatctcgagcaatatccggttttactgggccactccaacggcggggcaattgcgctagggtatgcggagatgtatcccagtcgtgtcagcaagctcgttctcctcgatcatcagctagtaggatttcgggataagagattgttgcagctcgaagcgacgcgcatagatcctcgataccaggttgcttgggacagtgtgccggatcggcataccgaatctgacgaggaatttacagcgtcggtgagaggcatgtggcccttgtgcttctttgatccgaagcagtatgtaccagagctactgcgtgatattggcgatcggaagctgtcgggttggtgccaccaagcccagggtcgatgtgataagaaattgctgcatccaatgcaaatggtggagagactgagggatgtacaggcagaaacactcatcatattcggccgcgatgatatgatctgtggaatagggataggggaacggacagcaaaggatattccaagcgcccgactgattacctacagtgaatgtggccatttcccctggattgagaaaagggaacagaccatattggatatccgtaaattcattgcaagcaagaccagcatatctctcagaatgtaaaccaaacagataaaatgttgcgagcctgctaatgtgcattgattaaaccaaatgtatcattgtccatacagtaaatcacacgctaaggcggaactgaatatctccaagggctttggtaaaggagaaaaaacatcaaaaacccgaccaagaccatagggtagaggacaggatcgtcaaagacccctaccccatagaaaaaaccaacaaaatatattcacggaaggaaaaaaggtatcatcataatcaggtgtcacgaacacgcgcctgtcgctttgcggtgccaatgtgggtgttgtgcactttcgtggcgaacttcaagctggtcaaggtctccgacatatgagcctggagagggctgaccataacgaacatgagggttttggagtttccacccaaggagaactggagcaagtaggtgagctggaggataagttagtatctggcgaagaaataaatgttgaaaaaaacataccttgctgttccggtatgggatgtgacctccctctttgccttggccgagagctgaaatcacatcgcccagagagctgagactacggttgatgttttgagtctctttcagacgctcgcccgtcgccccactgtgactcagacgttcacttcctgccaagtcaaccaggtttagggtgccttcgctacgttcgccggtgatgtggttctggccggtaagcttgagaatgaagacagagtgggaccgcgatgagcgctcgttggccttggtcgctgctaccgagcggttggcatccgcattcttaagaatagactcgaccatctcgggggagtccaaattgactgttgtaatgtcggtgatagtagttttgccccgctgcatgtcatggcgaatctcgtgcttcttcttgtccaattcatctgggttgcccaacagatcattgaggttttcgttgtagacttcgacaaagttgcctgccattgagtaccgccaacccttctcttccagaccttgcgcggtctcgtaaatctggtgaacagcacgagggatcatgccgtcggccgatgacattgtgtgtgtcttgccactaccagtttggccataacagaaaatgcaaacattgtagccatccagggcgctctgaacaagctggctaatctcatcaaagacctcggcgttctgtgtagatggattgaatacacgatcaaacgagaaagtgttgttcttcctggtaactgttccaaggctggtcctctcttcgggaccaagaatattaatctcctttccatcatcagtttcatctggatactgcataagagtgagatcggaagtaggttcactcttaagcgaggggcgaactcggcagaacacgcggatgttgcctttgagctcttgcacctggttatgaagtttgcgtcgaagtgtctcttccctgcgcagcttctcttttatcgcctctgtctcggcaaatgcatccatcatctcccgattgcaccgctcaaaggatttagactgctcctcccgtccactttcaaggaactcgatgcgtgccttgagagcacgtattgatgactctagcgtaacactgttgctacttgtggtatccaagttgagtttgagttcttgcaccatccttcgttcgcggtcgacctctgccttcagggcatgtagcccatccttcaatgttgtgatttcgcggtccttcctttctagctcaatttgcgacttctgaatgtcaagcgcagattgggaagtcagcttgccgagcgcgcttactcgtgctgctttctcgtcttcaatctcacggtcaaaccgtcgtttcagatcgcgaacctcctcttgatgtcggtcagtgattgtggcgacttctcttctgctttgttgctggagtgaatccaattcaatacgctggcgctggtaaagatcatccatagcgatttcatgctctcgcttgtcctctttacgcgcctgttctgccgtacttagatgatttcgcagcgaatctaactccacccgctgggtaatattgagttctttcaattcatcccgagaggcttcgagctcgttgactagatgaaaggattagattcgtctcaacatagcccttatcagactcaacttacttctggacttgtagatctcaagtgtctccttgagaccggagcttgcttgaccttgttgatttacctgggccataaaagtctgcatcaatccctccatactcttttcgcgagaagcttgatcccattccgggcctgtgatattgtcaaaacttctgatcgaagaacctttggtcaaaaatgcggggtgggagggcttcttgacaatgcgccgctgggaatatgatggtgttctagggggtgcagtgggagcggtaaaataagaagaagaggacgagaatgaatgcgcatatccgggtgactttggggtggtaacagtggagacattccgaaatggggtactgggcaacacggggatagttgctagattggaaggctttggcaaagagacagggttctcagacactgggagcgctgccaattcactaattccattccaaccttcatccaatccgggggaaacggttccaacggggcaagaagggatacggctgggagatgagagaaattgtagcataccctttcgttttcctagcacactgggagagacgtcttccatatgggtatccaaggcgctcgctgcgcgggggatcgatgcgccgacgggtctgcggccgataaaggacgattgatgccgggacatggccgatgctgggcgcgtgccagggccgacggttgaggaaaaggagccgttggctgtgcgggatgcaggtgcaatcggccgggacatcgttgaagacgagtacgagtttcctcggctatgcgccctggtcgtggtgctaggctgtcgagtgacggatccaggtctcttgatttccgggtttccggttttcggacgggttgcttccggtgctgtcagttcatgttgctccaacgagtcaggggcttccatacgcgacgtgctgatagccttgtttgcgattgtacctggcgccatgatgccagagcgcgagttggttgtcgcagagctggcttcacgtaggccggcctgtggtagccgtgtccgagtagacgacctggttctggtctgaagatggtcagttatatccgcaggcactctgatgaaactgaaacccacagtggggtacttactatgttttcaccgtccatcttgggatttgttgaccgccaggttaccggcgaaaagagtatccgggcgagtaggaggagctcacgtcgagccactgtctgtgttggccgcttggacttaaagtcagcggaagttaggatgaagccagcagttatgttacataccaataaatggtctgggcagtaacctttggaagtatgagtatcaaatgagcgcaaaccggtttctagagggacgaaatgcgaagtaaacaaagatttgctgactcagacatgtgtatgacgctagtccatatccggtaatagcatcagctatcccgtattcgtattaccaaggaagtatttgaaatcaacacgtgatcaacccggaaaccaaagatcaaaggcttcaatgtccaaaatgaaacaagcacagacaaaagaatagattatccgaggctagagacgaccaatcctgttctttgttgactcctttttgaggttgttccgaaattagtagttgattcgtggggcgtctttacctccactcgaattcccgaaacagcggccccagtagccccgttgcttgagcttctccaacatctccttcaccaactccttttccttgctctacttcttttttgtttgctctacgtcttcgtttgaacacttggtaatcatgtctgggcgttttgttcgttcctccaaatatcgtgagttacctctataatccaacatgcgcctccccgctgaccgttacaggccacgtcttcgggcgatcgacgagaaaggtaaaggctacctcctataccaccggatctcctattctgactttcgcaggatcaatgctacgataatcttcgagtctcccgaaacgcctgggataccaacctcctcaaggtgtgtgttttgccttccgcatcacccctgacgtttcactggcgaacccggtcttacggcgcatctaggtcaacccgaaacacattgcggtcaattgggaagcaggcggtggcggagcttttgcgattattcctcttgaggaacggggcaagctcccggagcgcatcccattgtgtcgaggccacactgccgtcgttttggacactgactggtaaggaattcggatatagaacccccgcgtcgcagctcactgaaaccctgcaggaaccctttcaatgacgacctgattgcctcgggatccgatgacggcaaggtatagtgcgaataaacaacagctatcagcgttgcgactaactaattccaggttttcctctggcgggttccggagaacttcaccgttcggcctgaggttgaggccgatgacatccaggatctcgcgcctattggcaaattgagtggccatcctaagtacgaatccttgactaaacccgttatggccccatgcttacccctccccgcaggaagattggccacgtgctcttcaaccccgcggcagaaaatgtgctggccacggcctcgggtgactacaccgtgaagatatgggatattgaagctggcgccgcgaagctcacgctcaacattggcgatattgtgcagtcgcagtcgtggagtgccaacggctctttgttggtcactacctcgcgtgacaagaagctccgcatctgggatgtacgacaggaacgaccggctcacgagaccaatggccacaccggtgctaagaacagccgagttgtgtggctgggagagcgtgatcgcattgcgactaccggtttctccaagatgagcgaccgtcaactggcgctctgggatatccgtgccatccgggaacccatcaatggcttcaagaccttggattccatttctggcgtgtgcatgcctttctgggatgatggaactaacatgctattcttggctggacgagggtgagtgcccatgatttaatccttaagccttcgcaatttctgacaacaagcagtgacggcaatattcgatactttgagctcgagaacgacaagttcgagttcctctctgagcacaagtctgctgacccccagcgaggagttgctttcatgcccaagcgtggcgtgaacatgcatgagaacgaagtcgctcgcgcctacaagaccgtcaacgatcaatacatcgaacctgtctcattcattgtccctcgccggtccgagaacttccaggacgatatctacccgcctgcggccggtgtgtcccccgccatgtcttcgtccgaatggctgggcggcaaggaggcactgcctcccaagatctccatggccagcctattcgatggcgagggcatcaaggaggtatcaggagtgcaagaaaagccgaccggctcgctggatgcccccgcccctaagcctgccgaggcacccaaagccgctgagactcccaagactgctgagcctacgcccaagcctacttcttcgacggcagttcctaagcccgtctctgaacctacccccgccgcgcgccccgccccttcgatgaaggaacagggtgcttcaatggctgccatggtgaacaagttcgccgatggtgaagaagagactactgtctcagacgatgacaactcgagcttcgaggaagttgccaagccggtggagcgtcccactcgccctgccgctgccgagtctgcttcgccccgcgtgagcagcccgttgaggccgaaggaggttgagacaaagcaagttgaggcaaagcaagtcgagacaaagcaggctgagacaaactctcaacccaccctagttgtaagttccccgctccccatctatatttgtcaaattgtgccagctgctaacttttctagtcctctattgtcccatcacccgctagcgagactccttcgcccaccacttccgtccccaagaacgacatcgagctgatcaaagacctgatcgccgaacagacaaagacgattgcatctcaggcactgcaaatgcaaacactgaccgccgagattgaggcattgaagagcaagctgaactgaataatgtcgtcctaattttggtctctggagactactaggttggtcaaatatcatttaggtacattcgttgttgggagattacgctccgtattggaatcatgcggtgttcaacgtatatgaggcggtgcagtgtgtggataggtttttttttttgtttcttttagcggaattgtcaatacatttgcccattaaaatcaaaattcggatatgatgttcagtgaaaagccagctagcccgctagaacactcctctacggcagtagattggctttatggctcggagttaacacatgtacggagtaactaactgtaagctaatgatatattaatgggctggcaatatgctactagatgatttgaaggtgttgctcctaaatctcatgtgattctattgagagtaacaccatgatatatactagtgatagaccatgttagcgaagataattgtattttcctcttttactttgaatgatcgcagcaaagtagagattagagtaaagaattcatttccctcactcggagttccattggctctatccctaagaagccatttcaaatagcctacgcaagtcccatatctactgttgagcaagttcacatactagctcaagggaaaaaacaacatacaagaaggtaaaaaagcaaccttgagcccttgacgccatgccccatgattttgtactgaagggaaaaaaaaatcgaactccaagctcagagttcatcttcgtacttgtagttgatgcggcggcccgccaccacacggtcctgccggctatcacggcggcggccagacgacttggccttgtcacggtgctgctgctcacgctcgagacgctccttgttgcgcgcttcacgctcaagggtgtaagggtctttattgatctcggccctcttggttgaggttccgttcgtgtcgcgactacggtcctcatcggcacgtttcacacgacgggctgggggatggtcgccgccgatggcagacggggaccgatcacggcgagagcgcttgcgatcacggtcacgatcacgctcccttggtcgatctcggtcgcgctctgaagttctgtctttatcgcggtcgccatcacggcgtcgttcgcgatcggaatcgcggtctctgccacgtcggtcgcggtctcgctcacgatctcggcgtcggagatctctgtcctgttctcgtgatctgtcgtcttcgcgtcggcttcctctgtccttggaggagcggtaggtgctgctgattcggcttgctagatcgcgcgaccctggggcttcggaggatgctttgatcctgccgtttgatccatctttctctgcgaccttttctaggcgatcagagggacgggaatcgccctttcgactggagctgcggctacggctgcgatgacgacgggagcgttgcgaccggtgcttgtctcttctatctcgctcccgatcactgtcgtgatgtcggcgccgcgaggatggacgagaggatgtgcgggatggagagcgagagtgccgggcgacggattgtagctcatcaacccgatctaggcgtttggtctctgccccacgccgactgtcacgatcgtcttcagtaccacgaacagatggtgaacgggggcgagaagttggattttgcgagggagattgagatcgagaatgcgcacgttgggacagagcgatggatgtagcctttgtgcgattatcctcagagggttcactactggtcgttagcatttataagacaaaaggaaagatagaagaggaaagtctcaccaggagatactgcctcgaccctgaatctggaagccacgttgtcgcagaacgctggtgttgggtagcccctgccgcatggcacgcggagcagctggagcgccttcgacgcccggccccggttcttgtccatatcggccatacctgtattgaccatactcattactcatgtgaccgtatccagggccagttggtacagaattatcaaggctgtcaatggtgggaattccttggggttggtctgtggggatatcttctggattacccggcacatcgggtccagtttcacctgattctgcagtctcatctgtttggacattaccttcagcatccattggagtaccgttgaggccattagccatgcttgggttctggttgacatagcctgagttagcctgacggtaatgaccttgcatgggtccaaagccacctcgaccggggccatgaaactggccacggccgcgacctcggtatccaccgcgaccgtaaccgccatagtaaccggactggtagtctgagtgagaagggtaagcagacatattagacccgccaaatgcacctccataaggaggacccgtgccatttgcgaaagcatttggattgaatttattttggccgccttgccacatattgttgttctgttgggatgcgtcccatcctaaggatccatacatgcccccgttgtagttcatcccagtgttcatgcccatgccagtcatgttcattccgtacatcccctgacttgccatcgggtccatccccatcggcatacctgtggagagattagcgaggttgaaacggcaaatctgggtaatattaaacttacccatcgtattcgggtaattgaacatgccagccatgaaaggattcatgccgtttccgttccagcccatcacggggaagtttccagccacgtttgagataccggattccccaggaacctccccaggagcgggaacaggttctccgttcagcggggtttcgttaactgcggcatcttcggtcgtcgattcaagggccgtttcggtaccgttgagttgatcaccagttgcctcgggctataaatagggtcagtttagaaaaagaagagttaatacagcagtaaaaaatcacctgagctggttcatttgccaaacctgggacacttgggtctgcaatgctctctccaactgtggctggcaccgctgtgtctggtcccggcacttgagacttcgactctgtaggctccgtatgatccgccgtctccacagatgtcacctgctcaaccgcattttgctcgggagctgccgatatttttgtatctgcaggtgtgatactggatggtgttggaggcgctgcagattgacggtccttttcccgcttcttctcttcggtgcgtaggaaagccttgagcgtggtccgcagagccttgttgggtttgcagagatcgggcgagacgggggtgtgtgtacagacaggacatgtgtccgagagagaagcttggcctataacagagatcagattagctaccatttgcgacaggtgcggaactctccaacatacaggtctcacagatggactggtcacaacaggggagacgaaatgcgttcaccgccagcttattgcacatggcacatcgcagcttgaaggggatctcatcttgggccagggtactgccgaatcattagcatcgcgaatttttggtcggcatatgagtactccgtacctggcaatgtccatgagagctggcacatccgccaccaccatggctggagatggctggagatattagatgagctctgactagacagaaagctccagtgacatggcttcaatgtccggtaaaaaagtgtagaggttgatgctgtgaatttggtcggaaaaactatttagccgaagttacatgtcagagagaagtaagccgtgggcatctgggaactaagagatgacgccgagcaaacaaagtgcattgtgcgatgagaccctcagattagatcaagttattttgggcgttcacagaagaacagcgatacgctgacggtttcatctggttcaactcgacgttttttgcatttatcgtcattgggtatttggtattctacgggtgcctagagggggagagaaagggtggcgacctacgatgtatggacaattcagtatattgagaagttgaaggtaacaaagaggagagggagaatacaaggcaaacaagggggagaagggatcgaattgaaaaaaagcgacaaaaccgaaaattgaaaaggtgaagaatgaaaagaatgaaatttcaccgagagaagaggatgaaagggcaaaataacgtgcgattttgcaaaaaaacagaccaaaacagtcagacgcggtaaacacattacgaaaaaaacaacgatggaatttaaaaaggacagcgacgcccgtcgtcggactctcctctccagggagcttgggccacctacttttcgcgattccacttaaatctttttttaaattttttttcgcttgaccatgacagagaacaattatcggcctcgctctcctgatctatctcttcctcctcctcaacaatacgcgcttgcgagtccaattacatcccacgaatctcccttcttcaactcataccaacctcaccaacgcccaattctaagtcgcgtgggtcaacaatacgttccaccttatcagccagactcggacatggctcgccgttctagccgtcttgctcagtccgaccgtacccccatcccagaacccatgcccgaggcaattctaccaatcccagaggcaatccaaccaatcccagaggcaatccaaccaaccccagagccgatcgcaatggcgccggtccccgctattgcgccggagatagaggaagagatgccaccggcgcctccgagtgcggcgattgaagtaaagaccaagtttcccgtggcgcgcatcaagcgcatcatgcaggccgatgaggatgtcggcaaggttgctcaagtgacaccgattgctgtgtgtatgtacgccctttgcgctccccttattaccaatctgccagagatactgactagactcttttgatagccaaggctctcgaactcttcatgatctctcttgtcaccaaggcggcacaagaagcaaaggaccgcaactcaaagcgcgtcacggcctcgcatctcaaacaggccgtcgccaaggatgaagtgcttgacttcttggctgacatcatctccaagatccctgatcaacccgccagtcgcaaacacgaagacgacgggagcgatcaaaatgagggtcgccgtaagcgtggcgggcggcgaccgaaggatgaaagtgattgaggttgacccgtaaatgacttgacgacgtgctagatgggatgggtattaggcgcataacttcatggtggttctttctttcaggcgtttaaatagtgggaggcagatctgggagcgcttttgtctgtgaatatcttttggtttttcgggctccaatgactcgagcctcatacgcgcacggtctttttattcaaacaggacctagacgggcatcttctgttggaacttgaatctgtatgactgtaagtgtaaatctggaatttgcatgtagtactccgcatatgcttggaagttgatagttgatggtgggtgtaaagcggcgatcagcgcgataaacaccgtatccactcatcctcgaccccccgtcactttcactctgtgagatcatgcagtcctcacagaatggactttgtacgtgccccttacttctctatgatcttcactaatagaatatagtggtctcgtcttatcggcggctcgcgcgcgctgtccaacaaatcctccaaggccacctcgcccacggaacggctgactgcatttaagcgcgcctgcaatgccctccaggtaccgacgatgtccgcttccaccaggccaccaattaaccaattgatagcaaatatggcgctcgacaaataccccttcgggcgaacaatcggttacgcatgcgcggatgtacgttgaacgactcaactcgattctgagcgaggaagctcgcggagcggcaccacacccctgtgtggcctatgcggcatcatcccaggtcttcgtgaccgtgaccaagcttgccctttccttccacgatgaaggaatcatccgatcagcgacggtattcttcaacacactgatcgatgcagaggtggacggggtcgtggacaaccgattgttcgctcgtgcaatggtggatctggtccgccgcgccgagaagacctccgatgaggctgagggccgactcgtcgaattgctatttggtattgccaacaacattcgtctgcaacctggtatcctgcccgcgtggtttgtgcctcgggtgacacccaacgcccaggatagcgattcccaagccccaagtgggacggagtttgcaggagctacgaggaaggacgagttccctctgttctatctgctggtagactatgttcaccacgaaggacgcgctggggactttgcccgaacggggttgctctacctcattgaaaccgcatcgcggtctaaaaacctagagaaatggctgatcgagagtgacctggctacgctcatggctactggactgggcgcactctacagccagctcggacagtgagttcggttctttgatcattgtgggacaatatactaatcgaataaagcttgtcgtttactcctgccgccgaggacgataaccttcctcacattgttgctctatctgatcatggcaaacaggagaccgctttgcagccaaccctaggtcaaacaatggatgctttcatgtcctatctgttgttttggcaggacacaatcgaccactgcaaatctgccgaagtgaacgacaccttactagaccatttccaggtgctgtttctggagcaacttttgtgagtatacactcgtcaccccagaatggacttatcactgacccttgcaggtacccctctttgctagaatcatcagatgtagctggtggctcgacagcagcggtgctgacctacatgtgccgcattctcgactcaatcaatcaaggcgaattggtccaccgaatcttacatttcttactagcgtctacccctcagcctgaggagcaaatggatatgtccgcaagccgtcgcaaatcactcaatgtgctagctgcgctggcctccgaagcggctcatccctcaccctcactattcaatcttcgcgatttggccctactaggactccagtcatcgaactgccagacggtattagctacactacgccttttaaataccgttctccagagacaccatctattcgcacgggcgctgatccataccattcctactcagcctgcaaatcagcgccccgttggcgccttgaatgccgagctagagcaattagtagtcatgggaacgtccctcgttgatgaccccacgctgaatgagtcgtatgacaactatgtttcagatgcgacatgcgtgcttgaatcccgcctgtgtctgcccatctcttcaatgggggaagacgaggagacgttacctctgccattgcagctccagcaagatgatcccatagtgcaggcccttttcgagtgccttgaaactttctttactaacagtgtcatcgtcaatctggcattgacaggtgtgttcatgagtctggcatcctcacatctcttctccttggacgggtgggtgttggttgatcccaaccaatacgaggccccatcctcggaagaaaccgacgacggattggatgatgttagccgggcctaccaggccccaacttggcctgccacggctgctccgacattgacactagcgctccaaaaactcgtgaaccaggtccgacaatggcaacaagaactcccagacttcgatgtactggtcgctgcccgacgagaactcttgcaccaggatgatcgcccacaaacaccggaccgatcccgagagtcctcagagcatccagcgtcaaccaataattcgcgcccgtcatattcaggttcagccggtgtctctaccccagctgcccgtggccggtctccatacccggtcaattcgccctctatgctttctcatcgggatgcatcatctgttccttccgagtcgcgcggatccttgaacgcccgagcggtggccgccgaggctcttcgccagcgccttgccacaccgttcccgcctgcacccgcggatccaccgtatccatcgactggggaggaaccctcggactcagaagataccaagcaggctccaatcgcaaccctcggtcatgtactgacgaatgtggtcattctttacgaattcctcctagagttgtcggcggtagtacaagtccgaggaagcctatttgaagaggcaggatatgattttaattaggaaaaggggtgttgatttgtttttctttctttgtatttaaagggggtatacctaagtatcaatatacagtattatttttgtctcttcatgaacaatctatcaaaagaccaatgaggaatttgatatgcaactcagtgaataagaatagcaccagtggacccccgacgacgctgattggccactaagcccctggacgagagactatgaacccgccaagccctcgtgccgggttggcttgcggcgattggcgacttggcctctagacacgtcggacacaatttctcactcctctctaacgcatttctgacaatgatttgatactagccctcatttatacatcccgatcggactaccttcttttatatataccctcattgacggtatgactggccgagatggcctccatacgtcatgagtctcttgaccgtgaggaccgcgaggatgccccattcctcgactcccccgatttaagcaccccgggctcagcccatcgccatgtttctagcaagcccagtataggaagccacccattcaaggccaatgcctctgctagcaccatcacctttcgcctcaaggtgaccctattcgccatggtcctcgcagttgagatcggctttgctttcctggagggccccatggtccgaatcatggagtctattgcttgtcgtcagtatttcttgggtgtggatccgactaagatcggtgcggatggacaagtgcccgaggccatgtgtaagattggcgaggtgcaagctgaactggcggctgtgaagggctaccatatgttctttgatggatcactgagtacgttgattggaatgtttagcgctagactatgatctaattgtttcgcaggcgccctattggcgattccctatggtctgctggcagaccgtcgtggccgcaaatctaccctcgccttgtctcttcccgggtttgggttgaacgccttatttacaatcctcatattgtggttctcggatatatttcccctgcgtgcgctttggtttactgccttgacgtggttgtttgggggtggtccagtcgtgtcgttcgcgattatctggaccatgatggccgatgtaaccaacgagtcggaaaggtatactactcctccatgttgggcgtgagtcttatagatgctgatcaggtggaacagagcggaactcttttttcaatttgccatcgtatcgatgggtgccgacttcgcgtcaagtgctgttagttcttatctgatgaccttgaatccttggataccgttggtggttggattcgcaattgtaatggccggaatgatgctcattttggccctaccggaaacgaagcatgcactgccaccccggaaagctgaaccaactcatgtggagatgtcggatttgacacatgacaccgagccaaaaaattctatacatatccctcgcgtacccgaaccatatcgcgcagaacccgacatgaatggtgatcatgacgacgaaccgccttcttggagtatccaatcatactcgcaccgatctattctggcaaagtttcgcgcaaattaccgcttttaccttagaccctaccgcttcattctcaaccgaaaaccagtgctcctccttctcactgcgttcctagtctaccgcctgagccgaggctcatcttggttcttgacccaatatatatcgacacgttattcatggacactggcacaggccaacttcttggtatctgctcgtccgactgtgtcaatccccctgttcctctttgtcctacctttcctcaaaagacgagtcgtgaatccccgactttcctcaacagaaaaagacctctggctagcgcggcgcagtatattctgtcttactgttggaaccctcggaatcggcctctccccaaccattgcgaccctgatccccagcatgattgtccagacctcaggatcgggcttcgttttccttgcccgctccatcattaccactttggttgaacgtgatgagactgctcgcttgtttactgcgattgagattatccaatcattaggaaatgtggttgcgagtttatccatcaccaccgttttccagattgggctgcgtctcggtggagtttggattggtctcgcgtggatgatgaccagtacgctcttttgtttggtcggggtagccatctggtcttttaatcttcctccaagtcctccgacaccggactttgcggaggattatgacggggatgacagggcgtgaatctatagatcttgtatactactcatagcttccgtgcgcacttagagcgtttgttttttagtatctattatattatatatagcgatgtacgaaaataaccaatcagatagaccaaaactcaatacaagagatctatcgacgtaactcgctcgcctgcgtgagtcttacacgccgggaaaaagtgccgaatgcctcaggcataatatcacgtggcagctcgtctcgcatgtgattatcaccagcttgtcgacccgattccattgtcagaattagcccgagttcgagttgcaacctgtgctgccagcacgctcctaaatatacacttgtttagcgcatggcgtgttgatgattgggcctgtatcactgctcattctgcctaaacttgtcataacacgagatggagagatactcacagtttcgggatcgaggtaaatttgcgctgtgctaaccagcccccaagtccagttatactgacatctctaggctcgggaattgcacccttcctcccgatccccgttgaaccactcggcctccaaacgcctcttcgcattttccttttctgcttccgcctcccgctatttattttcgtcactcttagctattttttgatcctacaatggcttcctatcggatcgctgggcaaaaaggctgctttgtggtgtatacttggagttcccagcatctggtggattgaccttcaagtggacggagtgcgcaaagggttcgtgctgcaccatcgaaactatagcctgttctgctggtaactaaaatatccggcacaggtctttgaaacagcagcaagcacgtctgcctcaacccggctctgtcatcgcctcgtccttcacatcacctattgatgccgtgtacctggcggctatcttcgacccgatcttcacagcatcctaccccaacactcgccaggtcgagcgcatctctctgttccaagccatactgcgagccttcgcttcccccgcaacgcaaccggcccctggtgccctgatggtggatgtctcaagcttggtcgagaagtaccccaacagaccgattgtattgttcccagagtgtaccaccaccaacggccgtggcatcttgaccttgagcaactcccttctcagcgtacctcccaagaccaagatcttccccgttagtctgcgctatacgcctatggatatcgtgacccccctccctgggagctatatgagcttgctgtggacgcttcttagcaagccgacccactgcatcagagtgcgcatcgcggagtgcatcacaagaagccaaaatgccattgatacggctccctctctggcgactgcgaagtcgacctataatacgaattacctggacacactggaccgggacgggcaagaactggcatcgtccagcgagaaggcgctcctggataatgtgggcgagtcgctcgcccgtcttggtcgggttaagcgggttggcttgggggtgaaagagaagcaggaattttctcgagcttggagtaagagtcgtcggacatggtgatcttgatacatagacagtatttctttcgctatatttagacccaaacacattgtttcactctcgccaatgctgcaggtacatggcgcacatatgcagttcgcgagttgaatctaatttgctagatatagaaataactgtagaggatggatcttgatgaggatgaatatttgacctggcttaggcttggtttctatttaggtacgaatgatatcttcgtcatgtggctcgatgacccgtcgacacgagaccttagcaacttatcttgaacgtgtcaatcgtgctgattggacctgggaatagttggttgtaaattgggccaactcacgaatattgtgtaccctctgtcataggagcaaacgagattgcctcaacgcttgagacagaactagacctacctgatatgggtcctctcgtttgattctgtttgaaccttctctctctgtttctcagctccttactgtcttcctttgatcgatctgcatcatagatctgagggagaaaccaaccatgcttctaaaactattttttttggcagtcgctgcatcggtggctcttgctgcctccagtgaggcattgaaacaatgtctcgagaatgtgttcacagaccgagcaggctttgccttcgctggagatctattctatgaccgtattgtgaatcgctacaaccttaacattcccgttactccatcagcgttggctttccctacgtgagtactcttgaaagaatgatacattgtgttcctcgctcacaacccacagctcttctcaacaggtggctgatatagtcaaatgtgccgcggataacggatatccagtccaggccagaagtggaggacacagctatggcaactacggtgagatcctcaaattacagtagcacagtggaatcccacctgcaggctaacgtgttatacgtgacaggtcttggaggggccgacggcgccgttgcgattgacttgaagcatctccaacaattctccatggacaagacaacttggcaagcgacaattggggcgggaagtttgctgagtgatgtgacacagcgattgtcccacgccggaggacgggctatgtctcacggaatatgtcctcaagtcggttcgggaggacatttcacaattggtggtcttggtccgacctcgcgtcaattcggtgccgcacttgaccatgtactggaggttgaggtggttctggccaactcgagtattgtcagagcctctgacaccgagaataaggacctcttttgggctatcaaaggtgctgcctcgggctacggtatcgtcacggagttcaaggtccgaaccgagcctgagcctggtactgcagtgcagtatgcatacagtatggagtttggcaaccccacgaagcaagcggcccttttgaagagctggcaggccttcgtgtcagatccgaagttgactcgaaagatggcgtctaccctcactatgcttgagaatagtatggcaattagcggcaccttcttcggcaccaaggaagagtatgataagttgaacctaaccaacaagttccctggtgcaaatggcgatgcattggttttcgaggactggttaggtcttgtcgcccactgggctgaagatcttattttacggttggccgctggaatcccaacaaatttttacgcaaagtctacttcttggacaccccagaccctcatgaccccggagactatcgacaaaatgttcgattacattgctaccgtcaacaagggtactttaggctggttcctgttattcgatttgcagggaggctacaccaatgacatcccaactaacgctacatcttacgcccatcgtgatgtcctcatctggctacagtcctacacagtcaatttcttgggaccaatctcccaggcccagatcgacttcctcgatgggctcaacaagattgtcaccaataataagctaccctacactgcctacccgggttacgttgatcctcttatgcccaacgcacccgaggcatactggggcaccaatctcccccgactgcagcagatcaaagagctagttgacccaaacgatgtgtttcggaatccacagagcccatcccctgcaaacaaggagcctttgtgacaaagcatcgggtcttttacattcagaactagtcataatcaaatcattttgtaaaagggtttagaaacataagaccagaaatttgatttaataaagaagacatagactagtcatgcgttattccttctcgcttttctgcttcgccgcccactcttcactctgacgagaagtccatttccaacgaagtgcccacatctcttgatacaacttctctgagcaatccgggcacattcctgccttctgaaaaagtcgctcttcgggaattccaagaatgccgatattgagagctcgtagaacaacccccgagcaacgctctcgcatgagaaatggcacgccgaactctttacagcgttcaactcgtccgaaatgaatacaattgcacatcgtccacatgttataagtctggaaacacattttgaggctaattctctgtagctgagtcaatgggagagatacagacccggtatagtatacttaggggttctgttgctttgctcttgaggctggcttgtgattttggtagatggttatatatttgcggaatattcattgatctttgaagacttcgggtctttcggtctcttccttgtttctttaacacgctttgagctggtgagacatcagatcaacaaagacatacatagaacattgtctcaaaagccagaaatgaaaatgatgataggagtattctgtataacaaagtgtgaagttttgggtcattagttagctcaatggtaaatggtagccttttcagatgtcttttccgtatcttctgtgaaaacaactttgctacgtataaccttgaaacactaatattaaataaccaaaaatagcgagtaaacaaatctgccgcgtatgtaaaaatagtaaatgggtattgggtatttcaaaagctgctaatgggaacaaaacctctatacactaagccatgatacatcatgatcgtctggtcaaggcatctctagccaaagcatcaatgcgacgagaatacaagtccatgaaatgcataacgggatcaccaaagaccacacctcggagctcagtgtctacgatcccacaggcatccacattctcccgcggtggcagtgcaggagggccaccagggaccggtggcgctacaaacacaggttggctagtcggttggtctcgcggacgaagtagaacaagccgaccagcgagtgacagatcggacgagggagtcctccaatatataggagcggctttcttcttcttgtcgtacaaggctagcactgaccccggagcgggcgaaacatacagatctagcaatgagatgaagtagttcttgtcggcacgggaaactgggtcaccctcattgataaaagcgaaaaacatggactttgacctctgggcagtaggagagagctgcaagggacgaagcgatatgggtggagcaccaaatgtgacacaatgaatgtgtttgaagcagccgcggagatgaatgagttcggattgcacggctggagactcggataggaggtgtagatatagcaagctggcgacggcaccgcccgcggagtggccagtgaagattagcgaataggacatgcgtgagggatcttcttcaagaagactacgtagccgggcagcgacgggggcaaccatttttcgggccacggataggaagcccgagtgacagcagttggatgggtcgtctagaaatcccatgggaggaactggtgctgcccggacgttcacggcccagtcgaggaaactctgcgtgccacgtatggcgaagacaatcgtgttcatgtcgtcgattgggagcgatttgaccaccatggctttggtgccgtgtagccaatcggagtccacgtatgaatgccgttcatggcctgaaggcttgtcgtaaacccggcgcgagtacttggctgctagctggaggaggggatatgttggaggatagctgaatgcgagatgagcaagttgggctaaatatgaccggagtgtggagggtcttacaatttcagcgttgttaaatgaggcggtaaccgcgaattggcatacagatacaccttcgagaagtaatccacagatcttgttggcttcttcgcttttcgctttgatcgatctttcttctcgtctgactgatgaggaattttacaagcagcaactattgtcacaaatgagtatcattcgataatacaatccgaaccataccacttacttagttcagtttctctcccacaaaacgaccccaggtcgatcgaggtgatgacttgatctaacaaccgcgatgtggcctccttgacgtttgcgccaccacccaaactctggcggaccaaatgttcgagatcaaggattgtcgcattggtcttctcgaacgtatgcgataccaagctggtcattgactggttcaaattcgtacacgatgtccattttgaaagtttcggtgggtgagcgttccaggggggactgcttgaggcaggtgctgggaaaggatagagtggctgaggttgtatacgagccatagacattgccatatttggattatatgccacggtagatgtatgagatgtgttaaatgtatgaaatgtgttgactgaatacgcccccgctggcgacccatacggaggatcgacatatttctgcggtacccctatttccggacgtggtggttttggcggtggtttaggagatgtcggtctctttgagcgactcgaacggccaaaggccatggcgtatatcccaactcagtgtgtgtgaaatgcgtggagtgcctggattcaatatgggctatcctatacgtattctcaagaaccccggtccttgtccctcgcacatcgtacagcgatgtaaagcgaaaaagaaaaaggcaatgcaggagtcatgcaggtccttcatgtcaagcacgcgtaagaagcagggcactcccatcacgcgggttctccgtcgacttctccgctggccgtcgataggctgaaatccgagtacgagcacagccccatccgggccatccagggcgtccacaacaaatacgattggccgcatgggaacaaagcttggcttggcttggattcagcttggattctagagcatatgattgtgtcgagttcttgacgtcatgatatttggagatgtcgaatactaatagcaaggctgaatgtaacaaatatgaaattagaagagacgcgatgggaacaatgacaggccaatgagatccgaaactgtaaaaccatctacgctgaaactgaggaaggacatcggtttagtcgtttgttagtgtttcattcgggcgcacattcccaagagccaatcccacatgatgtatcatgttgctgacctgtcaatggtttagtagttcatttgtcaacggctgggacaggaaccccagctctgtccggcttctttattgaccgctcggatatggtgatcaacttttcaatcgactaattcggtcacgatatcgtgactatcaccagttcgcatgtctgtagcaagcttcgtatgtgaaggggtatgtgaagggtgatatgggcaagatagggaatgaacagatgggaaacgtgtctttgtatttccatgtcttacctcctggaggtagttgtatgtaaaaaagggtataaaaagccggtctagccataaaaacataaaatccaatccacataatgactcattcagtcatcatgcctcgtgaataataatgatgagtaaaaaaacgacacaagagaaaaggtatgtgagtcaagaaagggaatagaataaagagcatcagaaaggggagaaaaagaatcgaaaggagggccaaaaaaaaaaaaaaaaaaaaaaacggacagcaaggcacattggagaccggctctatggcacttctttgtcgcctcttttcaaaccaccgggtacattgatagcatcacgcacccaatccatagcagcaatctcatcaagggtcttgcgttttgtgttgcgcttgagaagaccttccacacagtcacgggccccttcgagtcctttgcccttttcggggtcccattcctcgtcctcgtcggcatatctataccaagcccattcacaccgtgcgatacgatgcggagtccgggcacgaagtttggcaggatctcctcgagtgccaggcagaacatcgaagggtaaccgattctccatgatggcatagagtagaacaccgagtgcccaggcgtcagtggagcggccgtcgtaagcctggcccatcagaatttcgggggctgcgtagtcttcgcttccacaccgggtctgcaggagcggactctctggtggttcagggatacgtcgagacaggccgagatcactgagggtgacgacggcgcggtcgtaggtacgccagtcttgcacatcatccataacatgagcgggcatggtaagcagaacgtctggaaacatggtcagtataaggtctgcagtatcctggcaaacaacgctgtctcactttctaacttgatgtctcggtgaacgatgtaatgagcatgcagataacgcacagcatcaaccaattcggcaaaaatgcgccggatcaaatccgcggacatacgagctcctgatgtggcaaactcgaacaaatctccaccaggacaatagtccaaaaccaacaaagcacgcttttcatcgctgccgaatgctttcagttggacaagggacggatggttgaccgacttcaagatttctacttcgcgcttgagtgatatttccagtcggccctcatccgcgcctccagcgggtccatgttcgatgattttgactgcgaccagcttctgattgttgacaaacccgtggaatgtgccagctccatcaccatccggcgacaaaggcatcccggggaaaggttccacacgtgctgccaaactgacctgactgaatgtgccctggcccaatgtccggactttctggtagatacgggcctgctctgtacggaccgaccggacggaatagatatcctgagacgcggacagaggggcggggtaacggataacgggttcattgtcactgtatccactgccactgctgcgaggcgggctgggaggacgaacggtcggcaatgcgatacctcggtagacagcgagatattgttcgcgatgaagtccattggacttcgaatctatgctcgacgacggggcgatcccaagcccagtattcccttgcactgcaatcggacggggaggaacagagacccggccgggtggtggtgcatagtcactcagactgcgattccgagaatgagaatgctttgaggacgagtcgcgacgatgccaattattcacgaatgactcttccccttggccatcaattccagtgtatggtttggcgcgcgaacggggcatgacggggggcccaagcatttgtgacgaatcgctcaggcgaagactggagccgttgcgcgacgctatcgacgaagaacgagataacgacggtaaatcacctttccgccacggggaagctcctccaattggcgatggcaatggagttatgtcacccatcgcattcaattgaggcgaggacatgatggatgccggggacaaggaaccactgtatgtaggtggtgcgatgagggcacgaaggctcggggtgcggtttggatagcttccggaaaaactggtcgaagcataaggatcggattctcgcgagctggacggtcgaatactgggtagatcggtgcgaatctgaagagacggcagtggcgaaacgtgattaagtatggaaggtgctatggaaggtgcgaaggaaggtgcgaggtcgtctaccgaaagagggctgtcaatctcctctttctttgtatgttcattgtcgcttgcatcttgaaacattgttgacatggtcgatagaccggacttgtgtatcattttggaaccgaaaaggtgttgggaggaaggatgacgcggccgcaaacggaaggccgggtgcgttgagttctatcctccgagggtgttttggggggtcggagtcacaaggtataaaacggccaaagataagagtcttggaaccccccaattaagcctccaagcctaaatggccttagcgtagacccgttaagggtcgcctctctactccgtaggtataacggaaggtcagaccgcatgcaagatggattattaagggggaaatgaaggaaagggggaaatgaaggacccaaagtaaatgcaattagaaaaaaagcgccacctgcgcaaggccgggcgatgatgcagcgaaaagaagaaaaaaaaaaaattcaagaaatcacctgggcaggatgaatggggatgctagtcagctgacgatcccaatatggttagttccccatgtgctccccgcagtgtttacttgagtttatactgcaatttcgatttggtaagatgggaataaggagatacggggataggagatggcatatattactttatcttcatatctattgcacactaggagccaattggatcagatccgatctcggtatatatctttaattctgcgttgatacctgtgagccccgaatctgattgctccgagttgtagttcccaaaggggaaggtggtgtgactatcatctgcacttttttgtgacctcggagctcagatatagattatgcctcatacatatcttatccgaagatcattctaccctcctacatattatgccgtacacttcattctctttccttcatacctcaaatatacctcaatattcaacccttgctcttggccctcgggaacgatagcttagcggctggaaccggaatcgcttacctgcatgtaggggccaaacacgtcctgtacgccactggtatagctaattttagcattcgtcgtggcttgcccccgaacccaaaatcgtgaaagaccttgctaaccgtatgacgacacctagtcccattgactgagtaccctttcaagttttcttcttccgacccggtaatatacgaaccaataaccaaatctccattcctgggagctgatgtggccccgatctaacccgttagaacccattctccggataaatcagccgcatgatgttgcttgggccatccatggatctttgcggctactgcgggagaggcgtcgaatggcaaggggtactatctacatgcaattaattggaggcgttatatggcgagatccaaggttggtgggggaagttttcgggtgttagggttatccactcttcttgccatcgtgaccaaggcccactactgcgggattgagagcaaaagacaagaccttccagttccgaacccgtcgatcatcgccgtccacggatgttccgtgctcaattgctggctgcgagtggctgggagaggatcggcacggacccgaccgcggtggggctttatatggtgaattctgtcagaccgaaaatgatgggatatcaactatcaagagcaaaggagtaaatattggctttggagtgtccttctcatttgttagattatctgcaaagtcattatcctttgcacacatcatgctcctcttgagtcggatgtctgcagatgcatcggactagaattctaccccacatgtatcgattgactaggctcgcgccgaagctataagctatcttgaagctcgctcgaattttcctatcagggctttgcacattttgcttcatctagaaaaacgtacaaatccttcatgctagtagtacacggttaggttgtgctcacgttgtgcaggagcatggcgctgtggttggacaggagcagcctctttcataacattggattgatatttattttagagacgcgataagatgaagacataacactattgaggcaagtcttgtattcaatccctcgggatgctgaacgccgaacgccgaacgtcaggaaattaaaaacaaagccccaaagcccaaacccggatgtgacagaatcaaaacaactgataccccccgggcaggggaacttgacagttccttttggcacacatttcccaattcgggacctctaccctctacaagccatttgactcagacctcattattatcttatggagcatggcatctcttccaaacttcgatgaccttcctcctgtcgaggggatgccgcaaggctgtgcatggggcatcttcgacaaagacgacgagaaagatgttctcggcaccctgaatctactcactccagaagtcgtcaaggatgctgtcacggaggtacgccaaggcgtgtctatttccttaaagtgaaatgcccttcataatctccagaatacgacctaataccactagttggcccatcgggagcatcaaaatcccagggttctttcgaaaaagcttctgtcacaatgtcatgaagttgaaagacgcagcatctggcagccactttggatttgacgacgaggtattgtgctgccaggttgttctctctcataccagagctaattaatcctaggtcgaatttaacacccaagccagtagtcaatgggatagtttctgtgagtccaagaactttagattcttgaattcaaaagagaactgactcgcaacccagctcacttcatgcacctcccaaccggcctcacctacaacggagcgaaaccaacaatcgatgcatttcagactcccgaatctgccccagatcttccaacactagaccgtaagcaaaaatccaaccaatttcaacatcaacactgaaaaaggctaatggaggacaccagactggcaccaacgcggctgtgtgacaggccgaggcgtactaatcgacttcaagagttacgcgcagacgcacgcgataaactacgaccaattctccggcttccgcatcgggaccacagagctagaagcagtggctacctggcaggggataaccttcaaagcaggagatatcctccttatccgattcggggtaacagagacgctgggtcagatgaccggtgccgagcagggcgctgcgatgagcagcggcaagatgtgtgggctggaggggagtaaggaaatggcgcgttggctttgggatcggcatttcgctgctgttgctagtgataacacggcggttgaggctatgccgcctatcatcgatggtgttgagcagcctacccatgagcttgtgttgcatcagtggtgtcttagtttgctgggtattccgctaggtgagctttgggatctgaaagcgttggctcatgcctgtagggctagtaggcagtattctttcttgcttacttcgtccccgctgaatttccctggtgctgtcgccagtcctcctaacgcactggccatactgtgaagaggacatgttttactatgtaccaacggtctcggtggatcacagtgattagacacaaatgaaattcccggtacttttatttgtggagatctaaatcgaagttctgtagccgttcatctggggaaatggttcgagtacccactttgggctccacatggcttagcctcttgttctgtgggccccgagtatttatagatgtaacatgccgaggtcaatatattggagcatggacggttaaaatcttaagaagagccagccctagtgtaatggactatagcacgttgggatatgtatgtttatatacacattcaaacaagcatgaagtcaaaatcagcttctcttgcaatatcctgccactgtatatcaacgtacggtccagccactgcccgccgattccacagagcttgaacgatttcacataatatattgatactctggatgccgtgccgactcttccggtgaaagaatgccaacattcgatcttgcagatcaggccggtcgcagtcagccgcaaccacaaaacttgcccagttataggaacagccacccttgtcgcgcgtgagcgcatcgacagattcaagctcgtgtatgcctttctcaatcagatcctgtacgtcgcacaatggtgcgccacgcaaactgcggcggaaatatacaatcgtcgcatagtagaatgagttcaaagcgtgttggacaatgaccgaaccgggggcgtctgggttggacaaggacggaaagttcaagtagagctggagttggagccggtcgagttcttcggtggaaagctgtgtctgggactcaacaagtgtggtgatttgagcgaggcattggaccagtggtattgtgactccatgcgattgttctaggtagtgatgtaaatgggaggggccattgaggagcgacatgagctggtcaggtataggaagactgcatagtgaggaaagggacaagtagcttttaaccaatctagcagcagtcggagtacggatccaatcgccatggatctcgttctccaggaggccaaggcatccagaaacgtgtgctctccatcggctgcggcgaccagacatagcttcagcggagatgcaggtaaggacagcggctaaagtgggctcatctaggcagctagcctgttgtaggcttcctcgcaaatgacccagagctagctggtcatggtggacggcgatggaatggtaccgcgaatcatgccggaggtgagaaagactaaaagcagaggaggcacagatagcgtggaagattgagagatggatgttcgattctgctggggaggcatcaaggcctttcaaagccagaggcaagaacactgcccggcagggattgtccggggtgtcaattaagagcatgtttccgctgagaaaaacaacccagtgatggactagctctgtctctggtcttgggagaaccaatggactcaaggaatcccagggggatatcacagtccgattgttgtagatatttgatattggtctgccgtagtcgctcggttctgacggcatatttctggggcttttgtggtgaacataggcgacttcattgatagacatatcaccgaccagatcattaggccttgatgataccgtgcataagtccttgtgggattcaaacataaacggcgcggtagtagatgatgagccggcccacgtgggcttcggtgaagccaactcgctacctctgtcgccatctgctaagtcgaccaagtccgagatatgctgtgaaacctccgtttcttggtctaaaagtgaaacttccaagttaggtagatcaacacaggttgaatcttgagtctctaggcttgacaaagagaacaccgagaacggtcctcgttgttgggcacagccatgccctgaacatccatctaactcaaccagtagttccgtaacagcggcagatgacaacccttggtccgcatctgataatggggctcgcaattggcgccgatgagagcgacgcccgggggcttgagaccatcctaggcgcaaaccataccctttgcacacccaaccactccgctggcagcgcccacagtgagggtattcttcgtcgcacttcactcggcggtctcgacaagtccagcatccagtgaaagtcttggtgcgtggttttgggactcttgcattatttgacgatatatccggcattgccaaggatctgggaagggtgaaagctctggcccgggcaacccatttgcccgcacgtcggcaatcgccggtccctgatccacgccgcggatgtttgccaccgccgggtggtattgcgccagcaaataaactaggtttaggagtatttcgttggctccgaaggttagtatttctacaaatgagttatatattgagctatagcctgcttttttgcggcatcgctctccaaggttaccgaatattctttcatctcgcagctaaaatgtgagtagaaatgtgaactccactcattagaaatcaggaagtgtgagaatttgtctattggaagtcactagcagcattagaatacgtaactgacgacacttgcaagcgtcatagccaatgaatcgcaggtatgcaagagacttttctatgtacacagaagaaatacaaagtacaaacccagttgcacatcccattcccaacccacgcataaatgcgaaacatgaagctcgaagcgccggagtgaggagacccgcaggggaaataaaaaaaaaatagttgtaatacatcgcaggcggaaagacaaggcgaggcggctaatagtcaaccgccaatgtcgtttaagggtagcgtggagggtatggagtatcggataaccgagaagcggagtagggtaaaactggccaagctagcaatctagaagaaggcccttcgggtcacctgtaggatcgaggttagcaaaagtcagacagcatatcacagcaatatacatacagcccaggcaccagcaatggtagccacaatgccgccagagatcatcattggcttaagtccacgcgtgctcttgaagaccatgccgctcaatgcgccggccacgatgctgttagtcgcgtcatgcttgcctcgcacatatccgaggctggagttgaatccgttgtaaaccatagctacaacaccagccgagtttccgaggaacggaccgcgacgggtaacggagttgagtacaccgttgagtcgaattttgggtgctgccgtgggtggtgtctttttcaatccttctacaagtccccacgcgcctccagtagcgagtgcaacgagataggtagtaccggcaccataacaaaggtcatctgaccatccacgggatggcaacactgatcgggagccggggagttcgtcaagggcagtgtcatcgagggagaggtagtcgagggtatcctggttcaaaccagccagaggatggaggcgagagggatcgggaatagcgacctcggagaggaaggatgtggcatcttgcgcggttgaagggtcgaaggcctcgggcccggtttgcttgcggccgctgagggagtcccagatggacattgtgaaaagaagtatagaaaaataaaggatagaagataaaattacaagaacctaaggagaaccttggaaggcagggacggatgactggaaaagaagtgatgaccctgtgctcgcagctccactggcatcggaacagcaaaaacttcggtcccgtgacttccggcgatctacggagaagaatttggccgagggatagacgcttaacccgattcggaatcccacatttatcacttggcggcctgaggcatcgcggggagcataaatctctaaaaattaaacgtcggggagatctttttcgcgtaaaccgttatccaagataccgaggcttgtgtgattggaactctgactgttggtgattcacgtcaggtgcaatgtgtcgtatcaaaatggacgaccttgcgcagattgtgcagttgttctcggaaaaaaccctccgagatatcgccaaaggcccattggtgaaattcacactgacatgccaagacaccgagtaagtgaagtatatgttcaatccataataactaatttgttctaatatttccacaagaaaggtgaaccgggtatggcggtctttggttctgacgctatcgacagcatctatctcgcaacctcattcagcagaggcatgcaatgctgcctctgcttttattgatgctgccaccaagtcacaatgtgacgcgactcaacggttgattttctcacaagaagcatggctgtcaatattcgatatttgtttgactcgatatgaagatgcaaagccaaagcctgttaagaaactcctcgcctcggttattgctatcctagtcaaaaatcaccaaggaacaacgagagcagcccttcaaaccgcagtcattgatgccataattcctagcattgtgcttggggagcctcaatcacgcctgaaggggtgtctggtatttttggagacattcatcagaagggatgccctgttacccagcgagtttatcccattgactcgccagtggctgttaaagaatacagataaatgggcaaatctcttcgccaacgatcatgaaactctctccctaggcgaagcgggccccgcttttgacattgcatctggcagcctgcccgatgaactggcaacgaggatctttgttctgggactcttgatccaaaccaacaataggaccatggccgtatcagctggtaacttactggcaattttgatccagaagatgaagcctgaaacctcaccggaaaagctgtcagcgatgtgggtactcccagtgagacgcatggtcttacaaaacatagaaaccttggaagatctgtcaaataggctcctgcagcctttgtttaccatcgaccccaatggcttcaggatcttccttgacacacttccagtcaagagccttctcaaaggtgatatgactgatgcgcctgaggcagagtatatggttcttttcgctgctctgcagatcggcaagaaaaccaacctggttcatgaagattgtgagtggcattgttgacctattattattggtgactggctaatatgcgcagatatttttaatgttggcaaaatgaaactcgacgaaaatgaggtgttagtcctgaagagcgacgtgatcggcaactttctcctgcaccgcgaggccaatatccgtatagcagctctctcgctgttgatcacggcattttccacagtaaagccatttactgttggggcaacgaacgttatccttcgaggactaccctcgatgcatgctgaatccgacgcatatactcgcggagaaattctgagtctgacacgaaaattctttgttcgtctaagaggtggcattgttaaagatgaagacgttgtttcacagacagacaaaacagccaacaagccaggtcaaggccaggtcagaaatgaaactgaaaccatagagttcctaaaggcatacctaaagctattgggtaatgatttgcgtcttgcggcctcatattcgcgccacataacggcgctcaaagctctgaagcttctgctggactccggtcttgatccacgtttagaggtcaagcttcaaaaatcagagatggaaaatctttggaaagttcatatcgaagtgtttgatgcccacctacttcggttgttgattgatctcctgctagatccatttgaagaagttcgacaaacttcgctttcgatcttgattctgtgccctcgagagattctgctcaacggcttgcacaacaagacagaccaacagtccactgcgggcatgcggttgacagatgcaattacccgagcggaaagccttgcaagtaacacgagccgagctgatcacgctgatactgttgctcgtctctatcatatcgtcttttgcgcagccctgccagccaactccggtcaaccggtttctgattggtggacaactaaggcatcagtagttgacacaattttaagaaagcttgaggaacgtctacttgattcaaagacccttttcagctcaactatgcgcgaggcaccacttcatggatatacgtctggtcttaggtatgttgtcccggtccgtatatgtgataaaattctaattgcaattccaggtatattgttcttatgccaagcttccactctctgatatctgatgactcgggatccgctgcttggcggtctgtccatgaccgtattgttgcaatttgcgataagatctggattgaggcgaagcctttgctgtgtatcgattcacccgaaggtcactcggacgagcctaccgaggacctgaatgtgggacccaaggacgccctttcttattcctggagatctcttcgcgaagcaaggtaagttcaaatcttttttgactatgcatgatcgctgactggagcagcctcttgcttcatgccaccatggtaaacatcagttacggaccaagcggcaacgatggactcaatatggcggatttcgcaaacattggaggcgtgagcttcacacagttggctgaactccgccatagaggtgcattttccaacgtttcacagacatttgcgacatgctgtcaacgatgcagctcctcgaaggatccggcaatccgagaacttccgagaacctggtaccaggaagctaagtcgactatctttggctcggcatctgaactcacccgtcggtctgctggcttacctgcactggtgactggaatcgttggttccgatcccgggactcccttcttcaatgaggctattaacgagctccacgagatctcatcccttcccgttgagtacgacaaagagagacagtacttagaactgccccaggttcatgcaatgaattgcctgaaagatatcttcaccaacgcgaagcttggctcccataccgagccattcattatgaaagcactgacgctgtccgccgaacgccttgggtctccaatctgggcccttcgcaattcgggactgatgctcttccgtgccctactcacaaaaatgtgccgggccattcccggcgctgggcctggttttggaggaaactcgggctcagagccaggatcccggataacattccccaagtaccctggtctacttgaactgctctctggccttctcacaacgacgcagggcgaagcagcagaggggactgatattattaccgagcgggtgttccctgcgctagaactcgttggggacaaagtccctagcttgaatgatcctattgatgagatgctacgcgggttggttctggagcacctgagcagcccagtttggggtgttagagagcatgcagcccgtgtatatgcgtcgttgttaacccgacaaaatatcccggaggatttatgcactcttgtcaagagtccctcaaaaatcaccgagaattatgttcacggtgttgctttgtgtgtgcgatatgcccttcgtcgatactccttcaccaccgatgatttctggaaatgtgagtccgctgaacaattcctgataagactgtagttaatcatttgacagccaaccttgatgtacttttcacgaccttgcgcactgtattagaatatctgttccgtgttggaaaatcgccaactgtggcaggcgagcttgttgaaattctcaatggcacgttggagcgggcgatacaagcacataacgaaagtgaggatattcaccagagtaaagaaaatatacgtgctaacagatctatagaccaagttatctcttttataaacgagatattcgaggttcacgaactcgatgagattttgagatttgtttttgacgcttctcagacaggatggaacatctcaagcactagccgagcatctgccttacttagaagagcgcttgcttggtgcacaacattgaaaatgcttacttcccagcagtgggaacatctcccagcattcatcattggagtatcgcaattcgatgcagatgtcgctcgttggatattagagcagctccacgaattagttggcgaagaagacaggtacagacagccattggctgacttgtattcgtctgtcattttgggaggtagtcgacctgatgtgaaaacaatggccgcatccaatttggcttctatcgaggagaacttgttatcatcactgtccgactttgtgccaagcatcggtatcccatgggatgctattgcaatgagcttccgccctgaaacagatatcacaagatggaaccgagaggcaacagacgccgagctccgacttcgaggctgtatactggccacccggctatctgttgatcaagcagctttgtcctcatctgaaggcgatatccaccgctggactatcaagcttcgctctgccttgagcgaggagacagtgagttttatcgagaaatttggcatacaatcgagtcactgatctaatctttttcgtttcctaggaattcacaacccgttttgctgcagccatatccgttggcagcttttcacgggctcttagataccccggttcccagccacgtgtggattcggtgctactagatgtctatttggtcttgtatgacatgcttaatgatgacgatgacgaaattcgcgatgtggctgcgtcaagtgcctcttggattctgtcacactcgtcagtttcacctgacgccgacgtggccctggcgcctcttaatgcaagtgccctgcttgccgacttcattatcgataactattcagattccgcacgcctcgggcagcgggttcttcgatatttgactggccaagagccaaggatcagtggatctgatgaacgcaatcacccagttgccgtgtcagaccagatcacagagtatcgccaagagagcaccgtcctcttcgtggaggagaaacagaatctgtttatcgatgatgtgcgtgaggttgatatttggtcgcgagctctgttgcggttgactccctcggcatacgctaagctttcgttggatgaaatttctgcctggacctttgagggattaaattatctctgctctcttgttggtgacgaaaaagagccagatggacttcttggttgggtctcgaagcccgagatcttcaccttaggtctccgagttattatcatctcgtctgctctagcctcacaagtcttcacagcaccagagagtctgcaagtgcagccggctgccttccggggatcactcaaatccctcttggacgcaggcaaattgtcatcagtccatggggattggttgtcaaggatccagactgcattggaaatgtgagatgtaatgtgcattaaaagtgaaaccaggataactagttacatatacgttggatagaagatcaaaaaatatctcgtttgccatgtttgcgagtctgttttctctgctccttcctcatttcctcttaccttcttcacttgatgtcgatatcctatttaagacctccaatcaatcctcccactctccaccctcttcattctcctctttttgtttcattctatgcccattcatccttatctgacgtacaccacacaaatccattcccagcactgcagctgcacgcactccaaacccgtcacttcgagtcactctttcgctactgagttgcaccatgaaggacaatattctggtcgcagtttttctggcgatagcgttggtcaccccggccttcgcgtggttgttctacgtttggtatcggtcacatttggcccaactgcaccaagaaggccgaatcatcaacagaaggaaccaagatcgcgcccaggccaactatgagcccgcaaacggagaccaaaatgccatatttggaccctactttacccctcgcggatgggttcgaccaaaggcccgaagactatcccatgtcccgccacagtacgttaacccacggcagccgagcggtaacccgaatcctgaccaacctttccaaggacaaacccaagcgagcacgcatagtcctcagatggcgaaccagcagccgaacccgttatctaaacggcagcaaagaaagcaacgagcgttacaaaacaaacaaaggcagcaacaggaaagacagcagcggcaaggccaagatgagcaacagagcaagcaaaaccaacaaagccagccgaaacagaaatacaagaaccaaggccagaaccaccagaagcctcacagtgctcattcccccaatgcccaggagggccacgacgagcagaatcatgaatggggagacacagaagcacaaaatgaccaaaccaacaaccatggtggtggggatggatggggagatgatgacggcacgcgggacaatcagcacaatactgggcagaacgaggacaacaacgattggggtaacgatatcaacaatgaccaaggagatctggtaaataatggatcacattctccacgacgagacaatcacaatagcccaagggaaaagagccctcagtgggataacgaacattacgatgaccacagacacaacaatggaacacgagaaagcaatgaagagcaacaccatcacaatggatggtccaacgaccgccctgcttctccacatcaagcgtcaagaaatgaagcggatccgcccggtggttggggtcaggatgacaatggtgcacagcagaacagccatccacgaagcaactattccaacgaagaccgtaaccgccacggtgaatggggaaatgatgatgcaaaaatttacaagaaaggcaaagacaactaccgtgcatcttcggaacgaaggtcaagagaccagtcaagccccaaccgtgactggggacaaaatgaccataaagaatgggacaactccaggggacatgaagaagaataccgtggcggtggcagctcagcccggagccaaggtcacaatgaccatgaaaaatggggtaactccaggggacatgaagaagaataccatggcggtggcagctcagcccggagccaaggtcacaatgtagacagagacaagaagaagaaaaaagaacgctgggtgattgaattggaggagaatgagaagaggcagcgtcgtagtcaaaaccgcgaacgctcggatgcagcatgggaaaatcgaagccaggcttccggctggaaagagaaacaggaatggtgaattcaagttgattatttcgtgtggattggggtggggagttttccagatttctggatttgcgttcatgatagtcgatatttcttttctacaacctgtgtcatgccaaaaatctatatctcatagctaaatctcttaagacttctatacatttgattctcaaacacattgctcgtatatccatagctatactaatgaaactgaatcgaatgaggatgggatgttcactacattacaggccaagacttggggctacccaagtcctaacaaagaacctcgagttcttcatattccgcaccagccaatcctctcttgccctaagattaggaattcatagtgatagggttttaggtctatcaatcgagtaggagttgaagctggaggagctgtgattgatttctgagcgatatcctacgctggaaaaagcccggcttatagaccaagaaagaccaaaagagctagctatatatgttgttctccggtagaggccgcaaacgcgagcgacctcattgttcacctagatcgagagccccattagactagatgcgttagaaaacccagttcttgcataaattagagtcttggcgttcacaaacctgcaaaatcagcagaattgtgcacacaattagcgtgtttgtatagtttataaccgttttactgcaacgttggagcttattttcttcggagaatgtattaagattgtatccgctttggcagaaatatatgtattttggtaaggtaagtcacaaactgcaaacataaacgatcaaatataccgagagcaaaaagttgtatatcccaggacctgacgccacagaatgcagacaaggaacttttaaacagaacgggtgatgtgtataagcaatataatcgcgagaggtgaataaaaacaaatctatcagcgcgaaacagacgacgaggcgactgtgtcaggtatgttggcgagaaagaaacacgaaaatgtgcagaattcgatcccattctcgaaagaaaggggatgcggtggggtttgggcgagactatcccggaggtctataggtgtcgagggtagataagggaaattaatgacgatcaggcttgagcgataggccatccgtcgacatatttgagaggattaaatcccaggaaggcgtcctatgattgtatgtgttagatcaaatcttgatgacgtttgtgcaaggggtaacagaggaggatcgacaggggtgcatgaaccacgacaatcgtggcccacaagtctgccaatattcaagtgtgagctcacctggaatgcaatgccaacggtcgtgttcactgcgatgaggtcagtatggagttcaaaaattgtatttgagtctaatttgagtctaggggtaaacgaacagtagtggtagtagagcacatcggtatcgccgtcacggatcacagcttgcccgcctggggcataggtctctccgttcgagccgtagacaagttcgccgccgcccttgacgagatctgtaccgttcttgtctgtgaatggcccacggggactttgagagcgtccaacgcggatggaatatctgaagtacgtgagtatagagcaacaagtcactagatagcgaagacttactcttgaccagcggccggtaggttgtcttgcttcagattacagcagaaaccatggctaaaccagagatagtaccatccatcgttgtaggagataaaagcaccctcaataggatggggaccggttgggtcaccacagatgttattggccatgcgattcggcggggcgagggattctggttcccacgccagctgacggtcatcgggttcagtagtgctcgctggagagaggaggtccttgctcagcggaatttggaaaattccattccagtagcttccatatgtcaaataagcatgtccatcgggagtgaccaatgtgctagggtcaatggcattggacttagtgtacggagaaatttccgatccattgcccgtgccagtctgaatgacaatgccgtgatcataccagttgcctgggccaggagagttagaggtagccacgccaacagcactgtcgcggcaaccagccttgctaacactgtaatagcaatagtatgtgtcgtcgacaacgataacggtcggggcccagggtgcggcacgatcaccctttgggattacactcttggcatccagcacactgccaacgcgcttccacgggccagccaggctaggcgcagtgtcgatgaggatgtgttcgccaacatgataaagataatactcatcgcccacacggacaatagtaggatcatgtgtatgttgctgtgtctgacgaggagggggaaagcggcttatagcctggtcacttccgagatcttgtgacttctggtcatgctcaaagttctggtctcttcgattgatacccaaaccaagaccaacggagaagaaacatactaaggcgagaaagagaagcatcttaatccagcgtcgagggaattgcttccaaaaagactgatgtcgaaatccatcgcgatggccagacggcgacatcgaccgtgataagtgaccggccctgacgatcatcttgatggaaccaggtacacatcgttttcagtcgacgcacggcgttgccaccctagtagggtggagttgatgatgcagggcagcagggcagaggggtgaaggagctgcgacacggtccactggttactcaatagaggcccacaattggacatgcctgcagggtttcggaatgccgaggtaataagttgttctgtatattgcaggagatacagatgggttattcgccttggcgtgatggaagcggaagggatgggaaggcctcgtggcacaaaagatggatcactgttagaccaactacatatcaggcgattgaactccgagatagtcgtacaccgtaactttgtacataaattagtgaagtcggcaagcaagggaggtacctgacttttgaaatcaatcggttgcagtgtcgatcttccagatgtccttttcaagtcacgggaagtgattggtcaacatgttcggaatgcgccttttgccttttaaacatatcgctcttctccaaggaggatgaaaacggatataaatccatctaggagcaagcccttttctcgtttgacacctttctaacaatatcatcctgtagggttgcaggtacgagggcacgggtaagacagagccttgtccttgtccgtctagggctactactttctatacagaatagcctagactcaagagaatcggagttaaaagaattggatataccaaatttgttccagcgaggtgagtagtgacaagtagtaaaaagtagtaaaaaagtaaaagatatccgccgaacgccagcgccgagctccatcagactaaagatggagtatagtcttctatcgagccacgatcttgtccacctcatctctagcttcggtccatgtctccaggttcttgcgagcccagtccaagtgacaacgagcatatgcgacctagaaacccaagtttagtcttagttttcaggtatgttagggggccaatcataccatgtaccgtcgcaggtcagcttctttgtccttctggaagcgcttgagatcattcagcacacccgcgctcgcatccttgacgtccttttcggacacttctaacgcttgctccaactaaaaatcgagattagctttgaaaccatctgaaatttttactccgtggcccacatacctgaatcaaactttctttcgtctttccaatctggtcccgacgtgttcgttcgggatctacatcagcaaatccgtggatggcatggctgatgcgaccgaaaattttattcgccacaaatgtcccgctggatgtcttgcgatgaccgtgtactgacgggtccgatctcttgagtcctccaatctgcgatccaggcagagagcttatagaatcggtgtgagtagattggaggccagagtcggctgacattatggggccgctgcctccttcgctggcggatgaagttgacagagaacgaggcttcgtcgttccagaatgagggttggtgcgattgagatactgctcgatacgcttggcttctagttcactgcgctcaagggagtctagtaaagtttttttcttcgacaactcatcgcgagtcatttcttgttgtacccgcttgagcactctgtatcgtagaactccgcgaaccacactagcaaattgagcactctcccgcataggttccgcaaaacttgcgctcagagccgaggatagctcttcggtttcaatatacgaagtatctgcagcctggccgatgcgctcaatggcggcagctactgttggtgactgttcagaaagagagaatccgttgtaacgcgctcccaactccatgaggtcggctgagagtccagacaaatgcgagagagttcgtcgattaactttctcaatgttgccctgcaaaagtagttctagctcacgtgtagaagcttcaaaattaataaagtaagggtccagttcttgctcgctaagctttcgagactcaggagggaaccgcccaagcatctcaggtcccgggaatgagggctgctcttgctcattcggtgacgtaggcgatgctggatttgcgctcgctgtagtaatgccaccgctggtcttgagctttgcggatgcagagggaaccgggagccagccatgggctggtgtgggatttgcggggtcaagaggtggcgctttgaggttattctttgggacagatgatgcaggatgggagctcaaaacctcactctgggcaaaagttagctaataaactcgtcgccaggagcctcccggtcaaacctacccagctaacgttgggatctaggaatctccaccacactccatcctcacggatctccttcatacaccgacagcggttgagaaacacaccgagcatgcgctttcggagatctataatggccatatcatctttagccctggtaggtttagctgcgtagtccgccatgctgtgcttctcgggaattggcggaacaaccaaggtgggatgcaaattgacaagcgtttgtcgcaatgatgcaaactcggaatatcgacggcgcacttccaggtcctatcaacacttagcattgtacagttccccgccaggcaccattatcataccgcagtccgaatcgtgtaaacaataaagcccccgcctccctcatggtttttcccggcatctgtgatcaagattggcatatcggggttttcataaaggatctgttcaatgcggctgtcatagacgctcttccgggggtattgttcactggcggcaccatactcggcctcatcttcgggatcgctgagatcgtcggtatgggtgatgtaatcgggaggctcgccgttggagtcgcgactagacggaggggatgagtcgtgttcgtagagagctggctgctgtgagatactgatccaaaggcagaagcgttagggtgcgaaccgagcggagacttacgaggagagagtgcggctgaatgtaaagagtcagataggccggactgatgttggtcaaaggccccgtagggattgttatcttcgtcgttccacattatgagggtatggacgctggataagaccaactagcaccgcaaactgagttggagaagctgtgcctgggagatctgcgggggggaagtcgtggtgtggctggtgcagggcggtgttcgcgattacgtcatgaaggaggcttgaactccaatcttcatcgatggaatatgggcaagagactgtaaaatgggacagccgatgaaaacttgaaagtgtttggtagatgtcttgtgtcctaggatctaatggttgcgatgattccagcttgaacccccgctggtccaaaagcggtcgatgtatatatatccatggatcggtaggctctaaagcaggacatgaaatattaccgagccagtcaagcttaaccaatatatcccccaaacaagattggaagggagttactctacacaaaaaggacttcgaaattaacatcaggtcagagcaatatgctaataaaaaggtgatttatgctgaagggtgcatgtatggcaacaggctcgaagtaaagaggtaacaaatagttctagaaccgatttccatatctcaaaagcctcagatgttgtcccgccgtgtcctgaacaagcatcaaagtccataaagttttctcgtgcagtggaatgactcccatatctcatatctcaatgtttctgcgcccagtgtcttacgtctgatcggcaccctgaaagcctgcagcatcgtgtgcatttcgtcccacctgctctgtattgtgcatagttaataaagccgggttgattccagcaactgagctttgagtgcgttgtagaattgggagaggtggcagcgttggagactggggaggttgcggagcagagagcgagaaaatccagctattggccttgtcgacgaaggaagtagggttgtggccaaagtcaaatccttctctcaaaccatgatccccactggcggtgagtgaatgatttccataatggggttgcggctcctgggagctagccagagtaatgttgggttggttctggcggcgttgacgtaggttccgagtgaactcgttgtgagaagaggtactgtcggaagtgagagtgacagaaccaagttcgccaacctcgaggcggcgttcaactgggtggtccaaagtgtcactactaagccctagcgcaaagctgggagaagtggtacgggcgaggccgattccatcatgaggatttgcagcggatgagttgcggcgagctggaatatcgggaaactgcaagcttggaccgatgtcaagcacactaatctcactttcgctcaggactgaagcacgggttcgcatcgagtttgggacggtaggacccggctgtccattggaactcgagctttgagtcggggcgggggtcgcgtacggaggcatctcatttcctagaatagaatttggtctctgggacttcaataacttgagacgcaagacctcgagcctcagaatatcgagttggtcgccggcactttggtgatccaagtgtctatcagcgttgtcggcgttgatattttcaatcagcgacctggaactggcagcactgaagttgatagcctctggacataagatagatacgttgggattgagctcgaatggctcatggctggagaatccctgaggcttcggagaaggcgcattgcgtttcatttcgggatgagtgcgtggatttacggaggttgggtgattgaagtgagagaagcgtggcaatttggagaccatttgcgtggaggtgattattagcacgcaccttgccctaatacggaaggagggactgtagggctggcactttccttacaaagagccttggctacatgacttcctattctgtacagatctatgtacacatcatgcacatcatctgctcataccgtatgtctgtatgcattgcttccgacatggagtccataaacggagatgtctaaatccctgagtgactttaaatgccatatattccgataggtaaatcaatgcaggacattttaaagcacaaatatattttgcagttgccataaatattagtactatgagtgcttgccaatctcactagctgcacaagccctcttgtacagcctatggaatttcactccacggaatcaaacactttctgttgactggaaaccgctagcacatatataatgcatatagctataagaccagagtcttgtctagtacagcatatatgctgataatgcaggaagaattggacaaattatatataagagtctagcactgaaacactgcccgtgaagcaagttataccaatcccgaaacaaatatgtctgcatttatgatccacttaagcctcttggaactgtcgtttgatagtaaactgatcgtgttctaggtagataacaatgggagaacagagaacaaagaacaaaaccatcaaacttcacagaccgagcgaggtcaccttatatggacacacattgctagcaccccttgtcgacaagactaagtgtagagtcaaagtgtggacaaatttgattccgtccgacctacgataaaggaagcaaggccatagtaggcctacgccttgtatgtaacgattgtatgtagcgatgaatctgatactcaagtgatgaacttcatctacaatttcgctatatctttacgttgacctgaatttggcctcactcttactttgctttgagaagatgattgaaaaaactaaaacaagaaacatgatttttattttgtatgggccacctgcccatcccccttctatgtagagaaacatcccccccccccccccccccccccccccccccctcttttttnnnnnnnnnnnnnnnnnnnnnnnnnnnnnnnnnnnnnnnnnnnnnnnnnnnnnnnnnnnnnnnnnnnnnnnnnnnnnnnnnnnnnnnnnnnnnnnnnnnnnnnnnnnnnnnnnnnnnnnnnnnnnnnnnnnnnnnnnnnnnnnnnnnnnnnnnnnnnnnnnnnnnnnnnnnnnnnnnnnnnnnnnnnnnnnnnnnnnnnnnnnnnnnnnnnnnnnnnctcccccctccgcccctcgtccccttttgtttttttttttgtttttcttttcttttttcatatcattcatgggtccaaggacatgatgtcctcggaccccacacgcagttccacgactgggagatcatcggaggaatcctccccctcacccccagaagtgagaccaaactgaaactgagggtcgatgcccatgccatcaccccatgggcatcgaccctcaaagacgccatcctcggtggcagaattaccaccggcaatctgtgagatgtcgtgagcggcgtcgaacgaccaagagggttccgtgagcttgctgagggagtcgacctgcgatcctccgttctcgtgctcaaagccgtttttcttaccttcgctacccccgtcctccgagcccgaagtactctcctcgacagaagagtacagatcattgccgagggaatcctgcccccggctcacacggggtgccactcctgccctggccaaggcagacgacaccttgcggggtgcgctgccaatggcacgaccgccgtcctccgaaggtgattgggacccaccagggctgcgggaaccggaggaactgccagacacgctccccgcgcggttccggtagccttcgactaggtcccgcagctcctggttaccaaatgcacggtcggagcgacggcggtagaacaggagataggcacccgatgtgatgatcgactgcatgttggtgacagtagtcgcagaggtatctgaaatgaatgtcagtaagatatctcccaattagcatatggagggggcatcgaaccgttgcaatagacccaggcaccggaaacaaagtccttgatgtaggcagtgtagtggccactacccattccacccatgtggttgtcgacagcaatcaaatcgtacaccgcactttttccattcgcggggccttccacgcggctgctcaagtctagtccctcgaaggggaagtcgataagagtgctgatcttgtgtccgtgcctgccacggaattggctaaatcgcttgagctggatgaccataatatccgggattctccacagctcaaacttcttggtggccgaaacgtgagttttgcactgaggacaaaaccagctatctgcgcgagaaagaatttcctccttgctgaactcgtccaggcattggtcgagagagacatttgtttgcttcggtttcttctggcttaccgccatggtatgatcatagacattcttgatgctcatgtaggtagggcagccacggagctcctcgggatcacgtagcttgccgccgaaaagggcatcaaatgcatcaggagtccagtcaaggagaatggcatcgccttggtgaaggaggggtagtgctgagtttggtgtgacatctgattcatctgtatcaacgtcatcttcggcattgtcatctgcggagcttttagataaagcatcggatccctggcaaatattagcgggttgattatgaatggacaagatggaataaacaaccttagtagaagtgggaggagatgggatgcgagaggaaatagaagggtattttttcagggtggagatgttgcgtccatcaggcaaagtggcatttgtgctcatgactgtcgcatcgaaaagtgacaacaaactggcaggaatcttgccagcaagaggatgccgaggggattcgacagattcagagtcagaatccgactcatcggagctctctgcaggcttaggcgcttgctcagcttgcatagaaatgtcgacgatgctgtcttcgccgtcaacagaagaagttttgattcgggaatctgctgatcgtgcatcatcctcgtttgtgaccacggtgtcagagtcatcagctgcattgtcatcggtcgttttttcttcgacggccagaatgtcgtgtgtagtcagattattggcttgggtcaagagcttgcggtaaattgcctcgaggttctgagtttcgtcactagaaagacgtatgaaggatgggattccgaaaagttcacgagtgggctctctgtccttgcgcggaacaagtttgcggtggaagacgggtacaaggattgcatcaccatcggaggtagtgtcagaagagttggtagatgctggaagaggaccaagatcaaagaacacaacggtgtcttcttgggaaatgcgtagactgccgaaagtatagtcatcgtcgcaaagaatttgccagaaggaattgtgcaatgtttctgctgcaaagatttgttctgcattaactcccaccttttgaccgacaaagttcttccagtccttcaaagtatcattttcatccaggcggactttcagagacaccggtgggccatcaagagggtaaaagttgattgttcgattgatcagtgttggacccgttgggatgggcacagtgaccattgtgaaaggatccatgatgatgctggtcttttcacaattgtggcagatcaatgttgacttgtacattccagcgaacagatcggtgataacggaggcgttacgggcctcgtagagctcccaacacttctttccgaaatcctcaagagccttgcgatcatgaatcatctcatcagtggaatcaggaatgacagtggatggcttgctgccaatgatccggcttagatcttccgacagtgcatcaaggagaaacatcacaaattcctgactatcatgttgatcatagccagcaaattcttcacgttgccgaccagcggcagcccggaacctagaggggttgacacatctcggctgagggtccgatttgtagagctcctgaagcaggttggcccattgcttggcaatggcgccgccgcatccaaggacgttgttgggattcagctctggtttgtacaatccacctggagattaagattagcatcacgttcgcagtatccaacagtaaaatgagtgtacttactaagaaagtaataagacaactcctcaatgcttcgcacacattgcaacgcagagttcatgtaacaagtattgccaaggttttgcaatcccacgatgagctgtcgacccttccgacctcgagagatgagccccctgattggatcgggagcaagtgtaggggtagatctgccactggcttgtgtgctcttcggtgtggcttttgcaacagctgctttgctagcagtatctttcttcggctgatctacagggatacctagactcttgagagttttggcagaggcttcagacacccattctccacctttggaaccgccgacctgttcctcaagaacaacacaattcgccgcggcaagaccagccatgtccaaggtcatgcgaccgttgtagttggcattgtgggtttgatccttgacaccatcaagcaacactcggtggcttccctctggaagttcgagaaaagcgttcaaatcgaaaagaagcttgtcgttggggtcagagatcagagccaatggaggagctggcgattggctgcgggagacagctggggttgccaacgctgaggcagtggtgctttgggggagctggaggattttccaaacccgaaccttggtggacatatcgacaccagtctgttctttggcatccctcaaccatttttggtaattcgtctggcgacttgccaggatcttcacagatggcttgacggtttgtctcaagatggtcggtgtagtacccacagctgggttggacagtttgaaaatggtgagaattggaggataagtctcatattcgatattttcagtatcaccgggttggttggtgttgtgagcatagcgaattatgatgggtgactggtcggcgaggccgtaccatttctggatcaagtcccaaccatgttgcggaatgattgcgaaatccagagcgtcgtgcaaaccggggcgcataggtacgaaaacttcaccagtttcgtctttgaaggtgggagtggccgggtcggtgtcgagcattatgttcatattgtcgacgggaccgacatcctccaatggtcctttgtccgtgtgatcagcatgagccgtagtacgtgcaagcaccttctttagccacgccattgacacaacaaagcccttttgtccatccttcagcggcgctgtcatcaacgcattcacctcagccacctggtcgtcgatcgtaggaatatcgtctgatttgggcgatgccggtctggaccgctcgccggccgaggatgccggcccggtcttctcattgcttgaggtggtaggataggggggttcatcgtttgtgccgtcgcatgtgcggggaataatgtatgtgcgggtgggattgaagccagtgctcacgcctccttcggggtcagagtcggtgatttcggacgccgggcgcttttcgccaggagaaggggatcgtccatgagttggaggtgtaccctctcgagtatcggagggcatgtcggaatggtcgctggagagggtgagtccggcggtcgcggtcgcgggagtgagcgagcggccaggcggacttccagactgaaactgcaggtgcgcaggcacgtagcgaggcggggacaacgacgaactctggccgcgggaggaggaagaagaagacgtgtggcgagagtgtggaggtacggagcggccgtgacgttgagcccgaaggcctggactggtgcgaggctctggggaaacctttcttctctttggggaagacgtcgtggcgatgagctgcgcacctcgtgtcgcagctcggggcaaccaggggaaaatagtagataggatcaaagtagcacccttacttccttttggtggaagtacaaggggatttggttgtgaacaagcgagttcgactggcagaaaatccgaagtttagtaatttttttttccggagcggaaacgaaaccctgggctatccacaggcgaccagcgtctgtagatgaagtgatgaaattaagataattggtgaacagaaaaaaaaaacgtaggagtacaagtaaaagaagatatgaaaagaacacgatgaaaaagatgtaggggaagaagagaggagaaagattggaaagagctgtgaaggtcttatacttgagggcggactgttcagagtagttcgctcgaggggagagacttgtgaatgggattgattgaaaagctattgtgactcacgtttctcttaacgcgattctagttctattcctattgggggttattgtcatcttaatacggtgctattgatcctattgcgaacaatggattagggcacaatgccctcattatcgcgaacgactcatcagattagactttgcaaacaagtatgagtttgttagcagaaacaacacttggaaaatattaagcttattttgcattgtctccaacctagctgctttttataagcaaagccagccatggtgagatagatatgtacaataaaaataagaaagaagagaaaaagaaagcaaaacctgtaaatcaacgctcctccacgtaaagcctgtacatggtgttgttctccgctcccgagaggattaactccacatcagctcggtagggtataaggttagacgggtcactgcgaccccatgcagcaacagcattgagatcacctttgaatcgcatggtaaggtcgagacagcagtcacagagcatcaatccacacccgcgggattcttcgtcacagtctactacctcagcgtagacattgactggttgaactgcctggcaagacccgaatgcgggctcccgacacaggctgcaccattggtaaggggaagttcgaaaaacagggccagccttgccagtctcggggtcagtcagagcttcacttgcttcctctagaagtgctgcagcatcagtccgcatttggtctttcgttgacaaaggtacaggtagtagatggagagtgtcatgggagcattgtatgattttgcatcgattccatgtacagaagacgcacatccggctctgttcttttccttcggcaatgtggccatcttgtagctcaataattgtgccgttatctaatgtgcagacctctggattgcgaggaccaaggccagtgattccatatgcaaagttgttgcaccagtggcaagggggatcttcgtcctgctcatttgcgagaaacactacaggatgagcaagttcagtccagattcgatgagtgttcgcgtactgcgaagggatggtatttgagggtgtggtgcgagtaggtgactcgagggagtcagagatatagatcggtgagccctgcctcttcggggtgttcggtgtttcatcgtctgaatcagtgattacaatcacctcatgtggcttcggtccctcagcaacggagggatgtgcgctgctgaatagaggcgaagaggtctcccaagaattgccctttgtggggttgatctctggaatctgggtctttggttggataggggaactgagttgttcactcggtttagatacctcagaaacatcgggctctggggttccatcggttgagttggagggtgctggagaataaactggagaactgcttggctcgcttggttcacttgtggcaagcagtgcaaaaggtgcgtgtctagctggtccagcaacacattcgaacccatgatttcggcatgggagacaaggttgtgaatggtcatagtcggcgtagcgatacgaacaaatctctttgttctgccctttgcaacactcgcatgtttgcttccatttgggtggggggctcacgacgcaaaagacatcatcgatttcacatattgtgcaaggataggcgaacggatcggggttagatttaagcgagcattcaaagcctagctcttggcaggcagcgcactctctcagccgaagttcgctatcaggaggcaggacatccccagtcgactccgatgcctcggcctcgacctcggttgtgtcattcgtttgtggtgattctggcagcacgtcgtcattgtaggtttgaaggccgtactgtgaattcggtgtgtctatctcgggattcacggtccagtatctgtcccagctgtcgggctcactgtgttgagacggtgtccaaggggggacataatattcactttccgtgcctgcgctcattctcgaacggaatatagaaatcggagacaagctcctggctcgcttgtctgatcgagggccgtgataatcctcatggaaaagagatagcttgcgcttggtcggtgttctcttgctggaaggttggtagtctttatctttgtcattgtcatgccatgacccaacaacagcggcacgcttgagggcacgctctcgcaagtgatatggtccagcgaggtgtgggagcatgcagaatttgctcatactatgttcaaagacctgctgtgctcgctccagtctccctggagagtatgacatggtggctacgagctgtgaagaagctgctgtcacattaataagtgtcaagatcgtaataaccgcaagcagtaaatacttacaggttgtttagattaaaccaaccaaggagttttgtcagtttggaagccacacctcggttcctcgaagaatgaaaatggaggccgtggctcaagtgatgggtttgattgacacctatcaatgcgaaggtaccttgaaacgcttggaagatgcgaaaaatatgtatgaagatggatagatggtcgaatgtccaagtgacggtagaacaaggaatgttgatataagcattcaatggctcgaactgtacgttagaaagtgaattagaagtgaagattagatgatatcgatgtaaatattgactgcagtctgtatacagtaaaataaataaaataaataaaaggaagtggaggggtctcaatagcaggaacaattgattgaattgaattatattgaattacattcatgtctcgatggggaactgtagcaacatgagacaatagcctttggatcacagaatagtaatactacaatcaatagcaattctcacattcaacgcagaccgcaaagccgacaccattccccacccattatatcaattcgcccgaggcaggattcatgtgtcacttgaaattactcgttacgctcatagagggggcggggaaacgacacccttcgtgggtatagtgacatgggacttggtcaaaaaggtagtttgtgtaggatctatgaagatataaatgagagcagtctggataggggatgtcgtggcagtagaccaagagatcttggaaaagtcatcaggcatgttatcaattcgcgttggtgtatcgcattctcggcgtcaggctttgttatttcgagctttgctagtctgcccttttcaatgaatcaagctgtaataaatataatggcgaccagcccgaatcgaactaaagcctcaatcctattgggagtcgcttccaatgagacgaacatccccagcagtacctttcgccgtatcgtggtaaccgacgggattgtagatgatgaggagatatcgcagctgtaattcgaagacctagtaggcgaaatagattcagtgtccaaatcaagcttttctgaaagggtaaggctggcgtatatgttaacagagtctcgatcttcgtgatgttagctttggtttctctgagctttgctcgacacaccaaccacatagaatgtcatccatttggtaagaccacacccggtcagatcgcatatcggttcgactgtccgccatagtaacgataggtagattaggttggagggagtgagtggatttagttggtagagaggaagacaacagagtatgtcgtaggcctatcaagcaactactcgacgtctgcccagaatatttgaaggttgattaacgccttagatccccaggatcccaaaccattcattttgtacagttcaaaagtcaactagttatgatgttgaactttaatttatgtgaaatggatgttcgaagatgttcaaattcattgatggtcatatggaaacacgctacatggtattaacacgaaaccagaaagacaactgaagagaaggacaagcagtgaaaaacaaaacccaagtagcgcctgtaatgcagtcagtggcaatatgtgaggtcaaagcactttgattgagccacagccgttcgtgaatgcgccagggtatccatccatcaagtggagatgcaataataataaaagaacagagaagatggcagcgccgcagttatacgccccatcccatgcagacagaaaatatgtaaccaacaaggaaacttttgatagacaaaagaagaaaatcattggccactcgaggcccggaaatcatacatgcgaacttgatagtcatcaccaccagtgataaagcggctgtcgctcaagccaatgcaattgacagctgcgctgtgaccttcataggtatcttggccagtaggaacacgaggatcccagatcttgaccatgcgatccatgccaccagaggcaatccgcagagtatcagcagaaagagcccaaataccctccaggtgtccgaagaaggtacgaaggcatcttcctgtgctagtttcccacaatcggatggttgtgtctacaccgctggtgatgatatagcgcgggggttcaacgcggccttgatcctggtcaaaggaagagccgaatggtgagttcgggagagacagagacttggcctcgagaagaggggaaagtgtgctcaggatgttgtcgccgttttgagaagatgtgctgacgtggtcgttctcgcagtcggcgaggtggttctccagttcaatttctcgaggcaaagcaagaacttgctgaacggccccaatgtggttatggaagactcggatgcaagtcttggtatctaaatcccaaaggcgtgcggcaccatcgtcacaagcagtcagaaccgtgcgcgaagccgagtcgattttgacggcgttgactccctgtgggtgtggtagaacgaaagtagacttgtccttgaaattccaaattttgacagtgcgatcgacagaggcggatgcaagaagagtgcagtcaaagtgaagagcaatgacagcttcagcgtggccattgtatttggagatacattcgcctgtacgccagttccagattctgatgctgcgatccagactaccagtgatcaatttggtgtcatcaaactggaggcatcgcactccggcaacgtgacctttgagagttctcagttcttcgccagtgtctgtgtcccatatcttgaccgtagcatcataggatccagtcatcaaaatgttgtcctcgaactgcagacacatgacactgtctctgtggcccttgaagaccttgactgagcagcgcttgtgcttccaattcataccgacgacaaatcgatcccgataaacctctttccacggacggtaacgagtcttgaaataattgtcatcctcttcaggggactggggaagcgatgcacaatggcgctttgcaagaacggagacttcatcggattccatcttgcgtttgccactgactctaggttcttcgaccgtcgagcaagattcgaccattgcggcttcagtcgacccagcggcaggctcgttgttgccccagttggtagcgcgcaattcgatctcgcgcttggcttcacgcagacgcttgcgatccagaaggggaaggccccaaccacacttgttacactttcggcggatatgttgttcgcacatccggtgccaaaccacatcatcatcggcgagggctctccagcgggaagaaacttgtgctgctctgcacaaggaagccgtgtcgaggtaacgcagaattttgaaggatagctccggaggcagggcaccgaggaaatcgattcggatgagttcgcggacactggcggaaatgtaggatagttgggggaagcaggactgcgccagaattccctgcagcatgagagttcgctgcttcgccggagcagcggagaacaacgaccacacatgggaaataccgcgttgatcacattgaggaagtaagttcagctcagattgcagctgggtcatcgactgttcatcggcttggcgtctgccgcattttgagtccggttgatgccgatagcagtagctggcatttactacgtggtgctcggatggagcggaaacctgtgagcgcaaaggcgcatattgtcgtggctgatatttttcgaggaacggggccacattttgcctgcctagttcgtccagggtttgggtggtattgtcggtgtttttgcccggcggagagcggttggagtcggcgttcgcactgacccccgcgtttgcgatgaccaggctctgctgcgtggacgaagattctggtttatcggccatgatggctgatctggtctcgcgggtgtgaggggacggccgctcgggcgagtgacggtcgtgtctgatgtaccgagataagaaccagtcggtttgcgtatatccctgatctcttgggttgaattgattattttgagcacgcagaaaatatgtcaatcaatctcgcgatgtatgtccttgagaattgctcgacgatcaggatagaggggggggtcaagggctatttgattcaaccttggaagtaccctgagaggaagtattgagataagagcgatatcgagcttccaaggttggcaactaaattccacttgaatgataaagagaaagaaaaaaaaatggatcgacagaggcttttaaatcagatgattattcaatgactgagaaaattgcacaattcggatgtgtctttgatatcgccatcgatcagtccggggaattattgcgtgacaggggcagagcggcaaatacgtgatctgggcggtgaggctgcacgtgacaatgatccgcatgtcgccatctccacgccatcgcacctcaatcaatcagttcctacgcttccgacaggttgattcgctatcatttggtgcgacaggggtgaaacgggccatttgatctttgtatgatttcaggctagtcccgcagccatctcacaccgacaactcacactttgtgagacccactgtccctagctttcttggttacaactgcggatctacggagcaaaccttctgtgaaccgcttgccgtataattcacgtcttaccctgggaatcaggtctcgaccgagaaagcctcaggctgtttttcatccctttattcgcaagtcatttctgggctagagctcgtgcttcactttgggtccgccgtgtagagcacggccctggctcattgtaccgagcttccaaggtccccatgacctagctcccaggtctatggtctacaaggtagccattctctcctccagttttgaccaactctacagcagtctaatttggcaaatataggcctatattgaagtgtcctaggggcttggtggagtgaacgcgttttatcaccccatttaccttgtagctgtcaatcaatttcacccttgcccctaaggggtctaccacttcatcgactctggtcttatcttattccgaatgcgccattaacaaggttaattgattttcaaaatggcgtcatcccagtcctctttatcgtccattcgtccgcaggctggactggacgaggaccaacaatccctaccccaggttgacactttgatctcgtatctactgggtgccaaacgctcgctctcctctattagtcatgtctggcgggccaatgaaatagtcactgcgtcacactcagcactggagaagagtgttgtcctgtgctctcggacaggcttcttacgccgaggcctcaatggacaactccgtcttttatacgacgttcgaaccgaggtcgagcagatatcctaccggggtcgtgatgagttttcattggcactaaaaaacttggatgctgctgatgctcggctaagaaacacgttagatctgcttcgcgggaccatcgtccacgcgtcattcagacctggggatgaaaagcagaagtccttacatgactttgtcgatgagcgaggcgttgaagagctacatgcatctttgaaagcgtctatcgatcgcactaacacagcgcgcgctgaactggatacttccaatcgtgaattcgatgacgaacttcaagccacccgagagtcgcttcgtcactaccacacagccacaaagttggcgtcatcccggttatcaatcacatcttcctcgtcgtctgcgtccgattccggccttctcaccttgtcgtctatgccgggccagattcaatcactggaggcccatgctcaagaaatggccattcttttggaagccctggtcaggcattttgatctctgtgtcaccgctgtgaagcataccgatggcggaggagcagttgcgcgatccatcacaggggatatgccaactggtgttgatggcagcaatgacggaatgccaaacatcggggcagagatcaacgccaatctgaatgcacctcttgatccaatgactgacgccgagtatcaggagatggtggctgttttaatcaaagatgcccccgaggcggatgatgttgtcatggagatccaagatcgcatcaatgagatggaatccatatttgatcaagtgcaagctcagcgagatgccctgctgtccatctctaaagcaacgatcgacgtgcacagtcacctttcctctctcgcctcctcccgcttacctcgttatatttcccaggcacacaacttcacgcgcgtgtggcttgaagaaaatgaccgcattaacactggcctcgctgaactctctgatctgcactctttatacgatgggtttctcaatgcttatgacagcctaatgctggaagtagcacgtcggcgtcatgttcgccaacgtgtggaaaaggtgctccgagacacccggcacaaactggaccagctccacgatgaagatgccgctgctcgtgatactttccgtgctgaacacggtgactttcttccctctgatatatggcatggcgttggcttagcgccaatgcaggtgcagttcactcgtctctcgggcggccacctagatagtggtcctgtggcgcagaatgcaatcgatggacctaaagcagacgactatacaagggctgtcgaggcagaagtaacggatggcagtgccggaggagaagagatccctgacctgccaagagacctcgttgaggaagcttacgcaagggtcaaggcacgaaataaagtggcgtcccaaatgcacaccgcttgatttccgtggtgtctacgcttgcaactttttactttcatccggtacaccgagtgttgtaccattgcaattggcgtccccgacctcgctctaaattccccaccacaattgtagctaggatggaaattggatctttcacatctcaatgccgctcctaacttttacatcatggcattggcatggtgcggcttaaatgaagaaaacacaataggtctgaccttccgtcatgctcctcatatatgctccctactcgatgctcatcttatagatgcatactcttgcgttattcgcgggatgtaagcactgtttgagggcacttgtggggaattcatgacgagagcacggattggagtgatgaccaaagagagctctgataagtttttacccacccgatttggtttctttttctttcgaatcagttgtcaatacttcgtatatagttattatgaatagtctactcttaatgaaagttttcaggttcagtcttgaggagcttggatcaaatatttatgttttcccaattctatcaagtatagaccaaggtatcaaatgcccaatgctccatccatatatgcatttcatcatcagatcatgccaagcggtagatgacacagagtgcaaacattcgcaactcgtgcacatgcaaagaaagataaggtcagaaagctacgagagcttatttcttctttctacaagagccagaaacaagctttttcttcatgtgcttcggcatcttgtttgcccgctgctcacgcttctcctccttgacctttgccttgtggtcgcgcttggagtctttgtcttcgaaacgcttgcctcgtggcggcttcggcgcgaacggatctatttcctcgtcatctgagtcggatccggagacggagacgccgccgcttgcatcagacgcatcatcttcgacagcatcagtagcagaggccttctttttttcgccggccaagaggtctccgtaaatcaggtcagcaccttcgccatcgcggatgcgttcggcgtcacgttcgacatcatacacttgctctagggtctgaggaatatattgttgacggaagacggcggtgtcaacatcctcggcctcctgctgctcatcatcaccctcctcacgggcaacgaggagcttttcgatggcagtcgtcatctcttcattgccagcggtgccatccaatggtccttctggggagatgatgaactggaacacagtccgctcgggaagagtctggatgttctttcggcggaagaagtcgctgacgttcttgatatccatgcgcaggaattccagactgcgcgggtggtcgtgctcaacactttgactgacatcgatgatatacaggcgttccttatggtacagaatgttgtactcactcagatcagcgtgcaccagacgacatgtctggtacataacgcgcatatagcccaacaattcaatatacagtgcgcgccagcgagtttcaggttcagggatattgaagtccacatccttgaggcgcggtgcgcctagaccttttgagctaccgatgaatcccataacaaggacgtgcagacgaaggaagataggctcggggcagggaataccagaggcatagattcttcgcaggtttcgcatctctttctcggcccaaagtttgaccatggcgcggttgttgctcttgttgtaaccctggcggaaacggaactctccggtgacgtacttatcgcgatccttgaataccaagatacttgtcttgtagaccttgatcgcacggtgtagtggggcagcatccgggtcttcctgcgagacggacatggcatggtagacattcgcttcctttccggtcgacaaacatccgtgaatttctgagacgaggcctcggttgatcatttgcagcagaagcatccgcgtacggggatccaacacttgttctgatgtggctcggtctgccttatctgctccacccttgtcgctgcgccccgaaaagccggcctgttggtcgtccagcttgatcttcgcagcatgacgagtgagagacttgacctggtcatcgacatatgcggatgtattcacggtaggcttctgggtgttcgtcttggggtatgtccatctcggcacgttcgagtcgccagcgaggtcgttgattctgcgttggcgattgtatgctttggtaagatcggtgttgtcagaagacagaatatcttcacgatccaattcatcgtcaaaaatgtcgtcgtagtactcgtcgtcctcttcctcttcctcttcctcctgcccatcgggcggatattgccccgcctcggcggagtctgcggtatcagggttcacgtagcctttgttgggcacgtaggtatgcgacggcgcgaggccatcggcaattccagctgccgcggcagtattctcattcgaagccattctggatctccaaagttgagaatgtagagatttgaaatatgtcccgcgggtccccaaggttttttttttttctgtgctcaaattagggtcaccgcccggcagaaccccgcgcccaacgagacgcgctaatttcgttcctcgcgtatgtaggcaatctccttggttttgcaacgaatcacgatacccctcggcctttgtctgttcattactagagagatctgctggccttgatctttgtgatatactccatccttaattttgctcttgcgccaggcgcgttatgctgagagtcctctgattgatcctcgcgtcgcgcgtttcttctcaagatgtatgtcaagcagatcattatccaaggcttcaagaggtattttcccaccccatccgcaatctctatgacgttatgaaatttatattgacctcgtaccaaattcagctacaaagatcagacggtcattgagccattctcccccaaacacaacgtcattgtcggccgcaatggttccgggaaaagtaacttcttcgcggccattcgctttgtcctcagcgatgcctatacccatcttggcagagaggaacgccaagctcttttgcacgtatgtatactggtgttgctccaatctacataggttgaccccaagcaggaaggttccggttcggctgtgatgtccgcctacgttgagattatattcgacaactccgacgatcgattccccaccggcaagccagaggtcgtcctgcgtcgtaccattggtatcaagaaggatgaatacaccctcgaccgcaagaatgccaccaagaacgatgttatgaacctgctcgagtcggctggtttctctcgctccaacccttactacattgttccccaaggccgagtgactgcgttgaccaacatgaaagactccgagcggctgattctgctgaaggaggtcgccggtactcaggtctacgaagcccgtcgttcagagtctttgaaaattatgagtgagaccaacagcaagcgtgccaagattgacgaactcctcgattacattaacgaacgtcttgccgaactcgaagaagaaaaggatgagcttcggagctatcaggagaaagacaaggagcgccgctgtctagagtacaccatttactccctcgaacaacaggagatcggcaaggttctcaatgagattgaagagcgacgacagaacggcgttgaggatgccgacaataatcgtgaccaatttgttgagggcgagaaggccattgctgagatcgatgttgagatcgctgagtgccggcaacagattgagttcctgaaggttgacaaggctcaactagaggacgaacggcgtgaagcatcgaaaactctagctcagaatgaactgcaggccaagtctcttgctgacaaccaggctgctgcacaagcattgaaatcccgctacgactccgacctcagctctgttcagaccgctatcagtgagcgtgaagccgaacatcgcgaaattcttcctagattcaatgccttgaaggatcaggaagagacagttagatcacagttgacggatgccgagacatcgcgtcagcgtttgtatgcaaagcagggtagaaactcgcgattcaagaacaaatctgagcgtgacaagtggcttaacatggaagtccgcgagagccataattccatcagcactgtccagggtgtgatctctcagacacaagaagatatccgagaccttgaaagcgagattgccgctttggagcctgaaactgaacgcttgcgccagcaaatcgatggacgcggcgacacaatgcatactgtggatcaacaagtccaagatgccaaggatgaaagagaccgtctcatggaccaaagaaagtaagctcgcttgaaccactcataggctataaccagacattaatgattatgtagggaactctggagagaagaagcgaagcttgactccgtgctttcgaatgcatcccaggaggtggaccgtgctgagcgcaatctctcgcatatgatggataacaacaccagtcgtggaattgccgcagtgcgtcgaatcacgcgtcagcataacctcgaaggtgtttatggtactcttgccgagcttttcgatgtcaatgatagatatcggaccgccgtagaagttactgccggccagagtttattccactacgttgttgacacagatgaaactgctacaaccgttctcgagatcctacaaaaggaaaaggctggtcgtgtgacattcatgcctctgaacagacttcgtactaggccgatgaacatgcctcgtgctagcgacacaatacccatgatcgataagttgcagtacgacccggcatatgacagagccttccagcatgtgttcggcaagactatcatttgccccaacctacaggttgcgtcgcagtacgcacgaagccacggtgtcaatgctatcactccagagggtgatcgatcagacaagcgtggtgccttgactggtggataccacgactctcgtcagtcacgactagacgctgtcaagattctagctaagtggcgagatgagtatgagaccaagagaaatcgcggtaccgaaatccggaaagagttagaaaaacttgaccagctgatcactaaggctgtcggtgaactgcaaaaacttgagcaacaaagacatcaggtccagaacagcagtggacctttacgacacgagttgagggccaaacgtgatctcctccaaaacaagaccgatactcttgatgccaagcgacgcgctcttcgaaatgttgagtctaaccttgcggccctgaacgatcaagtcaatgcgttccagactgaactgtcttctcctttccagaaagctctcaccagcgaggaggaagctcaactagagactttaagcagcacagtgcaagatttgcgccgccaataccaagagcttgccggtcagcgaagcgagctcgaggcacgcaagtcagtgttggaagttgagcttcgagagaatctcaaccctcgtcttgaccagttactcaacagagacattgacatcgccgacgaggaagttcaaggcaacttgaaagagacacagcgtgaagtgaagcgcattggccagacgttggaaaaactcaacgcccgactcaaggaagttgacacctcaattgaggaaggcacttctcgggtgatagatctgcagcagcgtaatgcggagacccgacgagaaattgaagacctcgctcggtctattgaaaaacaccagcgacgtatggagaagagcatgcaaaagaaggcagcactcactaagcaaggtgccgaatgtgcggctaacatccgttccctcggagttcttccggatgaagctttcaccaaataccaaaataccgactccaacactgttgtcaagaagctccataagaccaacgaggctcttaagaaatattcccatgtcaataagaaggcgtttgaacagtataacagttttaccaagcagcgtgagactcttactacgcgtcgttctgagctagatgcatcccaaaaatccatcgatgaccttatttctgttcttgatcaacgcaaggatgaggccattgaaagaactttcaagcaggtctcacgcgagttccacaatgtgtttgagaaacttgttcctgccggtcgtggtcgtcttatcattcaaaggaaaacagaccatgctccccgagtcggtgaagatgttgactcagatgacgaggcagctcggcagagcgtcgaaaactatgtcggtgttggcatcagtgtgagcttcaatagcaagcacgatgatcaacaacgtattcagcagctgagtggtggacaaaaaagtgagcatttccagtccgaatgcgtattttgttttgctgttgctaaccaatctcccatgtaggtctttgcgctctcgccctcgttttcgccatccaggcttgcgaccccgcaccattctacctattcgatgagatcgatgccaacctggatgctcagtaccgaacagccgttgcacagatgctcaagtccatctcggattcgacaaatgggcagtttatctgtactaccttccgacctgaaatgctgcacgtcgcggagaagtgctatggtgtaagcttcaggcaaaaggccagtactatcgatgttgtctcccgcgaggaggctctgaagttcgtggaggagcaaaagacttgatgtatttcccaggcgtgctctttgtatattgtaatcaacatttgcttcgatggactagctggctggcgtattctgataccgaactctttttttattcttcaatttcaaatttttattcttgcggcgtagttctttgtatatttctcaacgaattggatttccttgaccgacggacttgaaaaagaagcgaagcttgactgcaggcaaaatcggatatgtatgtggactggcactgtataaatgcgacaaaacgatttcatttcataatttttacagcgttttcacaattcaagctagctcacactcaatcaaactctccacgccccgctgcgcagtccaaatcttgacaatcttcagcccagcagactccaacaacgcatgccattggtgttctgtacgctcaccagatccaatctccatcataatcaaatccagacttgtggtttcccaataagcccccgtgtctggaatcacattctcgttcaccaacaccttgctataaccaggcttcatagcagctactgtattagcgaggatattgcgacaaagctcatcaggccagtcatggagaacagaatgcaagtagtacgagcgggctcctatgcgggcagaatgttagtatatgccagcaatcgatgggctcaatatttcaatacgcatggtcaggggaaagtcttccgtttttgtacctttgactggttgctcagtaaagaaatcatgagcagtaacttcaatcgtggggtgtagatccttaaccgaaaccaccacctcaggaagatcctgaagcaccagacgaccggggaggccaggccatttccgacggaaatcggatagatcatggccgaaactgcctccgagatcaacgagcaggacatcgtcctcgccaatcgtgacgccgtccacaagccgctcttggaccgggtagaagccgggatccatccagcgtactcggccttgcccgtagactgacatgtgattattaaactgctttgccgtgagcggttcttgctgcaaatgtccgaagaagcctatgtctgtttcatagcccatctggaatgctgtatctgtcggacttgtgggattttggtagttgtttttcttgaggaaggtcggtagagccataatacctttggtgaaacggcgtgtcctgaacttgttagtcggggttgagggtatggagctctgactatcaacctacatgagcggaaatgcatcgctatatctttcaacaataaggacttttgagaagccagtcgggctgtactcgttgtagccggtctcggttattgttcccatcgcagcgagatgcttcatcagtcgccctacacgatttgtcagatattgggttttgctggcgtacaaacaaactactgaccgagcaagattggatccacactggttgcctcagcaagctcattgacagtcttcggtctgtcatctgttccaagagcagagaatagatgtatgtcaacagcggtctctatggctgcataactcgtagactaagcaaatgcaatacccatcagtcgaaacagtttcaaacttgtcttgggccacattatggtagttacaacacacctcagaccagcagtgtcgaatgattgcctctcggggggtttccaatgcataagccaacgattggacggcttctagtagcttaagccgtgctttggggtcctgggcaaggaggtctttgccatgactcgcaaccgtttcaaggagatcaggcacggtatctggcaggtttgagatgagagcaagaccttctacatcggttgcattggacgccatgatggactgtgtttgctgcgatgtatatgtagaagaggaagtgggagtcaagaagtatctcaacaacacaatctcatgttactaaattctagttgccaacatatattgtctagtaaaattgccaaccccctgacaggatcactatccctgtctcctagtacattagtacatacattagtgtcatattttgttccaggttaagcgaccttaagccacaattggttggttattgcttctactgagctaaactctatgacccatgcagtcattatctaaccgagtgaattctccaggactagagctattaacagctccgcataatgcaaggatattggatccacgaacaatacacgcattgactggttcatatgaatccgacaggaaatcaaaggtacataatacgagaattactttccagggttctacttagcgggaccggggcttttcggattcaaaggtactatcttattgtgcgtacttttgtacttagtactataataaacgaggcaatatatggagtgcaatttgtgaaaacacgctaaggccgtactgtctgggggccaaaactatggacttgttgttaagccaatcgcgatcctagcgctttaggaccctgatttttctagggaagcgattggtcaactcagctaaacatgacgctctatgatcccgtaggtacgtgctataacaatagtacctaagtacaaattcttttagaaataatatgtcctcggctggccatttctccacatttctttttggtcctcttaaggccagagaaaaccgtgattctcctataaggaacacatcggtcgctactctctatcatggcaaccatggacgctgaatacataaaccagacaaagggtccacgtattctaggggtcttctgggcttttttcagtgtaagcgtggtgatggtatccttacgattttatatccgagtccgagtgttgaggaacattggactcgatgattatattgtcctggtggcaatggtatgtaccttctagttgattttgagatacgccagataccaattacataggttatggtcaccagttatacaattctcaccacggtgaacgtcgttttaggctacggaagccatacctctgtcttgatggaaaaaggcgggattgacttgatcgaacgtattctagtcattaattatgcaaactttgcactaggaatcatgtctttcacaactccaaaactggcaatcgctgctctcctgaatcgcatcatgaatcccagccgcttgagccgagtatggctatggatattgacagcctcggtgttcgtgacatccaccatctgcatcatcgttctattcaccatgtgtgatcctccccgggctttatggaaggtacatctcatgagtgagggggcaaaatgtcgttcgaccaagattttggtgggctatgcaatcttcactggaggtatgtttctggactgtatgtttttcgcaaaccagcaactaaacattctcagttctgtcggcgggggtcgatctatatcttgcagtttacccgactgtggtattgctacaacttcaaatgtcgattcagaaaaaattggccctgtgtgcggctttggggttgggcgccgtgtaggttgattgatgttattgtctggagaaagtagctgatcgtctacacagagcctgtgcaatggctattattaagtgtctacagctaccaggtctatataatacggaagactcaacatgtaagttgctttcagtgcataacatgagatatatatcactgacacggcataatagatgcaacagcagatcttgttatatggacgaggtatgttttaagtcctgtttttctccggccttgacacaaaaacttatatcggcgtctcatctatcagcgtcgagtccaacatcatcataatggcctcctgcatcccaaccttgggtccgatctatgaaatgattcgaggcagacgttcctggagctcacacgcgcgatacgagagcggaaagttgcgctcttacacggatagacccacgaagaaatcggcaagcaatactcgcgaggacgaggatatcctcatgaccacggatattagggttacaaggagcggcagccaagaaagcattttgaactcggatcaactccggaaagaggcctatgtggcaggtaagattcatcgcacggatcaggtaaagatcgagtacgagacaagacctcaaggtgagaatggacctgcaccttcatggtagcatggtttgtctactagtgtactactacctcttatgatcattattgcgggttgactaagttgtaacctttcaactctacctaattccatcttttcttcccgagcgatgttgtcgggagcaaaatgcttctaatctatcaacaatcctaccagcaacttcactcgtttacccattcgaatatgatatcctcggggacatcacggaccaaaatatggacatgctccaaggcccgcacactctgtaggccaacccaattcttaaaccatagcacatgggagtcagggtccgagaagttttggggatccttagccaatcggtgcacgaaagtcttttgaacaaaaccgttgatgattgcacgagattcatcggtcaaatggccctcatcggattgtacggggataggagtgcgtagccacacgacaagatgtgagattccgggggtgaggccatagggccagtcattgcggaggatcttgtagtcctcgggatcggcaaagggacgcgggttcttgaaggtcgctgtcccgctttgctggataaccgcggagccagtgccgctggcagtgttcagcggcaaatcccactttaatcgccgctggcaaatataattcatgatcgtgccatactggactttagtctcttgtgtccaggccaggtaccggcggagatcggaaggcttccgcttgagtgcgccgaggtcatttcgtgctattacggcatatggcatgaggggaattgttcgagcacaagtgagaaatatacttaccgatgatgctttttaggtcttcccagtcgtggtatacgtactcctcgtcggtcatggccaggagcttgtggtccaattccgttagattaaaggcagggacttctggtacttcgggcattttggaaatgatcaaaagaagaaatcaaaagcgatgtcaagcaaggcaatagcctcagtaaatcgaataactccagcaaatccagtaagtccaagtccaagtaagtccaagtaaacacggaaagccggggaaatcgtaaccccaaagggtgggaaattccgttgggcggagccccctcatctcttttttatcttctctctcgccttttcttcttctctttctgcttctatcgcaactgtcttattgaaatacagtgtccgagttctgtcataatgaggtgagtcgatcttctcctgtaatatcgaacaatggctgattcctccaagcctcgccaacatcggcacggccctcgtgccctcggccctgctcatcgcgagtgtttacgccattaagcccgagtttatcgcctatgcaattgctgtcgctggagttctggctggttacttggttttcagcaccagtagtgcgtgcatctttttatgtccaaatactggagtgaggaattaagctgacccccgatgtcgcagagcctcgcaaggtcttgaaccccaccgagttccagaacttcgtcctcaaggagaagaacgagatctctcacaatgtcgctatctaccgttttgccctcccccgttccaccgatatcctcggcctccccatcggtcagcacatctctctcgccgccactatcgccggtcagcccaaggaggttgtccgctcttacacccctatctcctccgacaatgaggccggctacttcgatctgctcgtcaaggcttacccccagggtaacatctccaagtatcttaccgaactgaagattggcgacaacatgaaggtccgtggccccaagggcgccatggtgtacacccccaacatgtgccgccacattggtatgatctccggcggcactggtattacccctatgctgcaggtcatcaaggccatcatccgcaaccgtccccgcaacggtggcaacgacaccaccaaggttgacctcatcttcgccaacgtcaaccccgaggacatcttgctcaaggaccagctcgaggagttggagaaggaggatgatggattccgcatctactacgttcttaacaacccgcccgagggctggactggcggtgttggctttgtgactcccgacatgatcaaggtaagtttgcgtgctgtgctcgcctgtgccacctcggtattaattaagctttattataggagcgcctgcccgcccccgctgccgatgttaagattttgctctgcggtccccctcccatggtcagcgcgatgaagaaggccaccgaggctcttggatacaccaaggcgcgccccgtcagcaagctggaggaccaggtcttctgcttctaagggattcgctgcgaatcaaagaaaagttgctgttttcgaacttgactctgcctttaataattgtgaatcttctacagaatgttagcgggcccgccgtgaagcatttttctttttttgatgtataatctctggtgtggttatatatgtgaatagacctcggcctacaagggattaaatgagcgcaccggggatcgaatgcgtgagatatccgcctaaaccttggtattataccatgttcttaattgtctaaaagtcaagactccagccaaagcaatggctctaaaaattcccatgagcgatgtccccttcaaacccctctgcgctgcctctgaatccatgaaagtcctaggattcgctcattttcatcgccatcagcttgtcctcgggctgggatttgcctggtggctttcccaaatccgtgaaaaggtccttatgccggcaccggggacaacgactctcctcaagttcacttggggagagtactatggatataggcagcgggggtagatcatatacacaaggctcgcacatgcggcaaaacatgcagtatagtccatatcgacatctctctccacaacaagcgcagggggcttcctcatggccgtctactttaatgaagtcacctggtcgatatatcctgttctcgcagccgcaatcgaagcaaaatcgacggtcactctcggcgtggccttttccgcgcttggctcgtagttgattatcggcaaacgcttttcggggtcgaagtttcagacatatcttgcacgaaaagaggtggttatatctggaataattagtaactaggagataggttgatcgacatagcaagactttgtcatgctaggaagcagctacattggccattgctctatttcaagtagaaacgatagtttctgttcttctgtcgtaggcggctttgtaggaacaatagccctgaaacgttggtttgtttggaaaagtgcaacagatgaggggtatcaagagattttatgatatgtaattggagctcggtcggcaaatccaatatagtaatactagtcatactgctcatggcgattagatcagatctcaaattgcatttaccttagagaagaagaatcgacggggcgtacagcctaaatcgacgacagagcgaaaacggctctattaattatagatcacgtgacttctccatatactcccgataattattccatactccttatataaattgatattttccagagcatatgcattcttcacatagtaccctcgtctctatctcgaatatggtgctaccattagtgagagaggtaatctactctttgaaaggtttaagatagatgcatactagaggtaaatgcagacagaggaagaggtcataatattatatacaggccaagaccataattgtacaggcggtgattagagcggtgagccaaaaactagtttatttagtttatcgtagtggtccgattcgtctgttgagaaaagaatgacgtggatgatttttcaaggcctagcgatacgaatggacatactttacttagcaacgtcctggtacagtacctattgagatgtgttctatctagatatgcgctcttacatctagctataaagttgatagtattttcaatttgtcccaaataacaaatgattcaaatcattaattgaaaactattcccgattgccactaggtgcgggcgaatgagagcgggaagatccaaatgataccctatcgccatcgcgaggttgagttgtactccgagtcatacccgaagctgtgattgcacgtgtataagcatcgtccctgtcataagacgatctgttgattgctgtgacaacatatatatcgtcagaactggtattcacgcttcgcaagtccataaccttaccttcatctaaaccccgagaattgttggcatcagacacttcttccacgtcttgactgcgctttttgtcttcattgcgatccagcccttgtagagctcgaactccgtacgatgccgtttcgctcatgtaccatacagctaacgcccgtgtcagtatacggatatgaatgccagatatcgtagtccatcaagaccgagacaggcctgcaagtagatatattgacttactcttgaatggcagcatcgcaatctttccacaagtaaccgcagacccaaagcccacagttctcgcgactttcatcgccgtctcggttcgcgttttaggttgcgcgactttctggcccatcggcacgggtgcgtcattctcagtctagacaatcaataatctggtcagttctgggtgtccacttgagctaagccgcattgcgcttgttacctcgcgtttcctgtgcgcatctgcgatatgcgagacagtaggtttgatgatggctttgatcagacttatggatacgccctttgcgtcgacaaggaacgtagtcttgactttttcttcgacgagctcgggggttttatcgcgtcttgtgtgtgctgggtactcatccctgtttaatgtcattagctcaagttcccaagttcaaaccggactggccgagtcaaaaaaggacctacaattctgccgtggagccgcctcctcttgtcgaaatgacgaccacatcaccctcgaccttgctgctaaacgatggttgtaattgcatgcgatggatcacaggctctgtgtcagcatcactgcattgaaccttctcccattttaattggcgatagaatgattggacggcgtttgcagtgccgttctctccctggatcttctggcctaaccttgaagcaactcgttttacctctggtcgtaggcaatactggaacgcctcgaaaaagacttcgctgctgagcgcttgctcgcgaagtggagatggaccgagtcctgcgttgtagatggtcgttgcccagaagggttggctaagaattatcagcgtgaaaccttacaatttaggctcatgcgtggcccgatcaaagaaattcaaaaatggaaggcttactcgcaaagaagtggtagtgagatcattggtttcccgtttttagcaccctgtacgaaggtgtatagcggccaacagtcggatgcctgattttaatggttttatcgcctaattgggactagctcttaccagttttagaccgcctttgacaccgctcaataccatcttttgtaagtacacatcgaagagacgaaactgttaccatggggtaattcaaatgccttctacctattttaattctcaaaactacattcaaatattcgccacgccggagccagaggatacggagagtttgaagtttatacggtcggtaggaatggggactttgtgttgaaatccaggcttggctttccaaccgttttgggccttggtgtcagttgcgctattagcttttctccgggaaagtgcgggactacggcgggtatgaatggctttaaatacaggagattcatatagttggagggccttaacgcctaggatcgatgagaaatagtattttggggggggggggggggggtatgcaaactttctttttccaatttttaaccnnnnnnnnnnnnnnnnnnnnnnnnnnnnnnnnnnnnnnnnnnnnnnnnnnnnnnnnnnnnagatgggggggggggggggggggggggggggggggggtatgaatagcttcatgtttcaactttcaagctgttctcaatttggtactaggagatctgtcatagtaattcaggtattttaatttcctgccggtctaaaattggtaagagctagtcctaattaggctataaaaccattaaaatcaggcatccggctgttggccgctatacaccttcgtacaccctgcttgaccgttgggatgtcaccacttgtgaataagatcgatactcggcggatgagccattctttgacttttgagaattcttcaattagcttcgttgttttcataagtgttgatcttatgcggaaattacactcaccatttgggtcattctctaacaagaaaatcttcggcaattcagaaacatcaattgcttctcggaacccactcggcagaagcaaatatatcccatgcttctgtgaagcttccacgagatattgaacgaataactcagggtttttcagttgggtgatgtccagagcaacgaagacaggctcaagtgcggaatcgaggaaattctttagcgcctttgacggggtataagaagatgggctttcgattgaagtatagccggaaatgtctaagaactcatgttagaaaagatctcggtcgagtccgagactggttttgcgcataccaatggtgtcatcccagtcctctggtttggggagcaattccgatgaccatagataggtatgagggatctttgattctcttaaaatttcagccccgctagatagaggcagctgcggtaggtctaggactgcttttcggaaatgatcgacgacattgcacaccctagagtactgtcaatgactgtctttatacggctggataattcgagggtcagggctatacttactcattccacgccgactcccagaccagtagataggaaatatagttctgcaactggtaatcaatctcactccccgtcgcgatctgtgctagcgggtgtacgaatcgtctcgtcggtgtccaggggctgttggacattatatgaagcgggatggataaccgctccgcacaatgaacatgagcgtgtgcaagaggtgttgcgatgatggcgttggtgacaaagggcttgctttcgtgcgagccggggtagatgcaggcattccaacattccttgagtgtgtttagcaagacctttttgtttttcaagacctggtgcctgtcaaggccatttgaatcaggcatgaggccagaatcccttgcctgttatgtatgagttgtttgtttactgcagtaccggtgaagatatgaagaggaacttaccgcgataggatgctctgggtcgttgctgatggagaaaaattccaatccggccctgtgggcgagcgattggaaaattgagtgtgaagcgactcggactctgtggccctgtcggtggagttcctggccaaccagtataatagatttgatctcctctgtcatgaccattagcatgggtaggagtgccctcggcgatgttcaattcttacctctgcttcctacaagcatcaaaacaatatccagtggaatttcatgagttccagatacggtcttcacatcatcagtgtttatgggaagtaaatctgagctggagctgttggcttgaatttgtattatccgtggtcgttgggcaggcaataaaaattgttcgattagcatagacgtgcgattcccggcacttaaatctatgctaaagcgaccgatgtctatatcgttgaaattagttagcacaagaattttcaaatgtgtacttctttctatcttgagtaccttcgatcaggattgattcccgcctttcatcccgggtggttgacggtgaaagtagtaggtcttcggagaatagagagctgtaggtgggcggtggtagctcattagcaattgaatggtcgtccatttggctgccattaacaatatcttcttctctcagctcttgtttggagaacattttgctgaatcttgggcggagaacttcagcggaaagatcgcattattaaagataccccagtggcgtatggctaggcaacttcttttttttcttccccttgaaactactattaaggttcttgaccgttgatgatccttctagaaccaatccactatcgtgttgtctagggtttctatagtcggatcgaatacgaacccgaacccgagacccacatcttgtcaaggttgctactatgcatagggtgtgaatattcgtattcggcttcggatcatatcgaaacatacatttggtctttcacagtaggagtttatgctatctttgtcaaagttgcttcaccatataggatcatcgtctctatttccaagttcttctctttggtacctttataatatcatccggtccatataagaattctccaatcatcaacggaacagtccgagcgaacaatgcatttctgggggatctctcttacctagaaactgactcggtcttttcttttcatactatgatattggtatttttagactaggctgttttgaatctgcttattctatataccctatgccccttctccccgcataagctccatatcgtcaagtttgcgatgtcccccagagataatttgacttgggtggaaaaccaggaaaacgatcgtaaccgcaagcataagagcgccatcaaagatatacgcaaagtactcatgactttgcaaaaagccagtcgacccttgaatatactcgatgactcggtagagacaacgggtcataatcaaagcgcttgcaaaatagagcacaagcatataccggtgccagttcaccgaagtagccattgctgcggaagtggggtagttcgccatccgcttatgaaagatgaccgagacgacaacgaagaagccaaagaagatgatttggacgatcaggccgacgataatcacatcttcgccgagtttcaacttgctagctgacttagcactagacatgattgcgcctcctatggatagaagttaataattgatcccttgcgtgagagcgatatagcacttcttacctccactttgaatgaaaaatgacagcacatcgcctaggacaaagatcttggtcaatcttgttgcgcgaatgagcgatctagaatcaccatccaccagacgtatgatccgaccaagaatcatgtagatcgatgccgcaaacagagaaggagcaagtagaataaagagactttgcaaggcgtatggcattgtcgagtaatttggggcttcatgggcgttgactgctcgtgccgcatatccaatggcttcaaataaaccgccaacgacgaaggtgatgaagaatattgtcttatgcttccaaacgaagaagatgtgcccgcagattaggaagacaaaaagaagcaagaaaataattgcggctgccagcgagggtgtgtagttgtagagactgtaaccggacattgtgaatgacaaggatggagttgcgatgattcaaaggagggaaagtaacgagtgatttagtgaaaaaatcttgggagaaacgctcaatggatgaaacaactgatctggaaatcgaatacttatttgtatgctgagagaaatatcgacatataatcaatacactatggagttatttatggacattcaaacactgggggataatgagcggagaatattttctctcccaggcagctgcaataaaatgctaattatggagcttcagagcttgtcttcacaagcatcaggctatatccaactgttgtagttcggcagaggaaactggctccgaaaagtccgaatacggacacgaaggcccactttccacatgagtacgaaatataatagtatttttttctacttctatgtttatgcggatcaaactgataatttgaactcatgataaacaatagagtaagctgttgcgaaccgttagaatagttgtatgttcgtgggatagttgattgtatgcctcacaacaattgcaaggtgattgtcattaactagaatccacatttcccagagatctagtgtaattgggactcgcatgacaatcctggaaagcctctagaggtgttaggcatccgtattatcttcttaaacatcatcgttccaaggaaaaaaagcggcgcaatgcgaaacgctccatattgcttgattcttgattagtatttttcacgagtactcaagaaactttgaaaccatctagttagaggtatcctgatgccaggtttcaaaatttgcctccaatattcctataatggtcagcaattctgctatcatcgttatcgtgctcgtgtgtgccctcacagccgtctcactcgcggcgggtatattcactgtcgttaaccctgccacccatatgctatcggcaccgaacccagagcaacaaaagtatatgcgagaagtcagaattaggcaatttcgtcagctgcgacgagaaagaaatttcagacctgagatttttccaaggtaagtactagctcctaccacactctgattaatcttactctaacaatttggcagagcaatagtgaacattgaaagccatccaagcctggaaagtacgaacgagccgtgaatcacgagcttttttattgcaattgaacgagtcaaggaggtttataatggggtctacgacaatgaagtgtacttaaagagataatcttgatacgatcagagaacaatcggtatttgagacttgcggacgtaagtacgttttacttgctaggaagaggctactatctatataccttgcattgctagtctgctatcaactcttttcttggtaaggctgagtgcatggcgagttttcgtttctagtagtccaatggcttcttcaaatctactcatgccacactagttctaaaactgcgagaaaatactcttcaacactttatttagtgttggcaattccccgttctttattcttcttccaatattgttgttcgagatcacgtgacccctacgtacgcaatatttgtcccagcaatagctagtttctcttttcctctctacgcaaactcgatattttccaagagtgtctacattatttgtgtggtattctcgtctgtatctctaactttggctacaaggttaaagacaaaactcgagcatggccggtggtttccttccataccacgaacctggaagtatgtacacaagcatataccgattgatctctgctcatttcctcactaataaattactgcagctgtcgacatcctcattatcgtttctttcttctttttcctttcccttgcaaaatgggtctccgcgacagtgatccaggccggaattataggtcagatcgccgtcggcatcatttacggagtaccattggccaatatccttaaatatcactggcaagagacttttgttactctcggatatgtcggtctcattttgatcattttcgaaggtaggcggaaatttccttcttgcctggcttcttggcctcttggcctcttggcttcttggatactgacgtcatctatcctaggcggtcttggcgcccgtgtggacatgctcaagcagaacttcactttgagtatgataagcgccgcaactggagttttatttcctattggactctcataccttttgctatatcttggttttggatatggtttgttttatttatctcaattcctacggtcaacagctaacatggactaggtgcggtcgagaccttcatcatcggcgcatctctttccgccacttcactcggtaagctatctttcctcgaaattcggttgactatgtttcaattgctgataaatattagggaccacctttgctgtgatcagctctgcgtccgactcagtcaacctcgccgagactcgagtagggtcagttctagtaagcgcggctgttatcgacgatgttgtaggacttgttatgttaaggtatgttacttatctgaacttgcataaggtgcgtagtctatttttttttttttagctaactgtctacccagtgtggtcgcggatttgggcaaactatcaggaggtgatagtgtcaacctgggctggctcattgggcgtcccatagtggcatcgataggcatggctgccgtaacacccatcgtcaccaaatgggtgtttgcgccatttttccgaaagttcgttgaataccgctttgcacgctacgaccatatctccaacatcatcctcatgatccttgttctttcggcttttattgccatcgctggctttactggaacttccgtcttatttggtgctttcctggccggtgtatttcttacatacataccgagcaagcaccccgagggaccgtttgttgtcctgagccgcgaggaaggcgagcgcgacgaagataaaagccctactttcattcatacctttgagaaatacctgttaggaccccagcagtacttgatggaaccattgttcttctcaagtatcggattcgcgattccattcttggagctgtggaccggggaacgcatctggaaaggaattgtttacaccctcttgatggcttttgcaaaggtatagatacccttaaaggtcgttcctcggcaatcaaactaacatagttatctagtgtgttgtcggaatctgggtccccatatggcaactcgctttggggggtaaatctgacacaaagctacacgaagagcaggaaatacaggggcaacagaagatcgagggcaacaatcccagcgatgaaggccaaagcgaccaagagaaggggaagacgtggaaacggacctggctggccacaatacttttaggatctgcgatggtagcacgcggtgaaattgggcttctgataatcgaaaccggatacaacgaaacttcatacgttagtaatgaaggcttctacaccggcatctgggcgattcttttgaataccatcattgggccagttggcgtcggtctcctggttcgattctacgcgcacgagctcaaggggggtgattggggagtgcagcgtactccggctatctcgggctatggttctagtgaacatggggcggtatagcagcacgtaaaatgttcacatgctatcgaggaagctatataaccgtttttgtgtgaagattacacgccaggagttagctcggtgatccggaccaatagcggaaaacggcccgcctgggaaaaggcaagcaaaacaagaaatctcctgttagggagaacggggaactttatagaaccacggccgggcaagcactgggactggtggcgctaaaccgaaagcaaccgtcgtaaccgtccgatatggtgtatgcagtatcgtcggcgacaacgggcaattcaagccaatttccttctcgtcttggtgtggagaggagccagagcttattcctttgttattacataaatcttttgttttgattagggtaccgtaaacgtttttgagttttgtttaattcggttctcttagtgttgaacgcagcctgttttaaccattccagggttgtggtaactcttttggcaaacctgattctgtgagtcactagacctattggttttcccatcaatgcgggggaagtccaaacggtaaactctagctgaagcctgaacgttgcattatccagtaggaatgtccatccccacgtcatcgttcggcgctcctagaacagaactcgtctttctttaattaaaccaactcgccggtacctggttgtttggtacattttcaacccttcgtctaattctatgtcggcatttgtaccacgttgcgaaatggttggttggctcttacatctattcatccttcatctacgatgattaccctcctttcacctcatttcgtacttccagcggtcagcgaggatgacatggtgattgcttcactcgcatggggcttcacgattggctttgggtggctcactacctggacagcggtgaagcagactctgcacatatataagagacatggtcgccatatcttccataatgcctatgtatggatgatatggctcgagattctagtttgtctcatcttcagtgtgctctgctggttatacctgaggggtacgattccaccaaggtgagctcgaaccaatccgagattacggaaaaggagtcagtgctgaccaaattgtcagctttgccttctatttctgcattggtatgtccacttggggctcttattatcttatcagaatgcttattttgcgaagttactacatgggccctgcaagtaaatggctctatgcaaccttaggaaactgattaatgatgcgaatcttttcaggtccaatttctcctacaaatcatcatcaatcgttgtgcaattcttcttgtggatcgaaggaatgcaaaccgtctgaaggtcggcgttgccatcttaatcaccgctatcaatatctcagtctacgctatttggattcccgcacgtctgcaaatctccgaaacttacatccgggtaaatgaccgatgggatcgttgcgaaaaagtcatctaccttcttgtggatggagcgctcaacttttatttcatacggattgttcgatcaagcctagtgtcggccggcttgggaaaatacaaaaccctagtccatttcaatatcggcattattggattgtctcttggtatggatgtcttgattatatccatgatgagcttgaataatacatttgtgtgagtaaagtcctaaaaaatcaaaaggaaaactgctaataacacccttagctatatgcaatttcatcctcttgcctatatggtcaaactcaacatcgagatgtcaatggctgatcttattgggagaattgctagtgatcgttcttctgtcatcatctgtaatgataccttggagttggctggcgcgggggacacacaagaggttaggttcgtctccctctagccacaactcggtggatgcacaatacctgtattcaaattatatattaatcgtatctaatacagttcaaagaatgcttaccgtatattgactgagagccgaggctatatatttactgtgtggggcaagttggtagacatccttagaagtcctaccaagtattgactacctgcggtatgcacaatagggctatatctatgtataaaaggacgttatgctgaaattctagcctttttgcctgtcaatagctatcgataaacatttttgatactatatgtcggaatttttcatgaatagaaatatatatcttcgtcactgctgtattaatttcccacaatttcctcaagtgattagatttcatatagaaagtaataatctgtaagaaagtatggaagaaggccttttctggttggtatgaggctatagtacggatggcctcgcggtgacaaataaatcgacgagcagcgtctgcgtctgtgatagattagtgtgtgaagaagctaggggcaaacgtggctttagatactgctagttgcaacgctatgataggaaatgattctttttagatgcttgtgatatttagggagctcctaaagccctcaagcatcggacacgcactagctacatcaagcaaaaaccaaggactaaggatctttaaaagtatcaacccaccactccggatgcaatattcgatcgcacacattatctctacaacattccttgccttcattaaagggcttacgatcaaatagcaatttgcggttgattgttgcattcccattcagaatttggaccctgtaccactccgccagtcctaaagcgtcggcaatgactccatcctcggtgtcatgcgctttggagactggtagcgagatacaccaccggaattgtcgatccatgggctcaggagtaaattcgaacttcatctcccgaatacgttcaattataaggcaaatcaacgctccgtcggtgcgaagataaaaatggtccttggtagtaaaggttatattgacccacatgttttcgggactctcatctacacctgggccgtggtggatggtaatgtaatatgacattccgaagcccgtagaatgttgaggggcttgtattctggtgccacctgtaccgatataattttggtttgtcagtgagctagatgctgggaactgaagcccaataaatacgggactagccgactataaaagaatgtttccccctaagacatactgctttggactcttttggcgagaacaaaggcattctattctaatcccattgttagatctttcatacgtttaaattagcagacaaagacttgaaattaattgcatttttcatttttttctcgccattctatcaggccccgtagtgttctcgggagtagcgttggaggccatttctggtgatattgggtacaacgacaaacaaatgggctacagatgtgccatctttcccctcccatctgcttctttacccttgcttgttgttcttctcgagtttaggagggccgccttgggtgagtttgtagctagtgctagaaaagtgaaaggtcagcaaaaacacatggaaacagacagcgcggatggactgactactccctcttcatagacctcggcctacgatagttagcatggaaccataactagcagaaagaccgatagacatacggacgtatctgatcaacggagataccgggatacttatcaccttctttcttcaagacaagttagcataaagtaagttatccctagtgtatagaatactcactaggtgatactggcgtatgtgtcgacgcagcattggagccgggtttccaatcttcgccgtcttttcagtcttccatgagcagtaagggcaccgctttgcacagtccggaatgaactaaacatggtacgtgtcagtcaaatgaacagaaggttcagacagtcgagagtcttacaagaatggcatgctcggccggccatgtagtttcggggtgctgtgggcagtcgcagagcttcgcgttggggctggtattatgttagccagtagtataaggtaatgagcttgacgtcttatggtgatacgtacgcccatgatgttggctcagtaggacgagagcttttccagcaatcgccgtgtggccacgaagacggatctggcaaagcagtcgccgtaccagtttgggcgtttgaggcctcggtatcaaccagctgactaggctgggaatttgggcaggaatcgccctttggggtcaagggcgactccatgtcgtccgtggggttgcgctccatttggtttctacaaggtcaccatgaagatcagtatctcatgggtcagaggaagaatgaaagaagatagctggctactgaccgtggagactgatgggtggggtatgtcgcgttgcaaaggtgaaagtgagaaacgcggattgacgggtgcggtgtgtcgcgttggaaagtgaaagtgagaaacgtaggttcaagacaagtttatcagataaatcgcggttaccgttggcaccatgcttccatattgtcggattctctcccatcattagttccacttctcgcaaatttggactacttgtgcattctacctaactaaaagatacgtcttgtcacaaatttggttcggggatacgggcattttcgaagattttggagttactcatatctttcttgatgagtaaatacccaggtacagactctaccgtgagaaagcagaaagtgacactcccagacctcagaagtgagaggaaaaatagatcatactcgtatattaaagtataactacgtacgaagggtgaagaagaatcaccgagtagcaactactagagaatatatatctattacatttcgatcgtatccacaatcacattcaaaattttcgcgcgatattcactcctggtcggtcgttgtaatagtgatctctttcgaaacattggaagtgtgtaccacatgagagagtgcctgaatttgctgcttgtgttgaacagaaattcgagtatagcgcacgataatcccagttcccatcagtgaatagcagcccgacttatttcatcctatgaaatgcatatgtagggttttagtagatcacgttcaaaagtgacgtcacctgatatattcgataagatctgatagtgatcacgtgactcaccgccctctttgagtcagagtgagtcaaaaagggaaggaaaggaaaaagaaaaggcaaaaaaaaaaaagatcccccgagcgatttccccctctttatgggtcattgtctaagcggggctcggcgattcactgccattttttctccgttgcgttgcccctctaaaccttcgacttttccgattttgagacgcgcattcggtacacgaagattctcaatcatgtccgcagcttctcttcctgcctctgttgaggctctgtcgctccaatccacggcacagaagtctcaatttgccggctgcttcccgacactgaacccgatggatatttaccgccagcacatcgcggaggagttgggcaaagccgctggtatcgattctcagaagatctacccgcggattgcctggactagtactttggacaagggtgatctttcattgccggtatgtggcggcatatcctgggcgcaattcgcatgttccgcatgatcatgaggccttggactaacaatgtcttattgcgtaccgttaggtggcttctcttcagatcaagcaaaaccccgtggagcttgccagggatcttgtcgccaagttccccgcctccgaccttattcaccctccaactcagcttggtcctcacatccagttcttctgcaaacgtcagccattgaccaacaatgttcttggccgtatcctgaaggagaaggccgcctatggaacaaatggtaatcagggtctgaaggacccctccgacccctccaagggccagaagaagatcattatcgagttctcatcgcccaacatcgccaagcccttccacgccggtcatctgcgcagtaccatcatcggtggtttcctcgccaatatctacactgttatgggatggaacgtgatcaaaatgaactacctgggtgattggggtaagcagtatggtctgttggccaacggcttcaagcagtttggcgacgaagaagctcttatcaaggatcctatcaaccacctattcgatgtctatgtcaagatcaaccgtcaggtcagtgaccaggagggacctatcaaggagctgaaggaacaaatcaaggcaaagaaggagaagagcgaggatgttgccgagctcgaggcacagcttgccaagcttgtggatgtgagcgaggatgagaaggcccgccgctactttaagagtatggaggacggtgacccggaggccctcgctctctggcgcaagttccgcgatctcagcattgagaagtacaagcagacatacgctcgtctcaatattgacttcgatgtttactccggtgaatctcagatcaagtctgagagcatgaccgacgcgtacaaggtcatggaggaggccggtgtttccgagaagtccgagggtgctgttattgtggacttcaccaagcacggtgccaagaagctgggcaaggctattattgtccgcaaggatggcactcctctctacctgactcgcgacatcggtgccatcactgagcgtgataacgagtaccactttgacaagatgatctacgttgttgccgctcagcaggatctccacttggctcagctcttcaaggtcactgaacttatgggccacaaggacctggcctcccgttgccagcacattaacttcggtatggtccgtggtatgagcacccgtaagggtaccgtcaaattcttggatgacatcctgcgcgatgtaggtgacaagatgcacgaggtcatgaagaagaatgaagtcaagtatgcgcaggtcgaggatcctgtgaagactgccgatattctgggtatcacctccgtcatggtgcaagacatgactggcaagcggtatgtacaaagtgtttttctttcccgcctactcccgtatatccgtttactaattgttcgttttctttcagcgttaacggctacgagttcaacttggatgccatgacatccttcgagggtgacaccggcccatacctgcaatacgctcatgctcgtctgtgctcgatgacccgcaagtccgagttggatgttaatgagctagttaacgccaactttgatcttttgaccgagcagcatgctgttgacttgatccgcctgctggcccaatggcccgacgtactcctccagactgccaagactctcgagcccatcactgtcctcagctacctgttcaagatgacacacatgttgagctccagctacgatgtgctcaaggtgatcggtagcgagccagatgtcaagcaggcgcgtatggcgttgtatgcctcagcccgccaagttctgaacaacggcatgcgtgttcttggtctcagccctgttcagcggttcgtctttcccacccttattgaagaagcaatcactgacttatctgttctagtatgtaaattcggcttattcggtcgattttgctcacttttctgtgtggcgttttactcagtatttctaagactgttgtctctggtataccttgattttaatttagttgcattgggcgccaagagcgggacgaataaaaatggcatcatgcctctgcttttaccaatatcattctcagatttcccctttcttctcttctcttctttctttgcttttccgatgccgtatcatcaagaagaaatgggggcgacccccgacggggtcggggttgggtctgaaacccgtctccatattataccacgcactcctacatggcagacacgctattgtttgtgaatttcatctgggctatgattcttccaagcccattgtccattagaggacgggtctccctgatcggggactatcgagatcttatgtcaggttgggcttgagttccaaggttgagccctatattcagccttaaatcggggaccaacttggacatgtaacaaggatttcgtctcgacactagacaggggcttgtaagtctatgggtttggttattcagattatgggtgtatttaaaattgtagaacttcggcccgcgaacctggacatgggttaggttagattccaattctctcgtatcggccgtgaaccgtctacattatcctgcagcacaggcgatccctcacccttttaacgcacccagcaccctggacctggaacgcaatgacactggtcactccttgatgaaccagaccgttcaaaatttctcgtggcagggtttaacggttaccgtcaaggatcgtgaaacaaaaaggtcccgtgatttggtatcaagtggtgatacgtaacatgggttagatccttgtccataccccatatcagaactagcatattgatgctggttctacagggaagctcgttgctctaatgggcacgtcaggctgcgacaagacaacacccctcaacgtgcttgctcgacgtatcgcatcagccggtgcgaagtttgtcggggagaactctgtgaacagcgcataaaaggacttacgcaattttcagcgggtgacctcgtacggctatagagagctacttcagtggcattggctatccaatccctgcgcaaactaaccctgctgaatttatcttggatactgtcagttctgattttttttcagcttgaagaaactggagaaggaacgggtcgtggtcattcaagctgcctaggcaaactcaaacgagacgaagtcagcgaatacactctgcggaggaacatcttagaagagcctttacgaaagaaaatactccaccgggaatgacttcgactactatagctctgctgaatcaatcatttatcaagttctacggccatgccattgcttgtggaatcagtgtagctatgtctttatccatcctaggattatagccgtttatcaacgtcattgtaggctttacatgtccttcgcattgaagtcaacctcacaatcctccccaacgacggcagcagggtgacaatttctgttctttcaacgaaaagaatgtatttcaacacaaatactaagatagagcgtagaggaggggcaaggaagaacggagcaaattttcggatgatagaactttccgtcgtacgatcggccaagtcatagaatacatggtcgataagcgggtcccatacgcattctattcaacgtatatgggaaacagccatgcttcgatacgtctgggctaacggaatgttggtgagtgctcgataacccaccctccgtcagcccagacgtatcgaagaacgattgttccgtataagttgaatggaacccatatagagcctgcttgattagcatggaccccacgacttggccgatcatatgacggaaagttctatcatccgaacattggcttcctgtccgcaattccagaggtgaagatcaggacaagtaaagaaaatccaaagtagaatggtagaggatggcagactagggaaacctagtaaaagagtgccaaatgtggaatcaatggaaaggaaatgaggttcaaaagtgttagagaggaatagcgaggtgaaagagaaagagatgagagaaatgctggcatttatagacacgttcacgcttctaaacttgactagttacttctgagcgatgcctgatgtattctagatgattgctatggcattgaagcactgccgttacccacacaatttgatgaacagcttcggcaaggacgcagagtgggcaggggtcgctcaatgaacttgactcttggaagaatctaattcacttgtgtcatgagtgtcaaatcagaaaataaaaaacaagcatagaaagaacatgatctcaagagttcatttcaacgcgtttgtcaaatgctagcaaacgggcaaattggtgtgacactattggtctcaagctttctcattggatatttctcattagacttccctacctctgtacgtacccgttactttcctgtcacatacagcaggagccttcttggcttggatgatgtggatattcctccttgtggcagctggatccctagtggtcctcataacatcgatattcccaacctttgtaatccccttggcacctgtcacatccaaatagcctttggagtgtcggagggtttatggtcatgcagaagtttccgttttggaaatatgtgttttactgcatcgattaccaggtatcctgatgcacttcttccagaagcttattttgttgtcaggataatcactcattcgcttgggatctgaaataggtttatgtactccatggtatgatggtcaatgagctttctgagcgaattacttgtggtgccgattgtcgatgtatacggtttactaacctagaggatcagtgtcttatttggggcactgaagtgatataatcgtatgatttaggaggccgaacaaatcgagcagccttggagatactctgtgtttgactacgctatgggtactgtcaatatcaattagtttgagtggacgcaattgatagaagatggatttgcttccacctggacaaggttcggaaacttcatccggaatggcagccaccaatctcccgagaacctaaagaggtccccaatcgagcaagctgttgtatattccgtagcaccttgatagtacgccgggcttgaagtatagccacggggacacttgactcacatggcagctggctttcgtatcacatcagataatgctgcttacatcgcgtgccgaagcctaagtcgtcatgaaaaaagcctatctggagctgacgaatcatgtcatctacaacagaaaacggggtgatgcgcaacacaatatgcaagtcatgtactccgtataccgatgtactactatgtacaagaaccttctataatgtttctgaagccgcgatagaagtctcgcgaaccgacaaaggaatagagttagactgagactgatttcccctcatcttcatcgtcgaagcaccgtttatcagtaatcatgaaagagcggtgaagatttcgacttcggggagctgatgccatctcgcagaacgaagcaagggggtggctcccttgaccatgtttgagttcccctaggtgagtcaatgaatcactggcggcagatgtcaacgtgatcacaccatgaagtgatatgcgaggaaagcttgttcgctgtttttccatgtccaagtattcagatatttcttgttgcgcacagcatgttcttagtactccaggtcccgatgcgagggtctatattggtgaagacaaaactggagccgcatggagatcctgagttatatctggagcggagcccttttcctggtttgatctttcagccgcttaagctgaagatatccactccggcctaagaggattttgatcagcccggaatacatgactagggtccaggatatattggatgctatcggctacgtatagtttaaattggttgttgtgagctctaaccttgtagtgttttcattcccacacgtgcggagtaaacattcctcaaccctcttaatctaagatgcaagggtgaatccgtaagggcaatgatagaccgtccgtgctgcatgtcataccgatctggccagttctgcctagtgagagaaggtttcggccaattatttcatcactgggtcgatatagtgcaccatgtatagagtacttcaaaactttagtccatatcgttgaaccgatagcagatttccatgggtttcccaccagtgtgcgtcatgaataagaagtatgcaggcggagaagagccaacgtccaaagatatcctgccacatggaggggctctgactacatactaatgccatgcagcgctcgtccctcttgtgcttgacatctgtggtttctatggtagaagtaaattgagtcattgcacggtggcgatggtatcaggacacatacaggtgtctgcctacagtctacctaacaagagagaatatggagtagccgtagttacctagtggtgagccggcttgcagtgtcatccccaccgacatttccccgtgtaccggatacattgtcattgtatttgaggcctgcattgaccaatgcacagaaaaggaaatcaaacaacaacaatcggagcgaaggagaatctagattttccgagaaccgagccatagccgacaggaacaggatccttttggattgacatggaaaacccttcacggcggaggcgatcattgggccgcaacgccggttgggcgttggatgtgggatgcaattagggagaaataggaatgaggaatgcgacacacgaaaatgcagaacacgggatgggaaaagaaaagggaaggaaggaaataaagtaaataaagtaaataaagataagaaaagtcaagggacaggtcaaccatggatccccagcagtcaaaccaaggatttcccctccagcgggtcccgagcttaaaagcacaaacaataaagaattagaatccatggatcggaaacaacatattctatttaagtattgtacaagatacaatatacaatatatacaatatagtaattattctaattattctctgctccaaatacatgtaaatagataaatacaaatgcaaatataatataaaacactgatgacgctatcccccactttcttcttttttttcttttgtgttgggtaccgagagcctcttcatgaaactttttttttcttttttttttttctaatcctgtgtggtcctgtacctgtaccttcgggttattcctcttcctgctcgttctctttatggtctctatactcctctgagtcctctccttttctaattatctttccctctctccgtccttctttccccttgagatctcaatcaaatcacccctcacttcgttgttatttcatcgctgcccatcgactccactctccccactgcgttctaagaccgtcaggcagaggatcctaaattctcaacccaacctctgcagctgcagttccttcaaccactcatcggctgccagagaggtcattttctattttcctccttcttcctttgacccaacgcgtccgcccaactcttagccttacatcccacttcgatggagacgttgcgatttgaaaagtaccatcttgctccctccgcttgacagaacccgtcgcccgtcgcctgccatcgcccgctgcgatcggcaggtccgcttacttgtttgagtggcccacttgggttgggcactggggagaagagaaagggaagaaaaaacggatccatttggtcagatctacggggtcgagagggggggaagaacaatatacattctgactcatcgtcaaaggagcagtggcttgctgtaagttgaatatcgctggagccctgtgggagccacccacgtcgcccttgtcggaaacgggaccaaccctgtttttttattttttttttttcgctagacacccgatcgccttgcagcccacataatggccggtaacggcccccggcctgcctgcgtcgaagattacgacgaagaacaacaacacaccctacccgacaccagactttcggccattattgctgccaatacagctgccaaattatcctccaggttggaaagattccaggagccgctgatcgacggtgccagtgactcaggttattctagtcgcaccgccgctacggttaatagcacccaatctgcgccgtcgggcggaaaaagccccccgatccctcttaagctggacacttccaagcgtaacgacctcgccaggaaaagttcaaccagagaacgcaaggacaaagaacgatctcgacccccgcgcgaagagatgatggttggtgcctatccgggcgctgcccatcacgctcacgtgccccggtcgtcgtccaagtctcgtcgacgagaatctgcccatatccaatatcacgacaactattacgactacggtactcagtaccatcaatcaaccccgattgaccaccgacagaacgactactcctactacgcccagccacgcccacccatcccagaatactcatcgtccccgcacaatcctcgttatgcccccggcgccatagagaacattcatgtcagtcaccctggtcgacccagccgctccaattcgtatcacacctataattccaacggacgacccatgagtttccacggtatgccacatggaatgggttctggaatggcatctccgatgtactctcagcacggatacgatcatggccctccaccagccagctcggcatacatgcaaccatactcgtcatctccatacacgcaatcttcttactatgccccatcggcctcggactacctcccatcggagtatccacgagagaggtccctgtcccgggaaccatcacgccgtcggtcctcatcgatctatactgcccccaacccacccatggactctggggcgtattcgccatggtttgatgaagatccacccacggaccactattcctcgcgagatgttgtccgtgaccgtcctcccccaagacaacaggaacaggatgaagactactatcggatgccaccgccaggagctaagcccaagcccaggccacagatccaccaggcgaagcgaccagagcggccagacctaccgcggaagatgcatacctcttcgggtattgtcccatctcaacgtctcccatccaggggcatagatagagaacgaggcatcgacagggacagaggcatcgacagggacagaggcatcgacagggacagaggcatcgacagggacagaggcattgacagagagcgaggcatcgagagagagcgaggcatcgacagagagcgaggcatcgacagagagcgaggcatcgacagagagcgaggcatcgacagagagcgaggcatcgacagagagcgaggcatcgacagagatttggacatgtcggaacttgcagctgccttaccggtggttcaagaccgcgcccgtcgtcgagtttcaagggacgccccgttgccagatagagcccgtagcctacgagatcaccgacgatccgtgtcctaccaggatgatcgacggtctgctcaggtggccgtggccagctctcggcgacggaagccaaccgagtactactacgatgccccatccagcgccgccggtgatctcgaagatcgcgagcgtgaagccgagaactatcaggcagcccgatccggccgaacctcagcgcccgcattacctctctccgcggagtccttgctccctaccaaagcgtctcaccgcaacgggagcgagagcggcagccagaacagtcggtcgagcggcagccgcggcagtgccacggcctcacagaaggaggatgacaagaacatgaccctcacgttgaacggattccaaattggatttgcacctgaagcagtcgctggcaaatctattaacattcgtgctggggagactggggctgtccgattgaacatcggtggcccgcggccatccaagcagcgtgtgaacggtaccagctctgattatgcgggtagctccagccgtcgggaacttgaagatgtggtgaggcgtccgcgggatgataggcggtcggaacgacctagtcgtcgagacagccagtcgacctacgggactactcgctaccattgattttttacccctgttagatgtgtcattttctgtgtttcttttcttctatcatggtcagatattattttttgttgtgattccatcttgtgtctacataaccatgtggctggccttgttcatttttcaaaagtttcgattgctttgcgttttttttttttctcttcttctttgggatcgggtgcttgtgcaacaaaaaaacaacggggattacctaacgcgaggctctgttgggcaacttggggaacaggctggactttgtcatgaggtccagagttttctgttgcccaatggtctcgctaaaatgggaggacttttgtgtgatttcatttgcaactgctggctcgatttgctttctttatttgtgtgcttgggcaaaatggtcgggcacaaaccccatgatgatgtgtttattatggcgatatgattgtacgattctgatgacctgcaatgacaagtctgatgtgctttactttccgatgtcttctttttgtcagcgtttcttgtatagcctttcttgttgggcccgtgtctttctcctggttaccttgttcgcgactccgagtggcggagagagattatacccatgtctttttacttgtcatgtctcaacaggtcatctttttctttggccatatctatgattttatgtgtcttggtatttggtatttggtcccgctgggagtctcgtagttctcttcttgggctttgtattcattcggttgatttctgcagtgttgctgatcttccgtgttctatcgtccatcggtcttgatatattttcctgcgtttgcttcttagttggttttgataccccgcaagctgtctgggcgtgatcacagctttcgactgtgtatgtctctttcggaggattccagcgggtggcatttgtcgacttgatataattgatccattattaaatccgttttctagcaaagggcatgtttcagatttaaatagaagtcaattgcgatcgactctttttatagatcgacccacgggtggcccaactctacccgtacacggacccgtggacgccagtcagtgtgggggatgatgtaatcaggttgcccgtgacaaccattgtaaacaccagtcccagcctcttctctccaacctcctcaatttcatgccgaaagtcaagctgaatcatacatttgggttgatatttcccaatcttcttatcttaacatcctacgatctagacactgtgcttcgcttttgcccacattctgcacccgcattctatacccacattccaggtgtcagagatctctacctacatctggtgttgatcacttgcctcaatgtatgttcatgtacctcataattcaatcccaaggatgccaaagtactaacgatccgatagtgagtccagtcttgagccgggtgctcttggccactctaatactccaccatgcctccattttggccgaccggaccctccgccgacattccaggaggaaccgttgacggactctatgtccgggatgtcagcagcgagaacatttctaataccttatcttcggtcgaccctaatccccataagctcctcccacgagactcagacgactcggattccacgccaaaatatggcgcaggcacggtcgacccgcacagcatcaagatgcaaggcctgatggccttgtttgcccttatcggactggcatttgtcataggaggaatctggttcttcttctgggctaagaacggcggatttgtctggcgcaagggcgactgggatgactacaagtccaccgttctgcgacgaaagggacccgacggaaagactctcagtaatgccacagcgagtaccaatctcggtggcggaagtgttgtcggcaagggctacaccgacgacggatactcgtttacagaaggatcatacgacgacacagcgacaactgtcacggaggagaagtcacggcgcaagaagttcagagagaccgctaaagagaagcttctccggcgcaacaagcacgagcagtgggaaggtgcagatgatgccgacgtacgcgcctaccgagcagaaaagcccgctcgcattggtggcatgaaccgcgaagccgacggaacctacaatggcagcgactacgacacctccgccccgcctacccactaccaacagagcgaaatgagccatgctcatgacttcgcttacgagcagccacgacgtcagcaccgtgatccctccggcttctcgttcacccaaggcagtgaggatgttatcagccaagttaccgatcagcctcgtatccgcgacccatcaacccgccgccacaaccgccgtcgcgaacgacgcagtgagcttgccctacccgccccaccttccgcaccttcatctcgtactagcagccctcgcaagcaccgtgagcgccgctctgtgccccacggtcacttcaccgagcccctggatttctcatctgcaggatcccgttccgaatatcaatactccaacgtggacaccgaggattcaggtaccaagagctacaagcatccaattcctggtttgacgaagggataccgccgcgatggacggagccgtcgtcgtgacagtctgagtgatagtgagggcgagacacagtactcatgaattacgactgcagatcgggctagggtttgatgtacgagataccctacttgatgtatgggatttgattttgaacgttcaacaattattgggttatggaaatagcgtgctttttacggcaaatgccgatcgacttatggatatggatatgggaaattgctttggtcatgtacataatgaagagaatcacgatgcaaatggataatatgtctgcactgtagtaggtgtagatatttcatttgttgctagccacctaggcatgtttaaacggtcgcttccgagttgtccgacatacactttagctctgcaccatgtacttcctttaaaccacaacctgaggttgggatacacacatacatcgtttcttgtgcatattcaactaccacccgtcccaaattatcgtcaagccaaaaacccctcgttgttgacgacatggcttcctgtacgtcatcaacctcccaaatccacaacatcctaatccccacaacagcaccccaagaccgccgaccacttatcatctccggtccctcaggcgcaggcaaaggaaccctgatccaaaaactcatcgacacacacccccacacattcgaactaacagtctcccacacaacgcggcaaccacgccccggtgaaaaagacggtatatcctaccacttcgtctcggtcgagacatacaacactctcaagcacaacggggatctaatagaagacgccatgtacaccggtgccttctacggcacgagtaaagcagcactcgcggaaatactcgacaaaggtctcattccgattcttgatatcgagatgactggcgtgcagcaggtgaaaacaagcgggtttgatgcccgctatgtttttgttaaaccgcgggatcttggtgtgctggaggagaggcttaggggccgggggacggagagtgagagggatattcgggctagacttgatcgcgcgaggagggagcttgagtttgcggagactgcgggtgtttttcagaggattattgttaatgatgatctcgggagggcttatgctgagcttgagggttttgtttttgggttgggctaggtagtggtgaggctcattggcagtgttcacctattttcgatttagaagttattattggaatgggaagactctctccaggctacaagaatgcctcaccaactagggaggtaatcagccattgaggctacatttgggttcatagtcagaggtgtagtccgccggcgaagattcggtgtccggggtaataggttgcagctgcgccaccgggtcaatttaatacttggatatggtctgtaatatttctgaacgtctgttgtgattgtactctacctgcgctagttatgcgtcctgtctatgacactcattttcaaaaatgaaataagacgctcaggttgttgatggtgtgatttacgttttcggcagttatgatattcagcgtggtccgtagtacacctgcatatcattttcttcatcacgttcctgtcgaggtataagccgcatttcccgcatttttcggatcagatagcgcttagctgacaggtactttcctgataggctttgccacgttggcagtgtcacgggttgattcagggggcggcgcaggtactccataccagttggttggttatgtatttccgggagggtactaaatcaggaaggatggcacggatgactcggtcaaagcatcatattcgttctatccatgactcgcttttggtggcttcgtcggtcttgtatgtatagtccagaaaagtgcctattagcgctgtggatgttgcttttggagaaagaacacctgaggaagtggcgataaccgttgcagggtttccgatgctgtagatctcgatgctcgagcacccctccaaccgtcaagttagagcgaataagatactcggaaggcagacttcacttctagttctggcataaccatctgccgtggacggcggctacatagtgagaccgtgatgagcctcgatcatagtacatattgatataggtcaagtcacctgggataaacgattccatacgatgcctggccaagatgccattgctaatggtttcacagtaaggagtacccccgtcatattccacaacggagattatagaccaacacattcgaatattgctaagcaaggttgaacagccctggaggaaagaatgctattgataaacccgataatttctcaagagaagagaataggagagctttgtcctcgaagctacaccacatctgggggttgtaaaaggcgcagttactgacgctttgatgtccaaatcgaaacctccaatgacccttactccgtaatccacctgcattgcattagcgcctgcgcttcaatgtattattggctaccctgaatgcaatggtaaattgtgagccaaagcattagaggtatatcagccacaataagttaagcccctcattgacaggtctctcattggattctacttccactcagcgatcatgtgctgcttgccaaagcctctcccgcgagtcagcgcttgagaacaaaccaacttgatccatatcatacgcgccatgcatatactatctctcttaagatattggtgatgtaaacggtccgagccgcatggtactggtactggaggggtgtagtagatgagcgatatagaaaccccaaggcttttatatttatctgcctgatcttcctcgatttctaatttcttcctcttgtatgtaaaagtcatggcttcgaactgggtacttcatcatgagagcaaccgatgggttcggcccatctacaaccattctggtgtgcatcactggctgcatgatgaccgattgcagtaactgaccgtaacaaaaggagaatttctctacgaatgggactgcatgggtggcgagttaactcctgccatagcgggtcaagattcaaggttagtcttccattcttcttgtgtgagaagtccggggaagtaatccgtttaataaaagcgtcgcgctatgccaacgaagcacctccgagtccgcgtttcccacactcaaagatgcatacggacatcagctcccattcccccccgggctagaccctcatgcaagtcgcctaaatcgtgtacatcagcaggacccgctcgattacggccaagcatataccaacgatcatttcaatccccggactccaccgaccggataccagcagcttatcaatcaccaagtggataatggtatatacccaggtgcaggcacagtgacagatgacaaggcaagcagtccgccagaatggagcccgaatatgcagtacaaggtagccagagacacaaccggtcgcagaacagggtctgcaagcatatccgaccgtagcgatgtcactagctcgtcaagaagtgatgtatccattcccgaaatccatatcgaggatctgcagggattgagtctcggggatcatccagcctcgcatatggtgctgccctatgaggccagcagtcatagtcactgcaatgattccattcccggggatgtccaacgaaaaaggcatgacagaaaggtggtaagtagttagttttccttcctgtttcgactgattggctaattttgacatagcaaaagtcctcggaacctgcatacgtgatccccggcagtagcagcgaacatgacacacttgatcctcgtaagcaacagcctaggcccgctttatgcatatccggaaaaagaaactgacgatgattcacacgcatcaggctacaagaggcagagcgatcctcggagatttttccgagttggcagggtttgttcacctcacatgcatgtcagttgaaggccctgctgataattgattgcgatcatacaggtcttttcgatgctctggcatgagaatgcaggctggcatggaactatcgtcagcgagaagcttccctcatcgtcaagcccattcacacggggcaagtatcaagaacccatatacagtagcatccgacgcatggtagtggtcaaagagcagaagggctgctgctggtgtgtgtacgtggaaagatttgcatccagtgtcagctgcatttgtatcatactaatccatcattttagacccatcactacctatagtggccaaggcgtggcgaaagccggggttgaccgcagcaaacatgccgtcattcacatgcgaggcgatagacctcgaactgtgaaatccgaaccccggatggccaaagagccactcgaggttgatcctgccaggcctgatcagaagctagattgtatgtcccgagtgaactttggcaaagtttataccgtcgagcacaatgtgaaagttcttcccgtgggcaagatcacggaagcatctcgggcgagattcctagaatacgctcagggtgagtttatcaactaggaatagagcgcgagcatagaatttatccacaggaaagatgcttctatgtcggtctacattgcctgtggggcgatgcatgtcgacaattcaacatccagacttcctgtttgttattattatttgtatttgttttgttcaggggagcgatacgggaattatatctaacgtctgcggttatttgattttgaatagcgagttttatcatgaatggttcttcgaatttgatgacatctgtatttgatcttgaagatgggctttgcttgcaataagtcaacggtttagaacaacatgagaatatagagtcgggagatgtctgtatcatagcttggaatatgtctacctgggaggccctttatgctcactagtcaaggactttccactctgttctggccattcatgaaagattggtgtttaggcttaaatcgatctatatcaactaccgagatatattttcggctgggggtaggatatgtcacaaaaaaacacctgtctacatatccccaaataagattacagtgcggatatgtaccggacttatcatgcatcctttagattagcaaagcctccaagactcagagattctcctcgatcatttatagttgttccacggagctccgcctgaggcagcaagattatgtcatacataaaatcttccaattcaccgcccgcaataaactcaccgcccgacaagatttccgaaaaaagtttcaacttctgcagattcgatcaaggaaatatctaacacaatggcaatgaaacgcaagttagacgcaaatgatgttccatccccggaggctgctggggtggaggatcaggaattggactttgaagccctcaacctcgatcctcgattgcgccaggctctgatcaaggaaaagttcaccaaacccactcttgtacagtccaaggcgattccgcttgctctggaaggaaaagatattcttggtgagacgagcctcttgaatcgatgaatcaaaaagcagagctgacagaaatagcccgtgcgaaaactggctctggcaagaccgccgcctatgtccttccaatcctgcaagccatcctccagcagaagactgttcgtttcctcttcccccttctatatatatgtacttggtatggaaatcaatctaacactgtacaaataggccgatccctcctcaaaagccacaaccgctcttattcttgtccccactcgcgaacttgcagaacaggtccagaaagtgatcacatctttcgcttgtttctgcggaaaggacatccggtcagtcaacttaacacagaaggtttcggatgaagttcagcgctcgatgctggccgatttcccggatatcgttgtgtcgacacctacccgggtttacagcaatgtcaacaactccgctttgtcgctcgataaagtcactcatttggtcatcgatgaggcagacttggttttgtcatacggatatgacgaggaaatcaatgctctcgccaaggccatcccgcgaggcgcgcagacatttttgatgagtgctactctcacttcggaggtagatacattgaaagatttgtactgtcggaaccctgtgattctcaagctagaggagaaggaagagaagggtgctggtgtcagccagtttgttgtccggtaagacaatatcctactgccgttattatagcagttgctaactcaactccacagatgcgcggaagacgagaaattccttctcacgtatgtcattttcaaactgcagctgatcaaaggaaaggtcatcattttcgtagccgatgtggaccgatgctaccgtgtgaagctcttccttgaacagttcggtctcaagagctgtgtcctgaactcagaacttcccattaattcgcgaatccacgttgtcgaagaattcaataagggcgtatacgacatcattgtcgcagccgacgagcaagcagtattgggagtgcccaagtcgaagaagtcgcgcgaagctaaggaggaaactgaagaggaagcaaaggaggagatgggaagcagcgaagatgaagaggcagttgatgaaagtggaaaggaaaagaagccggaatccaagaagcgccgcaagatgaccagcaaggaaaaggactacagcattgctcgcggcatcgatttccaaaatgtcgcctgcgttctcaacttcgacctccccaccagctccaaatcctacacccaccgcatcggacgtaccggccgcgccggcaaagcaggaatggctctctccttcgttatccccaccgagcaatacggcaagcaccgccccacctcaatccccagcacaaagcatgacgaagccctgctcgccaagatcatcaagcggcaagccaagctcggccacgaagtcaagccctaccacttcgagatgtcgcaagtcgatgccttccgctaccgtatgacagatgccctgcgttccgtgaccagacttgcagtgcaagaagcacgaggacgtgaaatccgccaggaactgatcaagagcgaaaagctcaagcgccatttcgaggaaaaccccgaagaattgcggcagctacgccacgacggcgagctgcgccctgcgcgtgtccaggcgcatctcaagcatgtgcctgattacctgatgcctgctaagggacgcaagggtctctcgaaggatgttgggttcgttgggttctcaaagacgaagcagaatcgcatccgcaaggcaagagatcgcaatcgtgcgcgtgggaaggctggtgggaaggttgatcccctgaagacgtttaatcgttctaaaaaatagttgcatagttttaaaatctgcgggcgttttgtccggataccattgtatagtcagacatgaataaaatagtctcaatttgcgctcctgattgcatgcgtaggatgctttctttttcgcttcggtgatatacattgtacatagatcattgtgcatacagtagacttttataaataaaccaataattcctgcccatccagcgatctgattgtttcaggttcaacgtctttcaaccctgaaccgagctcgatttcgagccatttcttccccctccttatctgccgaatatgctttagcacatcacgcgcattttgaaggtgatatgcatggacagaagagttcggcaagcctgtttgcggcgtggggacttcatgagacggcacatgagacgagtcgtgggactccgtcaaatccagaaagccggggccgatgccaagccattcgacatctctccaagatctgttccactctgggccaacggtatcagggctctgggggaccccatccgggtctttcccaacccattttaaagctggtagccattcgccgcagccctcaaggtccaaccatttcaggcagtacgtcgaacgggatagctgacggagaatactcgcagcttcggcccaattgttgtcaagggcgtctggggccaagaagcgggccactgagctgcgaatccgagtagtggcagcgcttggatttcggcacggtataggccaatgggcaagcgagagatgagtcagggttggcaaatgtgctaatagattgagaagagcagtccagcttgcagcactaggtgtcgggtgtgctagagataaggcacggagttgggggaagcgtagagtctgggaaatggccttgggaatggacggagttgaaagacgatcaaccatagcttcctctcggccgttataaacatcttcatcccatgaagctggaataatctcctctgtttcatgacctgagactcccacgactggagcctgcgagatggtcacctcgtttgtgagctgtttcaaagttatccagttccccagagcatttcccagatccaatcgcacgattttgaaatccccgtcaatagctcccgactcattaaaccctgggacctccttgccaatttgatcctggtcatgtcgggtcaaaaagagtggcttcaggcccttcatgtaccctctcagtggcgggcctcttgcgtacacagcaacataactcagcagcagttccttaatatgatttggaagatgggccagaaaagggccatcatattcaagatgccaacaccagttcaaagccattgttttcagcaccagatgtaccaggctccgatggtctgggaacagcggccccgggaggcgggccaaccggtgtatttcctcttctgaagattccggcatccgatggtgcgatccttgatctcccgccggatttgtatttccagcgagccaactcgcaggcggcggaggtccaacagttggtcgagttgggcgaaccccgaataccgtgcgacgaggaccggggcgaggtcgcggtggcgcggttgcagggagctcgagtacatcccgaagagacggatgaactgagcggggagccacaaacgagcgccgagcacgttgcgagcttggaggatcatcggatgaagcactaggcgtctgtgtacgtcggaggtgactgattaagtcgttgactgacgtcgctgacgcggagccctgtaccccagacccgccatcatgacgagacccagataatgcaaggctgtgatgtgctaagttggctggctttgcgtgaaaccgctggtgctttttgggcatctgtggtcgagctgcgggtttgacgaagtcaagtgtctccgggaagctttcccgcttttatcgcttatcgcccccacatttgatgggctgacatttgcggctcaaaaatatagaaaacaaaaacaaagattggcagaatgactcactgttgctcataataaaatctatacaatgttatacaatctatacacacgggctcagatatcccgaacccaagaatcgtccttcatatggccctcacgcttgggaccctcttcgagccaggtatccaccaagccctccttcgggtcctcgtcgggcagtccgcgagatcgacgaacgtccaagacaaggttcctgatcttaaaggtcacctctttgcgcagctcgacagcttctttgtcgttcaacagttcatcactcagcacccctaggggcagatcccgggaatcagggtatttcttctcgaccttctctttcaacttttgccaccgagatctcacttctccgaatacagcatccgagtccaccttggagccaaaggtaacgctgacatgtttgccaggccgaggaaggaatcgtgggaattcccgactctcgtgcataacatcgtcgaagccttcaatccacatcggaacaacatccggacactctttcggctctaagatgagccgtgcgattccccacttgaaatagcgcatggtctttcgtggcgactggtgaatcttgccttcggggaagatatggacccacgaatttgagttgcaggcgtatgcggtaggtgccatgtgtgagtccttgccatcggtagtgtaagcgactgggaggtccgagaatggatcgacacagacattgtgccggctccagtgctgaagttcgggtaaagcgcggtggtggtcaacggggaagggacccttcgataacaagcgaatagcctctgtgacagcgggttgagtcaagccaccgaatgcggaatgggcagaacggtgagtaggcagaaccttgcccatggtgaagaagagtgacagtggtcttatctccagtcagtaaaaccattcattgaagcattcgggtaaacatgtagataccttgtctgataacaaatatcgtagcttccaaaagaccaccgcttattccaaaaccgtggaggcaaaatgccccatactaatgggtcatccattctggtattccggcgcaatgtcagccatcttcacttttgcagtatgggttatctcgatccgaggctagtagagggacgtacacgctgatatgattggatactattttcagataaatcaattagcaactgcactggcttaatgcactttccaagattgttgtgttccggcatacctgtaatcaatcctcgcttccgttgcgaaacgtcatgtcgagaatctaacagctccgtgaatgcttccttcccgtgacattcggcatgacagaaaacagaaaggaagccgcgacatagacccgctactccccacattgttgtgttggataaagccctccatgggagggatggggactccgccgttgcgctcgagtccatgatggatggtgttgaactgttatacacaatccatgaacaagaagaggctttgcacaagctactaggagcttggaaagtgataagttctccgaagagcagatgtaattgtctcaagtgtacttagtagtttaaaaaaaatatcgcgttcctggaaatcgacagattcccgaaatcacatgattttggttggggtaaccattcagtaaagcattagaggccagcattaccatttttcgataatatgactggttgaaatttaagataaacaactaagctgactttccaagtcccgagaattttaacttttcctatatcaactgtctcaacgagtaaatgggctattccatcagtaaattttgtatacattcagtgcacggaccaagtacactcccgaactccgggcacgattttctcccggctacaccctgacaacaccactaaccaacgatgttcaaatcaacccaagcactatttggcggtctgctctggtgcgtctccggcccttagcccgcagcttcagtcattggaacccaagctaacattcttcccgaataataggaagaccccgtggcgtctctcctcccctcaaaaggcacgacagcgcaagcgcctgcgctccgtggacagggtcgtcgacaccgtcagcgccgcacttgagcgcaatggccagacctccaaggctgtgacccgatggtttgcagagatgccccgtgaggaggaaatgctgccgaaggacaagtacactcttttcgataagaaggagaagagctaccggaagagcattcacagtatgttctcgtgccattcttacccccttccccccacgttgacaccaaattggtattcattactatgtggatcggctgggctaaccaatttctctaccttcagagctgcccaagtggactcgtgtcagccaacgtgtcaaccctcccggtttctaaacggatttcttcaccccgcgcatgtactatacatccgaactcgactctggcgggggacttgtcggagcgaaaaacaatatatggacaaccggagttttggctttttggaatttgcagcgcggccactctgaagaggatggtggcttacaatgttccatgattaccccagcgcttagatcaggctttcaattcaaatgcattttggcaaggatattcatttgtgtttggttccggggtatactaatgatatagatgcagcgacagacatagtggtagtgaccgtatggcagcagaagtgatggatcagtgcgtttcaaatgagggtgcagttcgaaacttgcttgggttatagatagggcagaacaaaatgaatgcaagggtttggtgtgaagagtgagcggtttgagaagaatcacgagacaaggaagcttggagctcttgttctctcaaaatcatagtttgggatcaatttcccggacgcagtacgacagcacttgttgacttgagctgccacctccttgatcctgccccgatttactcggccttcgtggagggctttgtgaacacgatatccccggtggacttgttgccaatcatcgagcttctcttgccagcctgcgcctccttcataccaggcattcttctgcgcagtggacatatcaaagccttggggtggctttggcaaaagccagcagcctgtatcgacatgaccatcgggcggttcttcgaccgattcatcatacagtgtaatagtgcgaatggcgtctcgtatgccagataccctccgctgcttgttcactgcggcccgccaggagtctatacgaggagtctgtgcgcgtttccttctggatatagggtactttggtctgggactgaagactggccgaggataaggaacgttgaatcgtgggtctccccgcatccgacgtgcatcggtggaaactcttgatacgggatcatagaccaaccatgtttctctattcagccagtggttggctagcaaggcaaaatggtatggcttttgccccggggtgaattcattgaagagccataacagttttcgatccagcctctccatcatcctgacctcccaatcactcaactcatcgacagcgcttcctgttttgagctggatttgatctgcagagcatcgagtaaggtctatgtctggccttttcccttgacgacgggacaggccgggatgttttgagtcacacataaatcgccattcatcagacaatgctggtctggctttcgaattggtcccttttcctcgaaaattacttctggccggggcggaattccattggatagttttggtatatgtccgctgttcattggcaaacagaacctgatttcctatgagaagtctggaagtgaacgatgttctatcttccgagatatgcaggcgtccttcggtgcgatttcgctgcttcttgcggtgaccaggaagagaagagctggagtcagagacgtagctggccaacaactcggaccttggcgtcccgggagggccagatgaatcccttatgttgtcaaatactccatctttgggctccatctgcagtcgtgctgaccatccacagtatctgccatgattcctttgtcgatggagtgatttaggtacttttgtgtgcattgagccttttggctccgctagctcatattggaaatcttcatgttgcatgacagattggatctgacatgagatagcctgagatccctcaccacgcgaccatggtatcgatcctcggatctggtaagatttattctgtcggtatggtaatgattggacctgatggaacggcatcggtgcacgggtagctggctttgctgcattattgcgagaattgaacaagggttggtcatcagaactgccatcatttggctgcagcgggtccctgagaagttcctcgagaatcgaacgagtgataattggttgattattgaccaacgaagatttccgtggcagggttggtcccggtctgtcttcttgagcttgcggccgcacagaggccggcgctggaacagtctggggcattgagacacgttccttcaaagctccatggcatttaggccgcgaacaaggattccagatttcatcggcggtcggagaatcatcatagctcttgagccaatctggtagccaacgaaatcttttcggttcttgacggtgcttttgcttttccacgtcgccaggatcccaccaaatccaagtatagtcgtctcgagccgatttccacgtcatcaacttccaaatctgactgaagaagtcatgaattacccttttgtttctctcgtgtgtcggacgcttaacccagccataccatgtgcgtgcgtatcgggtgtttgtatttttgcctgctctcaacaccttgcttcgattgaatcgtctgatgaaccccccaaccttccaaaacacgacagcgattatgaatattccaatagttccagcaaatagctcaaagaatactacagagtcaatttccttatggactttgaccggtgtgtttggaggtcgtgcgggaagacgtgggataccgggactcagggagtgactttgtcgagtggctagtggcgccatttattgaagacctagatatactctccaagaatcagtaaagatatagagcacaaagtgtcgtcgggactgtcttctcgcaatgtgcaaatgagagatgttgtagagacgaggaagtaacaaggcatggaactttcctcccatatcgtacttggatttgttctgtatatattcgtcatagccattcctattttagatctttcttcctgtaatgaaaatgtaatggcaaattgtgaaatacatattctacaatgcttgaggttccatgtctatctacaccgagctatttgcggttcattcaagtcacgatccatcaagaacaaaaatataaacgtcgatatttactatttaaacatgagaaaccgcgtcatggttagactctttgattcacctcgatattcctagccaaatcagacgcatggattgaaccaccctagatacatccctcccaatatgtattgccgttcattgcattctcgggaagcgggtcacctatactttcatatatggaaagcatacagttattcctaggcagcataagttcattgtcgcaagggctgtgaacaagcgtcaacacagaacatcctattttgatacggggatcaaaagccaatgcagtcagcttcgccagaatccaacgtttttagatcctgctgagtcatgtttaactggttctattagctctcaaatgctatgtgaagaatagaagatcatcgacctccagttgtatatttgtgtggatgtatcaatttgggttgtctcatgctgttatggaatcatctcatgactcaacctcggttcccagctgagatgaaaccactcaagagggtatgctgttatgggtaaataatatttcaaagttgacatgggatgcaaattcaatctagtggttgctctccactgaagtggagaaggttagcgttcaaatggcaatgtctcaatagtcaggatttcttacctacgtagcttgtcctgtacttttagcaagcacctgctcctactactttcggttctaccgattaatagagaacaatagtacatagaggttgtccagatatgtgggtggtagtttgacccacattcatgcataactcgttcattgaagttcagcctcacactttcacttctttaccgtctgtctaagtcggatagaagtctagacaaatacatctgagtggcaaaatactctatcagtgacgcaacaaagctccaaattagacaaatcagactccctttcacatgccaatctcggggatcggcgatatatatctcggaagaacctaggaaatcgtcagccattccagttaggaagtgctcggttgatatgcactttccaaattaggaaagaacccgatccacagccacaccgatcccgccactccttgctgttccagccacagatcagccacgctcgagccacttacggctgatatggtggcggtgcgagctattggctttgtttctccctattttgcttttgttgggcttcagtttctgcatcttcgtatattttaccttttccagttcggatatgtttttttcgggccaacatgatgatgagtctattttgctcagtgtctcacttccccaacacttggggtcggactttattctgcatgcgcctgcgtcacaatcttctgcctgaggattggacctctaaaagcaagaatagctcattttccagtatagtatttgtcccgctgctcctgcggggcgtcgactgatctaaattattggtgagatcgtcgggacgatcgcccagctcttgaaggatatcatagggtcacggagaaatggcttaagcttttatggggtttccttagatctcaaaccagttccctggcatacacatggcatctctatcaaaagccgagtcttggctgggtcagtgaggctgatttatgcattttgtcaagtgttctatgctagtttgccagttcgcccggctgtaattccagacctctgttgtacatcggttaggcaacaacgttattagaaggtgaaaattctcacaggtcttaaaaatggtagaattcgatagcacaaaatagccttaggggttcgagttcgaggttggatatgtcggtgtttccgagtggcgaacaccatgtccacttgactccaccgccacaagttcaccgttagggtgtggcttgaattgctgattaaaggggctagacaaagcctgcaattgcggtctgatgttctcctttcatccgactaggtaggtacctccataacctacctactatgtttatgtgtacgaccacgatgaccacgagaccacgttgcccacgatgagatacttgcatactagtgatgcgccacatctaacaaaggtccagccatgacaccttacgattcaccagatgctaggaaccgagataccagacaccgacgctacgataaggacgaaaggacgaagggacgttgtaacttgtgcatcaaccctctccttgatccgtgcacggaactattgagaaggcctcaaggtaccagcccattatctcgaggtcccgtatctcaattcacaactcgtatccttgcacatgaacgtcagccgtgcatgccaagccgtttccctgtcagattgtaaggtttccgcatgcgcgaaaggactaaaccagaagctctaaattgcacagatcatggtggaacccctattgtgaggaaacccggggtcgatcctgacactagcttcagatctcctgcggtacatcttcgatctcacagatctctgacctgctccacacctgatatctcactagtacgcgtacccatcgatcagcccaaacttgaactaagttctatggagtccacactcgccccactcgattccgttccggaacgtgctgttgcaaggatcttgcagtatgccgagcagaccttttattgagctcacaaatgttttccttggctatcccaggtacctggtcatcgaccatgccgaggctaatcgtgtacttttgaatggtggcggcatttccgtggccccatcgtgaattaccacaagattgaggttatgggtccgaagtatgtgcgttactgatcttcggcgagtgccatgaggtatatgaagccctgagtacggctatttatacttcatctgattctcatattcatccatatcatcaatcattcttcctattattcttggctctcttttatccaattcttcttgaattatacttcacggttagttacagttccacgacatctccccttacttctcaatcggattgaagcggatcttcgagctttaatctttttttttttcatcaacgattcatccaacgcaattcgtctgttccaaagcactataccgtctacaaaaacgaaaatggccggccatgaattcacgctgtccttcgagactactcccccaacagccaccaagcccggttctcccttcacaatcccagtagtcattgccgtcaacccaatcgggacacccgcacaaaatgtgcagcaccttgtcgtgagcgcctccctccgtgacgaggctggcaccggacctgccgccggactgagtgggagtctcacggcaagtgtgcggagtcgaaccgataacgcaatgagcggatatgcaaaactcagcccgctcactatctcgcagccaggcaagttccggctgcgggtaatgcttagcgcggcttcgtacaacggtgttgtaacgaaggagtatgttgattcgacaataatccatgtgcacgccggtgcggctgctgcccaacggccaagtgggtcaatcctctttcttgcttttggtcgtttttgctttgttgcgggtccctcttcccttcttttcccttcttttctgactgcccctctcccgccatggcgtttttctcttcagggccaatgttcagcccctcctgctcgcctgtttcggactcttgctgacactcaaaactctagctcccactcaggtggcacgactccaacggctcacggctgaaaacttggatatctccacggcggacattgcagcatggcagcatgcatgactgaaggacatatagcattcttcctttttttttttttttttgctggggaatctcgggcgttattcatggtagcctgtggctgtacctgaacctggaaagatattttcttttaccacgtggaagaaatgcaaatccatcaactagtctcgggtgctctatatccactttttctctgatattttctttatgcatactcgctatacgttctctctattggatgattttaccaccgactatctttggtcacggaagaattttcctgactttccctctatctgttagcgcatacgctaacccaagccggaccaaatgttaatctctcttgatctaggcaaagtttgtagtttagttgcattaatccggggctttggcaaacctcgagcttgcatcccaacttcgcatcacctcatctttgggtcatgagaatcacttagaacggtgttctcgcttcgagtgaatccattactctggttatcatggttccccttgaaagacttggatgagaaaatcacccgctatatcacaacgtgtcaaactcaaaatggggcttgagatatctccaatctagacatgagcatccgctgtgtggaatcaaatagacagaatggatcccggtggcgcaagtgtttagttgaattcttacggggattaaatgagcggggcaaatacctaaatccataataccgagtctcgtgtacgaagcagccactgggttgcctgggcgaagatatatattcccatcatctctaaattacaaaaaaagaacaaaagaaactacaaggaaaaggcaacgagttagaaatctagtccacacatccggatattccattcctactctatctatacccactaggtagatcggctccatggcctatttaagtaatactcatccatgtaactactacatagtagtggggattgatccttttcgcgtgattatttagccccggcctagtgatgcaacatggtacagtcacgaaaccggtgtgcaagtggggtgtatggtggatatttgactcttgtctggtttcgaatagacggatgtctcattcaaggagacccgatgttctttaacgggtttacaggtatgttgcagttgctcttagaccaaaatatctaatatgttaaagcacttacaacgtctgtcccttgtggggccgttgctgtcatgggacactctgccgtcctcttgccacatcaggttaggatgacatcctcttagggcttacacaaaattgttcgcaactgcggtagacggctggttattcatattaccaatgaacccacagataacatgtatgaaggtgagacggagagaccgacaaatcccgcacagctcaatatggggacatcgtgatactattctcactagaatctacggctgtacaatagcctatacggacgtgtgatccttcgcggagccccactgctgactacaatatattaccagagtgcttttattccctgggtacaaagtggaatgtacggtgggattccggcgaataatgcggttgcgtcaagacatatcacaccgcatgtagtgggctatcatataaaaggtataatttaggtaaaccggcaacaaagcgatggtcatcaatcccgaatacgaattcctaccttgatcggtcactattccctactgattcctagcgcaagtctttagatcccatacccctgcaattaagcataccacaagaatccaactcgactggaataagctacaatggttggttctgggtgactcgtcgttgcattcgagaatgataatccggggtacgccgaagtctattatcttgtgaactacagtttcagatcctgatttatgaattgccacattgcctagtatccgagtcagagtttggcggtgcattctgtagagcacaagtcggagataccggagttagtggcctctgtttcggctgagtctgaattcgcttgtgcgaatattacaagagttctttgtataagcaggatgattcgagaatttcagacacgatattgttctaaggttagggcaaaaagttcttaatataggactttgtacatatgaggtggtatctgtatctcttcggtgaatatcggagcaagaggttcggtgggaaattgaacttcttctccactcctattgattctttcgcatctaccccagatttcatggatatagccactcaatcaacagttgaacagtatgggaattatctggtcgcagattttcccacccccgcctactctgaccgaagtcaatctccccagccaggatggcaaagtgttcattgtaacaggaggctactctggagttggcttccatatatgcagaattctttatcgcgtaggaggaacagtttatcttgccggtcggtctgaagaaaaggcattggaagcgattgcgaagatcaaaagcttgtgtaccccgacccccccagagggtaacataatttttctccctctatcactggatgacctgacatccatcaagcctgcagtgaagagatttgtcgccgctgaatctcgcctggatgttttattcaacaacgctggcatctccagccctcctcgggggacttcgcctcagggccacgatctgcaattcgcaactaattgtctcgggccacatctcttcactcaacttcttttaccgatactacggcacacggctggagctacacctgtcgctagtgtaagggttatctggacagcatcgattgtcgttgatgcattcgcgctcgagactgggatagaccttgcagaactattgcagaaagacgcggagaaatcacgaaattacctcaacacgaagatcggaaactggtttttggcagatgccctcgcaaaccagattggtgcagatgggatattaagtctggtgcagaacccagggaatatcaagacaaacatcatgcgccatagtcaggcttttgttccttttgttcttggaccgtttctttatgccccgaggttcggggcatatactgcaatttggtcggctttttctagggatctaaaaattgatgatgggggaaagtatatcttgccctgggggcggatacatccgtgtccaagatatgatttattgcgagctatgaaaggagaagaagaagggggaaccggcgttgcagcagcgtttgtaaagtattgtgactgtcagattgaagcgtttctttagttgctttatacttctttgaacttggagatgtttggggggtggtgagagaggagcatccattgcatggcgccaaggacataccccaaatggtagggtgcatgacaactgcttatcttgacgtacttttgctccaagtttctaaccctcttagtagtctccgatctttggagtcatcagctttattccagaatcatcgtattgaggagataccacccttgacgtgttggagcggacatgaagccaattgctcagccccagctaaaccatccttttatgtactagctttgctgacggactcaccaggtgactcactcagacattcttggcgagtttttcggttagcacggcattctagaagggcgctagaagggggtttatgctgatatgattggcgaagaaacgaagttgggggcacggagtcataaaggcttcgtatttcgcattcttgtttaatattaatcttaaccccgcggaaggacccacccgggcggaacgacgaactcactgctccgagaggaatcggacatggaagactcacgacttttggttttgagtggtgtatggtgatgtacacaccgaccagaaaggacagactgtagacgtgtccgtccgaatgtgggatgtggatagtggaaaaacaagccccgaggtgccaaaagattgtcaagcggtgaatctgcggggtccagggagcgggaagaggaggctccaaggcaggaacgactgttgattggctggtgggcgggcaatagggcactttggcccccggaaccttccaaactcaccgacaacaaacaaccaccctaaaccttactagtggagctgacaacgtgctactttcgactgtgattggtggagatgttgaggagtccgtcgccaagccctgtggcatgaagttgattggttgcgtctctactagagcggattcctctgtccgtatttgacatcatagcgactagaaccttggaaggttgtactttttgctgcattttggttggttgccctacggagtccccgatatcccaaccgggaatttacttgggtgtctgaaagaacataaataaaccccttccgcaggcttcttgacttctatttctcatcctctacttcatatcccaagtgatgcacactcaatccaacatctatcctaagagatcgctctcccaaacatcaactacctcaacctcctctcatactacccagttctctgagaagagtcattccaaactgtccaatcctctctcaattctcttccgatccaagtctcctgcaccgattgatatccccaagggccaaggcacaatgtcaatgtcacagcctcgagatatcccgcagcgcaatcgcaaaccttcatacttcccggatcaaggctacacctcagtcagcccccagatgtctgctagcatgggttcgccgaaggcgggctaccctaagcgcgcatctactcacacccggaagaacagcgatgactacaaacgttacagtggaactgtcaaccactacggtcgtcactcgaatgactggctattcggtggcttcagtgttcgcgagacgttccgtgatagcctcgataggcttcgcggccaggacaaggagagctgaatgaatgctcctgctcagcaatctcaaatacgtcccaatatatggaacctcctgtcggaactactctgtttggatcaccctcgggttcacatccgatcacatgatgacgcctactccgaccgttcagcgagaatcaatacctgatccgccatgatttgaaagctgttttgcttcaaggtcctggaaccgagcgtggtccgccctataggggtgtgactatactcggtcgttaaccaccgcgtccgctatttacgcattagcgaatcctctgtgatcatgcttcgtttttgccacgagcccctgctctcgatacgtgtggccgtgcggtacttaaattataccagttactcttggtgttctcccgggtcttgaaactttgatcattcccatcgtgttttgaattgtgttatcgaccgttttgcgatcgattctgttgtgaaatgaacagactcagccgcgtttttttttattgaaactttatcgaatgaaatttatatatcatgaagcgtggaattttacagaacagaagtaacgtagataagcacagcatcaattctagttagcgagatgatatgaggatatataaagtgtaaatgaagtcttagttgcaaggttacttcgtgtcaatcttagtaagaatcttcaagtatgcttaaagaagataatttactttggtgatatggcttttttatttttgtagttaatttgagagtttagcgaccaagatgtcgtacgtgtgtaccttttgcatatgttgtggattgaagatgttcggtaaaagtctggcttataataacaaagatggctaacctccctatcaaccagccaagtggccgagcagtaactcggccatcgcattcttccttggtctagtggtgatgatttccgcttgtcattaaaaccgataagcgcgggagaccggggttcgattccccgagggagagatttctttttttttttttcggtttagacttgtttcattaagcttacattgaacaatggatgggagcttctattacgcatagaactgacgcatttaggctgacttatgatggccatattttcagcaagaaaaacaaaaagccccaacgtttcttcaggcagaagtgcgcgatgcgagataaagtgagacactaacggcgaggctcgggcaatgtgatttgtgttttgccactggagcctagactaggccaagggtccaatgtttatttaaagcataacaatgtctgccgtttacttctaacacaacacttgccggcaaaaatcatggacttcttgtcttctctccgtagctcaatgcctaggctgttcgagggcagcgacgggccccccgagccggaagatcctctttctccgctccacgcggcagttgatgcagaagatgtggaccaggtgcgccaattggcggtcactgcggaccctgccgatctgactgtcgctctatctcgatgctgccaatctggtaaaatagccagcgcccaggctctgcttgaaaccgggcgatgtgatatcaacgcggcggtggagggagacacacttttattcttggcctcgaagaaagccgacttggccatagtcaagctcctacttcagtatggggccgatgccacaatcagatccaaaaacgggcggttcggagacaagcccccggctttcacacctctccatggcgtggcagatagtctgcatccctacgaaaagttggaagacctgccccgctacgaagaactgatgcagatactgctggatgctggatgcgaaatcaatgcacaggatgcccacggaaataccgcactactgctctctgtccaccgtgaggtagccctgattctatttctcttgcaacatggtgcggacccaaatatcgcagaagaccggggaggcacatctgcgcatttcttccaccaccccctggaccacccagagtggttcaaggccctgatggcgaatggagcccgcctggatattgtgcgaagtggagatggctacacaccgctgcatgcctatgcatctaaatgtcagctgggcgatctgtccttgttcacgccctttgtattggattggtcgatcactgacgacaatggcaacacgcttcttcatatcgccgccgcgaaacatcggcacgggagcaagaccatagcggaactgctgaatgttggcattgatccgaaccagaggaaccataaagggcaactgcctattcacatggttgaggggtctgaacaagatatccaggatgtattggacattctctgcgcaggcggtggagatctcgaggctaaagactatcgcggatgtactctgctcaccaaggccatgcgcggcaccccgcagtggaattgtcgcgagcttcttccgtatttcatcagccgcggagccaatatcaacgcgcaggatcacaaagggaacggggtactatcttatctgattgaaccatatcaattccgagatgagtacttggactttctactgtcccttggagcagatccaaaaatggtaaattacgaaggagactcgttcctgcaccatctcgcagccaattttgcgaccatcagcgaagacacggctcttttagccatgatcaaactcatgaaaatgggcgtctccccgacccttcccaatttccgaggtcggacgcctctgcatatgctatgcagtcaatcttcagactatttattcgcggcaaccgcagaaggaggcaaatatgctatcgacttactcctagatgcgggtctcggtgccgcactaaacttgagtgatcaccagggaattcgacctatccaccttgctaccacggtttcggagcaactggtcggtaaactgctcgcgcgcggggctgatgccacagtttcaacgaaggatggccgcaatttgttgcatattgcgtcaaccgcgcgtcaaagtaactgcgttgggctggtcttggaccactgcaattccaaggagttggattcaatgctcaatacacgatcggaagatgggagaacgccgttgcatgtggcctgtcgctctggaagactggagacagtgaatcttctcctcgcatacggagcagatgtcaacatcgaggacaagcacaaccgtacccctctggatgcatgcgccgagtccattgccgaagaccagctctggcagggggctgacgaccaacagaacatgatgaatacgcgctccgcggcaggtattttggtagatgacaatcaccggccgacgcagcccacatctaatatgaaaaaaacatataaccccaaacgtctgggatggaaaggagaaatcacatctgaaagttcgacgatcggaatcggacaaatcgtacgagcaatggcgtcccacggagctttggcgcatgaaaaatcttttggcgttagtcccatgcattatgcggtagccgagggaaatgaagaaatggtcgtggaattggaccgggtgtcacgagaaatgagcattgaggtgaaggattttagccctctccagacagaattctatctgctgcgctcccagcacctcccagaccttctcgggaaacaattcagggagtatgtttctgaaaccaatgtgctaccaatgatcttgctcggccagcaacaggaggttgcacaggcggtggagaagagtgcttctgttatcgaggataaatctgccatgccagcgctcatgtcctccctcgcgagatggggattttcggagctctttggccggattgggagtacgatgtctggcaattgggtcaacggcggctataccaatttccggggccaaaagtcgaccccatatctcctggcagctggtcagagagaccttcccaacctagatgttattcaggtgatggttgagaagttcaacgcggatgttaacatcagatttgaagcgggtatggttgataaacccactgtacactaccaatcaacgatggcactggatcgacattacaagccgggtgacacgatccttcatcaactggcccaaggcatacattggtggcatgaaggagccatccagtacctcctgaaacatggagcggaccccaatgcccaaaatgatcaaggcaagacgcctctatgcaatgcagttgcacggggagagctgggtggccaccgccagctcaaaatcaccagaatcttgctggagggcggtgccgatcctaacatcactgcggcgtgtggctatacccctctggctatgtcggcgcatgacaccgagttgttccaattactgatcgaacatggagcatacccttcccaggaacaccccatggaactattcgttgcattgtatagtttcaacgaagacgctgtctccgctcttttggacatggacctagactgcaacacgactgtattatccgacgcgcagccacattggcacacccaccgtttccaaaaagttccggcaacgcacgggctcatcttgagtcctcttctctacatctcaatggtaccatttaacgaggccaactcccgcgaccaagcctgcaggatgattaaactactggttgaacgcggggccgatcccttcctgccttgccacgagaaccaaacgattctacacgagatcttcgccagcggaggaattatccaaccatggctcgacatgcccaacctcgacctcgcacgacgcgaccatgcaggaagaactctgctcctggcagcggccagctgtctgactggaaccgactcgtacgcctgcacggtctcggcgtatccattccgaggtggacgccttggcccggcgccctggaaggagggcgaccccacgcgtgcaatggccttgtatgaacgaggagcggatttgagtgcaatagattacgagggaaacaatgtactgcattatctggctgaccttgactgctccaatgatcactttgcgtcgattgaagttcgacggacattggcgttgtttgtggaaaaagccccgcagttggtgcatcggaccaacatgcatgggcagacaccctggtcgatcgccgaggagaagaatttcgtggggtttatggagattttgcagacggataatgtgcacgcggaatgatagtcgcgggtgtcattatctgaaatatgtggctactggggaaggtggtcgggttgtccaatgcaatgtgacagtaacggcccacggcgtacggagtacatcatgcatgttctgtacataatataatttcaaggttcacttctacaatatatacacttagagtgcactgacaagcgaactgcaatgttgtaagaagaatatctgccatttgcagggataccgccttccatattcagaatcaggggtcaatctaaaaatattcaaatgacgtcagcccccactcttgctagccggacctccgcccagggtggtaagcaataccaagcttccctaggtctctcctgcattttcctcgatagctgttaaagatgagccatggatcacaaatgccagggcagttggaggatgagagcaatgacctcactcagaccccgccggagagtggccctctccaaacactgagtccgagaccgccacccaacactcaatggaaggcatcgtcgcggcaagtagaggagactcttgctaagggcctgtccaatgaggacctttggatgttgatccgccgattcgacaaggttggtgtaatctctggttgtcgagaataattgctgacatgtgaccagcaaatctaccatgtgaaagcggttcgtgatactgctgctttgaacttggatctcaatcgcactgaaaatgagaagtttccgccggaaaagctgcgcatgacgcttgagaggttttatatttccgtggttgtcggagtgaccgagttcatccgccatatcactcgcttgcgatcatggaaggaaccagcgagaacgacaatgttctgcacggtatgtggattacgaacagccagattctgtacaagatattaataatttgcagggctacttcgttgcttgggccctggatctcttagttccaaccattatgggtcttgtcgtagctttaataatggttccgcctgttcggctattattattccctgggctggcaagagccgatggcccaaatggaaaaaattcaaaaggaggacaagtacaatccgaagatagcctcacgggtgcccctgaaacccacaagggtgaaaccgctgaacaagaagccaaaaatatggttgacagctttgccactgttgctatggagagtgcggcggccaaatatggtcaaacggttacagacgactcatccgacgggcctgcgctcattgaaagcttagaagctgtagaggctgcagccgaaaccccggccggcgattctcctgaagacaaaaccaagaaacccatgaaaaagaaggtatcacatgcgactgataatgtcatgcgtatgctgagcgatattactgatacgtatgagaaattcgccaagtgagtcaattctggaaggatatatgaacacatactaatggtacaacagcatcctttctccaacacctccgttccttttggttacatctagactccgacttgcgggcatctttaccctggtgtctgttattgtatcattcacatctagttattggatcatcaagataatcggcttcgcacttggactgggtttctttggagacccaatattcacctacacccttgatatgctggacagaaaagtaccaaactggagagaccagctcgatttaaataagtatgatagctctcatttctttctttattacgttgctgactcggctacaggacacttttggctggcgttcccacaaatgcacagctcactttgaccctgcttcgaattggcgaaattaattcttcgccattaccacccgccccgtcatctgatgataacgagccggtatggcccctgcgccgtaaaaagtcacaggcagcgagctctaccgacgtcagtaggcaaggatcatctgtggaccttccgtcgacggtctccaccacatcgctttcagaaaccaaggtgccaaagaagaaattcgtgttcaggctcttcaagttcttccgccgcacaattgccacggcaatcaaggggcatatcgcctttgaccgggctattgccatcgcagggtcagcacataccaagaatctgcttagcatgctgcaaaatgggcactttgcctcaacgcctctggggcccttgaagttcgatgcgaagttcgaacgtaagagaggcgcagcagtcattgactcgtcgaaggagcctcctatcttgtattttaccacatatcaatccgccgggctggatgatttacgcatagaaagtaggaagaagggatctgttctgttccagattcctgtcaccgaaatcaaagagctgaagaagacggagggactagggtggaaggggaaattgatcgttgaattgacggctgggagcaaggaggctgcagatgggttggttgttagcggtgatgagctgggccagtcttatcatcttactggtatgagatcacggaaccaactgttcaatcggttggttgctatggatgctcagttctgggaaagtcgttgatacttctcgtgcataagtgtctagctccgctgtacatactgcaggtctatttagagtttaatgacatattttatgtacttaactacgattctgacttgaaacctcaggtagaactgtggtcgtacggcatggaacgctgtcgtcaaatattttccgcctgaatggccttttttttatcacatcccgagagcttccattttttgagaattattattagagtcctataagaaaaaaagtggtccttcaaggagtaattttgaaatggtgtattcaatctgattagatgagagatttccataggattcataggaacttcggcaactgctgcccttgtaacacagccagaaactcgtctcggtctttgaaccatctcgatatagattagcacagtaggaagagttacgaaaggagaagctacacttaccttcacttgtttgaaaggaaattgacatggcaccctctttgtttttgacaatgggattcttagaactccgagccataacattcatcatgtcaagtgtcgtaccacgcatgtatggaagacgcggaagggtgagtcgggtattctcttttgagcaatcaatgaactccgacggaacagccatagtaagccacttatccggcacggactcatcccaccgtgcggcaagttgaaaagctgttcctcggcgccatagttggatatcggcgctgcgcttggtggacatttggaacccaaagagcgagttacctttcgttgatagggactggatccgccgggaatagaggagttcgtatagaggagagagggagctgaggaatgagcgggctacagggtcgtttccaaactcgatggttgtttcactggtcttcttgtcagagtgggagaatgtgacggggccttctggatggtagagctggtcaacgtgagttgagatgtagtctgtgcagtagatgcgggggaaatggatgctgaacgaggagtggtcgtatatatagtcggcgtcacggtaaatatagtacaaatctgaatatcgccatggtgcacgagttcggaatactagcacggctttgtattgcttgtgctcagtgccagtatcaaccacattgtagataagtccggagctgctgggttgtgaccaggaaaaattcggatggaaattcatctctaggacggctttttcaaaatcttccgcttcttgatgtgagtggaattgtagaccgacaccgatatttggtgctgtctcgtcgtacacataagagtgcaaggggttgtaattgccatcagtcttgtcagatcgcacctggcatgtgtcggaccactgcaagaccacttgacgggacatatttcctcggctgatctgaactgcactgagaggcataaaaagttccatcgttcgtggggccttctcagcagcagaggaagtgatcactatgcgtcggatagaccgccaggcttctctaaaagatcgttccagaatgcgcacctcgcaggatttcaccataacaggcggattcattggtttcatggttggcgtgttcagctgctcgaagatatccaccgaggtcttgaaaataacgctctcggtaaattcggttgaatcaaatggttctctttgccatacggcgtcaaaataagcctttgggatattgatgaactgtgctaggtctctatcaaactggaaggatatcgaaacgctgatattatcaaatttgaatggcacaggttctgagactctagcgccagggaagccagtcaaatatgcatttgataattgtacaaggggcgacagatcatctagtacgactaataacggttagttttataagagggtattatgagaatcgtcacttacagtctcgttcaaggcacagagtgccactttggttgcaaaggacaatctttggctcgctttcaccttcccgtgttgccagcaagagcatgtagggagcacccttggtgcgcatgcgaaaccttttgcccccgatgcaggcgttgacaaaggtgcggtagagaaccttttcctgttcgttacctgcatcctctaggtcgacagcgatccagcgcaaattatccaaaccaagatctagattaatgctgccattccaagtttcctccggctgcatgggctcccaaatgtcaaggttctgggtatgtagatgcgacggttcgggaatgtcgacggaagtatattgggaaagctcctcattaatgccctatattgaattagcgacagattgaagtaatcataccacggcaccgacttcagaaagctcaacaattgacttgcgatcctcgtcaaccaaaagagcaggagagggctcttcctccagaacgatatcgtacagaatatatgaagccttgagcagatcaagataagcttggtgactaggcgatctcgattccatggagggactcagactgccacgggcgcagacatagttatgtctgttgcaattcgccaaagtcgtgcgcgccttgataactgttagtaaatattgcacctatttgttctacacgagctcactttcaacaaccaccaagttgccacgcgcaaccaatctcttgtggctagccttataatctgcaacccgtcattgactgatgccttgaatgttttcaatgtttccgcagttggtctatgcaatttattctgcggctcaaaccgtattggccttgagatatgctcccggtgccgaacatcacgaagatgttgcatagcgggcgtcacagcctcgataatgtgaggagagccatattcatcatcagagtaggatcgagtttgctgtacgacttgctcctccgcctggtcggagttgttcgcccatatcccatcatcgagtgtcccgccgtcaatcgagccgccaaagagaagttgctcactgcgcattcgggtatgatttatgcggcccctagtaggtacaaatggcgacgtgttcaaggttaaccaggaagttggcgaggtatcatcgaggggcgactcatccgattcagttatcgacgatttggaggatgtagacgtatgtttgaccttgctgctactgcccactgagcttctgttattacccaactccaacattttggcgcgaacttcctcgattatatccatttcgcatttttcttcgttgttagctggtagctccacgatgccctggccagggctcatcggcgagacaacggagtctgtatcccgaacaggtgatgccgctgtactgagaacgatctgctcatcttctcccgtcgccagaacaattgttttctctatgcgagcaagcgagggtctagacaaattagaccatgggcctggatctgggacaatcaaagcagacttacttccctatagagctcatatattggctcagattgcaggtgtgtaccgtgatttcggatctgagatcctcaatctgagttcgttgtgtcacccacttgatcttttgccagaaaccctttccatctccagtttcgaagcccttaagccgggaaaggagctcttttagtcgctgtagggtcgcgaagcacgcaccgagggatcgttcaaacgtctgtttgcaattttcatccatcttctcaagaaatgatgccttgaaatccacattgtcaacaaaggtgcgtaaggtgccctgtaaggagcccagctcagtcgctagcttttgaaatcctgcgggggcatctttcgcaatgatctggcattggctgtataggtcccatgtcaccttggcgagggcagggatctcgataactccgagacttgaaggcatccttgacaaaaggaattcacctcgatgagactagatttttttgagagagaacggacacgaagctgtgagaggtgcggctttccgcagtcatgatccacaagactatgtaaacaaaatgtctttcaatggatacgagctgagccaggcagtaaaatataataaagcgtttcccggggacaggccgaacattgcttagccattctagtcacccatgaaagagacagcctcgaatgataacccgccaagcgttccgagctaatatgaagatcgactattcgatggctgctcccaataggtacttattccgagtcagagattggcacggcatatgctttggcaaaccgaatcaatggtatgaatgagtatcggtggggaacgcagacggcctttccaaaatgcatatttctttgacaatgcgccgctaggctctgtgtgtgctgcaaccaaacaaagaagtgcagtaaaagtggcgtcggataaccgaaagctggactgcaactatgcaaacgatctagcagccagaggattatttgattttctcccagattggtgtgttccgtcttgggtaggacatgaagttggacgcatggaagccgtccacttattccctgcagtttgctgtcaaggtagttcaaacgaaatcaaacattgcaatatgcaatcagctgcaaggatattgctttccaatgacaaaggaaatataaatataactcctccgtactctgcgagctctcagagatcgacatctgcgacccactttctgcctgaggcgccaacttttgatcgtcgcgacagctcagcccctaattttttattttcgttcctatcagacacctcatccagctctcaattgattccacaaagcatgaagtacatcggaaagtgttgatttcactaggccgagacatctacaagcttgcctaccattatagagcctcacacgatatccaattaatcaatccaccatggcgtccaccgcgtccttcaccttagacgccacgacagtcctctgtatcgtattctcactttctatgatgccaattgcgtacattttgagcaagacacttgtcccagcccacaggacacgcgatcgtgtcctcttcttctggcacgcctatgatgctctcacccacatcttcatcgaaggctccttcctctacgaatgcttcttcagctataccactgtcactgggaatcaaaacgtggagcccttcttcctcaatgaccccactcgtgtctacggtcccgcctatgggagtggacctgcgtcacgtttgtggcaggaatacgccaaggctgaccgccgctgggctggcgctgatttgactgtcgtctcgctggagttattgaccgtcttcctcggtggtccggctgcgatatacatctgctatctgctgtgccggtcgtcaaatgagaagatcagtgccagatcccggggcggtgttaaggcaacgctgtggctggtttcaacagtgctggctacggcggagttgtatggtggattcatgacctttgcaccggagtggctgacgggaagctcgcagctggctaccgaggatccggtttacctttggctgtacttgttctttttcaacaccctctgggtctttatccctctgtgggtgctgtgggaggcagcgaaggagctacgcggtgcctttgtggcggcggagtcccagaatgagaggaaatctcagtgagctcggtccgagggtgggtgttgtcggaagtctgcatgaacttacgcctgaagcctgttctcttctttttctttttcggaaatcttgatacacatcaggtacaaaatgaggccgaattgtcgccacctttaggattgtgatgaaatagaataagatagattcctattatctcccaagcattaccggctgtctattgataatagtaaagaatattcacgttggcttgttgcatggtacttaggtacctagaatccctgaggtgccattgttgtggaatggaacaaccaccattcaactcaaggttcggcgggcttatggtgcaagtgagcggctttgagatttatcacttcagtctacactctaaccatttgattttagacattcattcccgtgtgggtagagcaaatatgctccaaactacgcattgtccgaatgggcttcgacgctgaacaagcattgtatcgcggcttctctcctaatgcatatcactcaaggtgcatctgcatatatcaaaagcctctgggcctagactgccgatcaaaattttgatattgttccacaagatcagttagtactgtactctgctcgtggtattctcgtcgagagctttggtcccacatcgctctatggtactgcttcactgactgttgaggaccgcagcaaggaccctgatgactttgcacctctgactaggtctatactacgacctagggagcattgcactttcctatttctagctgtgaaccatcactatcagctgatttttgcaatatgggattgcaggtcgggcatacttcactggcccaatcaagggccgtggcttggtccgctcgaattcaaccactcgcatatagtctgtggtagctacaagcactgccttggtccttggaagctagaaggattgtatgcactcggtctatgtacggtggtgatgttggcaagtggttttctccaatgcttctaatgagacatcaagttccgttgtgattgatatagccatcagatcaggttatcgtaaataggaatggaaatattctatttggatttaaaacgaatgacccaacttgataatccatgccatatctgaaataatcatacttgttcctatacgaaagccccattgtcggatgttcaatgtgagtgcaatcaagtttgtacgtcgacgatgtaaacaatcgcaatggcgagtgactgtgttagggtcaggttgcgcaggtgactgacttgacggccattcatctacaccttccatcctccttttcctttactcctgtttatcactccaccatcactttcttttcatcactcctttccatccttttttcccctttctgtcttcaatcacaagtcagatttcaccaagatggcactcttcataccgatgagtcttgtccctctctgttttccaacccctcctaccccaaagacggaattccaaaccctaccagcagaaatcaagcttctcatcattgaccagcttgatcgtgacacctacacactgagccatctagctgcctgcaacagggagctttataacatggcgatccctgcactgtacgccaatgtgtctttgggagctgtccctcattaccggatgtggcccggtttggcatttcccgctgatcgtcgttctgtaacttcctctcttccgggaatcaatgttcgctctctcatgacaaataaacagatcgaacgctttcttataacaatcctccgcaagcctcaccttgcagaattcgtgaaatccctcgacgtgaccgacctacacgacctttgcttcgagcacaggcagagtagtactcagagaagacagcttcttcttaatcctctcgctcctcaagaccatcaaatgattatggacgccgccatgaaattacctttgtattcaacaatcagggtggcgatgcgcaaagcccttggttgcgatgtaccccggtcagatgccatggtagctgttcttctggggtacctgcctgccctaaagcacctcgaaatcgcgatggagagtgaagatccgttccgcgaaccgcaaaccacagagttgaaccttattgaacgtgttctgatcagtatcgccggtgcgcgctcggctcagaccgacgaaaatggcatttcaaatgctcttacacctacgctgtctaagctcacccacctgaaggccgaagtcgacggaaaatcgcccatggctgacattgattggctcatgatgcttcttcgaattcccacgttgacccacgtattcggcaccaaatggtccaacgcacaacggtggctgcgacctgtacctggcagttcccatcgcctcgttcaccttgaacttcgcgactgcacttttgacgccctgaatcttcgaagactgctccgacaaacccacatcttggaaaccttcatctacgaacgcgggtggacagaggcaaaagattgggtcgtgaaggctgcggacctcagccaagcgcttcagtacaggtctcacaccctgacctgtcttgaactatcattcaatcgaaccgatagaaagatccacgaagaattgtatctccatcctctcaacctatcggggctttctcatctgaagagactccggatttcggccggctaccttgtccagactgaaacaaaatcggcacactatgaaggtcgtcactggcggttacatgacgtggatggagcatacaacagaaatcttcctttgcacaagctacttccagagtcacttgaggagctacacatcattcaaattctagatgttctcgaattcatgctcttgtgtgagaagctgtgcgcaagtctccagagcagaatagttcccatgtctctggagcctcaccacttcgaatgcctgaaagagatcaaaatcgaggctccctttgagggcgaaggtgagtgtatcttttcggaactctccagagtcacaaaccaggctggagtgaagttgacaacaatcgaaaactccgccgactatgtcaagtcctggattaccggcaaatcgaaaccatcatgtgccgacaagaagattgactgggggtttgacggcgacgtccgatgggcacgtccttttattcagcgaggagtgacacactagtagctcaggggaatgatcatgatgtattggctagccatgtgatgactatttgcgtgctacgcattaggatgatatgagatataccattcgactccgaattagacggttgtacttgcccttcctaatcctcgactatcgcacctgctatatccgtattttccataataggaaggattaataggaaggagtcgctccttcctaatccattaagtaaggactatataaaactaggtcgtaagaacgcatagatagttttccctttctctctctcctctatacttagaatcctagagtaaatatactcttttcctttagattaaactagcatgttacagtgattatagaactataagcaagtaagtaagcaagtaaatagttaaaccacagcgtagccgctgagccggctgcaggccatttaagtaagcaagtaagtaactaagcctccctggggggtggggggtaggttcaaacgcctaaaggcctatatatcgtatataacctgctaggatgttttgtcaaggaatacaacggtccccttcatgggaaccccttgcccatctccgcggactttggaaaaaggggtagcaaaacgccaaggagaccttaaaggcctcggtcgaatcaagccctcttctcgtgtgtgcgtccggctgaaaaggatcaggctctaataaaagaggcacgaaggattgccgggaaacccgcttttggatgcgatgtccgaacagtcgtctctcttcctcccctcctgaaagcagtcgttgccgcggccttgcctaactgattaaaggtccaaaggcaagtcgcgccgctatcaggattgggcttggacaaccttcatgatgtagacttccctcgtcaacctgctgctccctctcgggattgcatcaacggcatctgccacggtgctgctctacccagacagtctgccctcgacactcacttcggagtgcaccgctgccttgactgtcgacgtcacagtctgtgacccgctggtgagggacctccgcctggatatcttctacccgcccgcgtcactgacgcgcatctgcaccaccggctgctcatctgcccttgagacatggcgatcgtcggtccagtccgtgtgcgggaaccagacggtcacggtcgatcttgaggttgagaccgcggctgtctatattcccggcgcgctgcagtactactttcagcatgcctgcctcaaggacgacgggggccgtttctgcagaccagtcgcggccctggcagcggtgttttcggatcccggcatcagccctttcaactacatcagcaacgtcacaggccagttgctgcccgacgactgcgatacgtgcctggccgaacggctgcggctgcgcgagggatcgccgtatgacgacggtcccatcgcggtcaggatgtcgctgtacaagagcatgacggcgagttgcggcattgcgggacgccccgtcgtaccaacgaccatcggctacttcacggcagcccccgctccgacggccgaggtgtgtgaaggctcgacctacaccatccaggcatcggacgactgctacaccatatccaggagccagggcgtcggcaccaactggctgctggccgacaacaacctggaagtcttttgcaccaacttccctgccgcgggcacctctatctgcattaccaaccagtgcaccactgtcaccgtgcccgtgaatgcgacgtgtgaggccgtggccgcggcggccaacatcaccgaggcgcagctcattgcctgaaaccaggccgtgagtggcgattgcgtgacaaattattggttgggcgaggcgtattatgttggccttagtgcttagataggtagataggagggggtgggataagaattgatcgaagaagttgtcttttgtgcttgttggtgaacagctgtgagcgattgtcgggccttcattgcttgaaattgacatttgaatctgctctattcaaagttaccggccagccgtgttgattcagtacattacctagaaaatttgattctcgtcacagaaagtcctgagggtcttgctccctctcttccacaaactcaagtgctttccacaccatgttgccctccccgtcttgtccgcccacgagatcctcaaacgccctaatgacttcgtcgtccggcctccagtcctcaccgacatgccacgtcacctttcctttcccatctcctccagcagcgggcgcctcatatctcaccccccatcggaacattatcgaaatcccctccacacccgaggaaggaggcacctcatcactcccttcatactcttcggcccgcacattagagggccgccacgtaagccaggtgaatagctcggcgtcttgaagggagggcatattttgccgttgcagagataaggcaaacgctaagagtaaagggttaacgcgctccgcaatagggtgtatacgaaacatgtcgggctggcggagatcgtatatgtccggtgcgtcgtcccagtactcgtccttctcctccgacatcagctcgtgcgtctcgtcgtcgttttcctggcccggcgggtagtgctcctctcttgtgatagcgaaacctattgggtagggatcttcccctcgtgggccggaaaagtaccagctgccgtcgggcgcatacggatggaattctatccggaggtaccgcatgcgtatccataacaaagcgtcgctcccagaggggaaaagatcgggggtaataagcgcgcaggtatccagttcctccaggcaacttcctagctcccgcagcccaagagacacagggtctacattattaaactcgttatttatagacgacgacgtaccaataaggtcaggtaactgctccgcttgatccatctcgtcccagcaatacgggtttggcctccagaaccaaagacggaccttggtaagggaggacggcaataagggcatggcttggcgcacaccccgtgcgaactcggcgcggtcgtcgcgccaaggacctgcccagacgcgggaaatgatacgtagtgccttagatgtgaagggaatggggaagtgctccccaagccaggggcagagcagccggcggagctgaggaaggcgggtagcgagatcgaggggggtgcgcatagagacgggtcgcataccaaacggtttcccggtaaacgcctcttcgggtacgatgagcaggtcggtgacgcagttgaggacaggcaggctatccacgttctggacggtgaggcggcgactatggaaggcacggtgcaagcagttgcggtcaccaccccatgcgtcgggatcagactcgattacctggttgccaatgtagatgccgggctgaagacctcgatcagcgtcgatcaaggctggctcgtctggggactgcttggctgccatgtcttcgatctcgtgcagaccgttgaaaaaggcgtgcacttgggctgaaaagtgggcgttgacggcctcgaagtcggcccccggctccctgcacgggagcggcgcgccaggcacgttgaggaggagaggcatttccgcatggagttggcccccgccaaagacaagcgggacgctcccgggctcattgtgggcgcgcatgttttggaggaaggcctggacggtcgcatctttggagggcggcgtgagtacctgaatgtgttgggacgccattgtgaggattgtctcgcaatggtcgcgattggatgattccctagacttaggtgttgggtgatagaggcaacttggaagttgctcgagcagccgcggatgaccagtaaaccaggctccccgacagcaaattaattgagattcacaagacctgttttttttaccgtcccacctcccacaccacttttcctaggcacttgcaatgctcccaagcactctttacatcaacctaccacggtatagggtaggctgttgagggtaaggggcggggtgatcgctttctgccggtttgactgcctatttggatagtagcgatactaggtaccggtgtcgcctaagatatggcgtagtaccggctgccagtgctgctggttaaaactttgatgagaaaaacaaaactagggtccttcatcaaaaaaggagctactcctagatcggaacggacatgctaccagatgatatactggtagctcaggggaatgatcatgatgtattggctagctacggcagcggggtaactagctacagtaaggtcacgtgcacccttccgtgggtaacaaggagcgttgaattccacccgagccgctaagtgtttgaattggagtccggggggaagggggtgggggatgtattgatatggggatcaaacaatgaagtgtatgagaaggttccccttccctttccccttctcacttgaatgtaatgagtacgatgtacgatgtatgtaggaattgaattgactgccttgtggcctgatatgtgcacggaccatttatggccatgatcgacatgatgtaatccatccacatggcccccgggggtagtggacctcggctttaatccaagagatcacgtttgtaacttatgagaatcttgccactgtctgtaattatcatcatttcaattcatatccgaaatacctcactcctgcgcattctgtttgaaacggatattagaggttgaatggcctgatccggctcgtaacaaatcatcaattccccagaagtggatctcgaactcgagtactcgagcaccaacagagccatggccgaatacaaaatatcctacgagtcccaactggtgtgttctaagaacccaatcgcatctatttctcacacatccgcatgtgcatccctatcaggccatactaacatactcacaatcaaggacgtataccacccctcctaccgctacgaagcccatgacccgcgcgactggcaatcagccgctgcccgtggaccagccctcccagccctaggaaatgcaaccgccggtgcagtcggcgcagccatctcgaatgtggtcgtctacccactcaatgtcatcgtcgcccgtctacagacccagaagcagaaggacaccaactcgagcgaaaaatcagaagataataagaataccgacgaaggatataccagcgtggcggacgctgctcgcaaaatatacgcgcaggaaggcatctccgggttctaccccggtctggcgcaggatacttggaagaccgtcgcggattcgttccttttcttccttgcatatagtgcccttcgccagaagaggatagtcgcacgtgtaggtgtagaacgagctgccaagagcaagaatattgttcttccgataatcgacgaacttgccgttgggatattcgctggctcgtttgccaagctgttcaccacaccactgtcaaatatcgtcgcgcgcaagcagacggctgcggcgcgcaagggcgggaatgcgaagaacctgtcaaccagtgacatcgcagctcgcatccgctctgagaagggtatcctaggcttttggtctggatactcggccaccctgatactgactttgaatccgtcgctcacgttcttccttaatgaattcctcaaacggaccttcctaccacgctcgaagcgcgacaaacctcatccggctttgacattccttttggcagccctaagtaaggtcgccgcctcgtcaatcacatatccattctccctcgcgaaaaccagagctcaagtaatgagctcgatctccaagcccaagtccgagtctgcggagaagactcgggcctctgttctcgcctctctcacccccgaaatacttttcacagtcgccaccatcgcccgcacagatggtatatcaggactctacgccggtctccagggtgaagtgctaaaaggcttcttctcgcacggcttcacaatgctcgtgaaagacgccgtgtacgcgtttataatcaagagctactacctcctgctgctgctgggacatcgctatccttcgcccgacgaacttatccagcgtgcccgcgaacaggcggaggagtattctgagatcgcgcgcgaaggagcgcgtgacttagcagagaggacaagggaaggtgccgaggagctgctgaaggctggttctggtggtaacgctgttgatatgacatcaaacttcgcggacgctgctgatgctgcaaggaatgcggatagtggcatcgatgcttcttcgggtctgaaggattcttcggcgatttctgacgaactcaatgagacggctgagctggtcggcgattatgttgaagacgaagcggccgagtggcggaccctttatcattggttttgggagaaggatcgtggaccgcaccgggattgatttggcaaaaatatagtttttgatgtctacatatttcgcattcttgttacgattagtttcttgttcagtgaggtaaacaatacgaaactcaactaaacgtccacttagcagatccccatctcagctggctgaattagttacaggatctctccaagtccaagcaactcatctacctcgccccagaacacaatgaagaagacattgcatttttccacgatctcattaacgaccctataatccaaaccctaagcaccggccgtctcccgcgcccatctcacaaaaagtccgcaagggacttcatcagcagactccaagaccgcattctaggagtagtcatatgtctccctgcacaaaagtcccgcgcagaagcaggaaccgaaaccgacccctcgcttctttcctcggcccaaacttcagatgcaccagtccaaaatccaaactccaagccagtcctaaccggccacttaagcctttccagcttgaccggactagactacgcgcaccatcgcaatgcagtgataggaatctcaactgcggacgggtaccgcgggaaaggatacggcggcgaggcgattaactgggctttgcattgggcttttcagcatggtggtctgcatagggtttctaaaggcgcgttttcgttcaatcataatgctttgaggctttatcggaggcctggatttgtggatgaaggtcgtgagcgggaggctatttattatcggagggcgtggcatgatactgttggtttgtcgatgctagagcatgggtgggaggttttgaggattggggatatggtgctggatcgagctgatcgcgcttgagcgatagtgaaggtttggcttttggtatgttgttgacggtctggttgcttcattttgatcaattcaatatggaagaatttgaagggacatttcttgagatctaacttggaaggattgttatgattggatgatagctgctcaattattcccatttagtagacagtagtttgaagaccattagaccatccatcatcccaaataatactatacaagaaggattgccgtgagaccaaaccccaactacggcggtaccgcaacacgaagatgcgcatcaaccaaatcaaaccaaatccccccaaacccagactccctcgaagccctagccagcttcacaaattcctgcagccgtgccacacacgagatctgaaccgtgaacgaagtcaagcgttccagcaaatcttctccaggcccatatatctcaaacatagccatcgtcaaaggaaacaccaccggcagcgcactagattcctttacattgaccgctgatttggcaaagaacgacaattcagagaatattccatttgcgagtttccacgcggccccatcctcgactcctagcggataccgcagccggtggaggatcaataaggctgctagacggtacacgttcgcttgtgttaccattgcgaggaccgcatgttggccgtagctttcgaatagtccggaaggagtttggggccgccagcgtctgatcgtctgctctagcccatccagtcggtcgtgaagggctgtgtgtgcttcagaaccgacaggaggagcttgtatcttcaaggtattgctgcattcgcagatgtcatagaggtgagggaggagtgtcgcgcaaaggccaagatagcggtcaacgatgacgcgacgctgggggtcgagtcgtattatagggatttcacggtgcactaggcactcgaccgtgtcgatcagaatcggggacatggttatcgtgtccatgatcggggcttgcactagtctggggagccatgctttggtcgacatgagggagctccggacgatagagtgcgctgtactggagtatggcgccgtgagtacgtcgaacacgtacatggtctggcccaggaagagagcgcaagctgcgctgtagtcatttgagatttccacgcttcttagacgctgcaagcccttcgctgccttgaacatatcgggctcgctccggcggataacaggcgacttttggtaattcgacatcagccctaggaaggccaggtatccttcggtcagcaccggggcggataattgcaaaatagcataaacagtcttttgggatcccgggataaaactagatccgaatataaatggcgaatgtatggctgagaattgttccacgtccgtaacagtgcgaagcgcatctgatgttgtttggaagttgacgggggcggcgagtaatttctcaggcgatattaccacgacctcggtactgtcaggggtccaaggttcgtcatctctgggagtcgagctcgaagatgaacatggactagaggaggagtatgagagatggctgtcgttgtccttggacttggcgcgctgtcgcgacacagcagtagaaacccgcaaatccccatgttggacgtctttgggagaagtgtggtgtatcatgcgcttggaatgacgagcagtggagccaatcttcagacgattacatctcatgcatgttggactagtacctgcagcacatgtctctttctctttacttgtattgcagtgggcgcaggccttcgacatgattttagcgcgaatcgagggaaatagcaagagaccagttgtaaaatggtttggagcagttcggtcagtttccagatgtcggcgttgtatgaattcagggaggtgtcacggtaagatccgtcggtttccccgctctccccaggatatccagggctgatcggcgtatggacttcctctttgggtattgcgatcagatctcgtttagggccatgaaagatatggagaatagtaggtcagtagtatctcaccgcttcacaatgtctatgggtgataatttcaccctctgccaaaagtactggttgggttgcgcactgaatccccagccaatggaagcgcagacgcgaacgcggactgaatcacgcgatcagcacatagcttgcaaatataccaaggcctcttgatctcgccggctataaccgagctggagaagaataagccatccattgacgaaataaaaatcacattgttagccgccggttcatccataacaaggtcccgagggtgtttgcggttcgcctacactacctatgccccgaaagggcaacccttcgcatggaccggctaccccagaaggtccccggtctctccataaactccactcacgacttcggcacggtagcatggggccgagaggacaccgactcggggacaatattgacttcagcgtcaacatgcatcagtaacatccagactttctgctcggaaccagatggctttttcaacacctacgaaacgatgcaactcaatctcatcgcggtcttcgaaagatctgggccgcagtcttcactgataatgctgcttccggtggctgaagtgcgcgtcatgacagcccatcaagattcaagcctatttgaagcctagccgtgagcattgatgtcatatttcccccacatttaccaaaacagaagttggtcgcaaaccttgtgggcggattcgccaactccgtacataggggtctggaacagactaggaagtgattcgaagatgtcactcggatatgttgcatcttggctaaacgttgactttgctttgtggatactttcaggtcgtgcatatagttgagttcatgggctgaattggcaagcacagactttggatggaagaacctgggctgtgctgaaaagggaaatcaaagttgcgttgcgggtgactatcctccgcccgcgaccgtacaatgacaccgtcattgattgagcacagtatacattacatgtaactcaagccacctatgcaaactacccaaaccactaattcctacacgatacaaactacgcagaaaccaaaaaagatgactgatagcaaaagttaaattgaacatcatcgggcgaacccaagagtctaccagcaactagttacgaaggacaccaacagtcccatagttacccacgaaaagaaaagactcccaacctcaggggacatagaagaaaagcagtcctaaccaaagcaattccccaaaccccaatccaattaccgcaaaaacaaacaagtagaacccatcacaccgtagcgcattaagtaaggaaagccttcgaccgacacgcactccacacgcagcgagtgtgagtgactgagcagcaagtagctaacaacgaatctaaccaccgaatccgtaaagagtacggccttggcgcttaagagcatagacaacgtcaagcgaagtaacagtcttacgcttagcgtgctcggtgtaggtgacagcatcacggatgacggactccaagaaggacttgagcacgccgcgggtctcctcgtagatcatggcggagatacgcttgacaccgccacggcgggcgagacggcggatggcgggcttggtgattccctggatgttgtcgcgcaagatcttgcggtggcgcttggcgccgcctttgccgaggccttttccgcctttgccgcctgtttttggttgttagttttgtttgggaaggtactaggtttgatatgtggatataagtgtggcgggacgaagggcagggagtatagttgaagggtggttggaggttgtcttaagatgcagggaaggtgggatgcagtttgtgcctgaggcagtaatcacgtgtcgacaggggcatcaccatcaccggttctaatccgggaacatcaccacgacaaggatataacgacaacgagagataaaaaaaagaataatacttacgtccagacatagtttcagataagaagaaataaaagtacttaaaaagtagatgaatcgacgtctgtgtcgtcgataaacgatggggaaaaaaacgcgcttgatgggatggcgttcagagtaaagaggggagaaaataagaaaatcgctaagtggaggggggaaggcagtttaaataagaaagccgattacgcgtgatccggaaagtacgtgttttaggtaagcgagaaattgcattctgcaatccggcggtgattggcgggcggcggggaaagaaaaagagtgttaggaagggtcggtttccagcgcgtctaccaggcatcggcgagcccgcgttttcctgcggcgagcgacattgatactagtcacgtggtgataggagatacgggtggggctgccgaatcaggtatagcctaatcgggaagtatatcgaaagacccacctccagcttttaacgtggctagcattcttatcaagtgctacatagtacatactactatagtaagaatgcttcatgtttccgctatcctacaagctacaagaaaaaggaagttccagtcagtgcgcgtgcatcatgtctcgtatcatttcaaaacaacgtcgcggtgcctatataataggcagtcatgtatcactatcttcgcatcctcatatcccaatcccattccacatccacccagaaacctaggtagaccgtatcgtggaattaaggagtaacaagcggaagaaaaaaaaacaaaacacaaaaaaacgcccgaacaccatgcaataaaaacaaccgatcaaatacaatgcagcgaaatcaaaagcggagacaggcatactaaaaacttttgcgttgaaaaaggaagggccatccagagacgaacagcaaagaatcgaaagatgcctcggaaaagaaatcgtagcgtcatcatgcatagccaagcggcacgcagtaaacaaaaacaaaaacatcgcgagaatgtccgcaccaaacaaagctggacgggcgcgtcgaaaattcgggccgacgactgatggtagcaaaccgacagagaatgataacgaaacgtccgcggtttattatgcatcgcaaagacaaacgctcacatttgctgttggttgaaaccaaaagagcgggtagttgagatgaagtaatcaaagagtcaaaagaaagaatccatcaaagtgcgccgttacgcggtagggtcaaggtagtcgaaatttggtcaacggatttgtccagttccacacatggacaaccaaattcccttcacagagtcgtcaacgatgtttcaaggccggccggaatagccaggttggactctgtcagaacagtctattttactcaccctctaatgactgttggagagtgaggttcattcatgaagttgtggtggaaagagtggcgaaaccccataggggaggttgagggccgcggggaggtgcgcgggctcacagaagcccggggggcctcgacgacaggagaatcgcgaggagcaagagagcgaggagacagaggcggcgagatacaggctggggaagagacatgcttcgcggcctcgcctgcacgagcgttcgagatcgatggttgtgccttcggggtcgatccttgcggagatccatactgtggggggttagttgactatcataagtgatgcgcagttgagaaacttacaaagcagtacttatcaaccagttcctggtacacggaagactcaagctgtggcttgctagataccaaggaggaaggtttctgatccacacgacctccggggcggaagctatcgttcactgcagagccattgcccagctcgaagctgggggttttcttggccggtttgggagtctccggcaccacggcctccccagatttcgcacgggcagtcagagcggtccgatccaggggcgcctttgaccgaatagcagccgataacgacgctccaaagtcgtatcggttgccaaatgcctggcggttcgggttttcacgacgcttggggggtgcgaccgtatcaatatcatccgacggcatgcgagccaagggcgcaccatcggcatcatcgaaaagggatgtgaaagacttcttgtcgttgaacttcttgtcgctaaggtcggggaaatcatagttgggcggcatagactggggtcgaatgttatggatgctggtgaaggatcgactgcgcggaagagcaggttttccgcctgcaggcttatggatcttgggcactttgtggaaatcaatctgatagtttaccgaaccattgttgtcccaatattcctgtccatccacgttgtagcggatgcacatgaacatggtcttggtctccaggttggcctgatcatccaacttcaggtcgaacgaaaagcgatcgaacccgtccgctgcttgctggcggcgaacatcgtggcagtatgccgctgcaacctccgaggtagttctccagtagtccagcgtgaaccgagcggtcacactcttgtggaaagcaagattggccactgcgacatttccgatcagagtgctcttatcagccgacaagaacaatcgctcaaggcgcaccgggcgagtggcagctgatgaggtatccttgggccaattggagagcttgatctcccattcccacgaccgaccgcgcgcatccgaagagtcaaaggggaactcgtgcttgttgtcgtggttttcgactggagacgtttcggtgctgacagccaatggccggtccagctggaggaagtgacggatatgctccaagtgagagtcgaaatgcacagccttcgaatagacgggagtaccgggcatgctagatggtcgtcgtctggccgaagaggggcggagagcaggtcgaaccagctcacctgacttcttacggaccatcaggggcttgcacgacatctcctcgtcactttcgtcgggcgagctagtcaatgccgattcccgagtcaactcccgagtcaactcgatggcggtttcagtggatgatcgagagtgagtgatcttgcgagcttctttggacaatggtaggtgagggagcttggggcgagtggtcggcgcactcgacgagagccgctccggtgtttcagacgaacccattctttccggtgaactctccctccttactttgattgatcgaacagcagcctgcagctcgtcgtacctgacaccgtcgccgcgtcggcgtggtgattcttcatcacttgagtttgggccggactcaggaggggnnnnnnnnnnnnnnnnnnnnnnnnnnnnnnnnnnnnnnnnnnnnnnnnnnnnnnnnnnnnnnnnnnnnnnnnnnnnnnnnnnnnnnnnnnnnnnnnnnnnnnnnnnnnnnnnnnnnnnnnnnnnnnnnnnnnnnnnnnnnnnnnnnnnnnnnnnnnnnnnnnnnnnnnnnnnnnnnnnnnnnnnnnnnnnnnnnnnnnnnnnnnnnnnnnnnnnnnnnnnnnnnnnnnnnnnnnnnnnnnnnnnnnnnnnnnnnnnagaggggggggggggggcccgagccgggggttctggagaggaatgcactgtcggtttggtgttcgaagggttcctccgaggacgagtagcagaatgtggacgagcccgtgtcggggagcgaaccaaacctggccgctctatgggctcggtgggggagtattcaatgtgctgcgcggagagcaacttctttaccggcgcaatgtatggcatccggccgacttgcgtgtctcaacacaagaaggggatgaaaggtagataggaaggactcgggggaggggtccaaatgttcaatcacagtacagtgtctgaagtagcttcgccgtcagtaaggcttcattaaattccgggtttgtggcgacgggaggtcagtggcaaggcaaggcaagaggcgaggaaagccagcacggcattttcatcgaggtatgagatgggatgcagcagggtgacacttgaggaaggtgcccggtgccagtgggggagtccaggttgcaccggtcacacacacagcgactcagggaattgggtagtcaattgcagaaggagagagattatcaataccgtgaagtatgaacatcgagtggcgatgtgatattagccaagggcaagaggagaaggaatttaaaatagtacagagaagagacaagatgtacatataaagaagaaagaaaaggcaagctcccggcacagccgtgatcaggaggtgatttaaaaggtatcttggaagtagataaccttggaagttgtgtatagtggcaaatcaagccattcccactatgactgtgtgagaagataagccgggatggggaaagaaaagatgacgaaagcgacaaaatccggtattatagctttttccgagaaaatgggaaaatcattaaaatcctaaatgaaaaagtggggcgattaaataaaaataattgtgccatccgaccatggaagagaagtcgaaaaaagaattaatattgtcgaggtgcgtctgctttgcatagatatacccaggtcagtgcgtcccgtataggtgggggatatttattttctattttctattatattggtgtctcttgttttgtcttttttggtctttctgatatttttggtcttttgcgtgcttatatatttatttattcgaatattgatttctacctgtcagtgtccattgttagtgtcaatggcctgattataatattcatgattcaggatactagtagaatctacgttcggcttcctatcccctccacttcctatcccttcaattctccgacatgtggtctattcgcacgagcacgttggacgatcatctcgcaagctcactataatgcactgaccatcccccctagtgtcacaattagcggactacagccctcctatactcggcgctaagagggtccatacatgtccaccaactctgcttcaacctgtacgttgtaattgccttgatgcatgtgtatcaccatgactaccattccccatggtccccatgtatctttcaaaatactccatatactgcataactatactccatatactcctattatctatgtaagattccctaccccgatcttcccttatcaattcactagtgccccgtggcccagagattggtcgagatttatggatcggcccagccaaaaccggtttgttccagattctcctagcctgtggcaggtaagaagacgctgcttttctttttgggcttgccgcgcactggtaagggatacattgcgccatgcaagtgctagaagcataatatccactccgccatcccttcgactacaccgtgcatactccgtcgattgtatatatgagattggggctagaaaatacaaagggggtttcaagttccgctgggaactggagttggtgctaccggccgggaggtggctagagcgtagaggcaagtgtctagaatgtcaaatagattgatcatacactgttatcgagatttttctgacacctcccgggaagttatctgcggtggtacgaccgagggctttctttcccgcgacacgaccgtggttgccgatttcattattcgggttttatgtatggaattctacctgacgtgcatacggaggtgtaggtgtgcattggaatctcctaggtggtagtagttgtaccctgtgtgatcgggggagttcggtggagactctaccataccttgcgtgttagggctccgccgagggtgccgtaaaatgccggacccacgagaatggagatatcgagatatggatgtgcgattgttcacgtcgtatgattgccctatgatttcccgattagcgtgctcactgaagaaagcacgaatcaagcccgaatccagaagccaatgccaatgtccgaatgcagacccgaaatcacgacttgcataaataatctaattcgagtggtaattccacgcggctagtccatgatgtcaaggtgcgtttgatagtccccgatgccttggttttgcctacttggcgggagtctggaccccggtcgctcgtgcagcaactgtcttgtactccaggatatttcatacataggaagtatcatgacctctgtattatttgatctttctttccatagaaggttgagtggcatgagaagtacggagtatatgtacgaacatcatcattgacttggctgtgaatctctagggccatatctggtttatcttttgctgtgccccgtttcatcccttcagctcgccatgtctcactaatgaagtgtcatacaacggatttatattgatctccattttattcattttatatcatttctatttcccgttccatttccatgccggagtacggagtacggacatagacgccgcccggaccaacccctttgttagcggcgcagagttttcctcttttgccactccattcaatgaattcccaacaaaacaggtggcttttagatggcgtttggatgccacttgctagtgtgtatgtacttttatgatctcctcggaaatgccagattggcgagcccatggcgcagtgggtactcggctggagtcccgacttcttaactgctcgacaagtctcgaactttcagatctgcatacctgaggttgatctccaggttttcaacccctccttttggacctttggagaacgtctggagtcccgcaaaaccttggaatctatacggagtagcccacgggcgtacccgatcatttcccatatgaacgtctcggtgagcggcaaggtcgcagcattccgagcggcagggcgataacgtctgtttcaccccttgtcgagactcgagaccctgaaaacctgaaaacctccgtgcgcttttgtttttgttttcttttctttctttttcaattgttcccggattcgaacccctcggtcctccgcctcacgggaaacccgcattgtagaaagtcttccaaggttatagcgaagcggtgtatcctgtgctcagaaccttgacatcagagtttggccttggaattttactttatgacggattgcaagcgcttgctaatcgactattgaaaggatcgcccagattcgatctcacctggcacattgcaattcccaactaacttggacctcgcaaatcgacacattcaccggagtgatgtgatccttgcaattcgccatatctcgctggcgacagtcacaaactgcaagtcaccccgagggcgttcgcgtggctgaactctgacttttctgggtccagctgggtcccgtaccgagaatcatatccaacttactgctaagcataagcttcccctgctttgccttggtaaatacgaacgctttgggcagcggcctgtccaggttgaagttgagtacgaagggaattgagtagcatgcattaacgagatgacagaggggcagggcgtttctggagctctacaacatagctaccccgcgtcgatttgatacgtctcgcagctcttgcattgatgcatgcttttgaactcggagttgatgcgaccggggccccatggcgacttgtgttatggtccaggttccccaaggtttcttaccccgcgagctataccccgggattcgcgtcgggcagttatcagtctggatctgccaatgggatatgggatatggctggtacaatgtagaagtagaatctgccagatatcccaaccacagaccaagatgtgtatccctccgatttacctctacagttaaaacgttgtaatcaaccatccaattcatcatgtcacacaacatccacattccaacccgtttcaaccctcatatctcacctccatagcacaagatagagatctcaacgctgattggccgatagctcaagaataagaactcgcacgcaagcaacgcatataggctgctatgtatgcaatgtcgcacgtcacgcaaatcccagccctgcaatgcacagcaccgagcaccacctgaccttctacctttcaacatccctgttctgcagttctcaaggggcatctgtatcccggacgttgtatctcagaaaaaaaaaacgaagtggcaccaccgtacggagcacacagcttgacatccaaccactagcaagacagacaggcgatcaggaacagccgctttagtcgattccgtatacatcggataactaactaggtgggtatacaacgtacatgatgtgtactaactcagttgagtgcagcacggacgttagtcgtgcagatgagatgagatgatagtaacactagaaaagtatacttccaatatactctctctaactaccaactagtctctttcgaatttagcacacacggttggatatcttggctagaccccacgcttatgcatagcatgcgatgggcgattcaaaaaaagggccaaagcaacaccccaagattcgacgaccggccagaacggaggcgctgctgtcagtgcgcgcgcgatcccggagctaactacggagtacgactcgataggccgtggtaatagtggggggagggcgtgaatcgctttagttagtctgcgcgggcgtgcataagacgctgcattagtgcggcgaactaacagcgtctctatgcatgaccgacggggtcagtgcatgttcgctgtttttctgggctgggggagcaggggcgtgggtttatctcagggggtttcaggactttgtttacactttgcgcttgttggatgaggtttttggtggcttgttctggggaaaatgatgtgcaacttgcaggtgtaccccgacgtcgcggggtttttctctctccacatttgctattttcggatatgggtggttggcaattcgtctgacatgtcgggatttgggaggctagtctgatgtcgatgtctgttgagaatgtgctgttgatattgcgattccgtgctctcggctaagttgtcatttgtgaggagtccactatttccagacctaaaaatggatggcaatctcggaacccggatggccagatatgggtagattacataacagtcaagccactcggctatctccaaccgtcataatacgccggggcgacggggattggctgcgtagggcccgttatcattccacgcgggagaggcgttctccgtcgtcagcgttatagaacgcccattttgaatggaataagttctggatttggggattggaccgatatccatctgttcagacgcattccttgcagcttggaatgtttcctctgtagatgcacagagataaggacgcggggtagttggattcagctcgttccctcgggtgggtcaaagggtctgaaggaataatgatcgctgctaggttgatctacattcttccttgtttgctatcgacgattatgcattcaaacgtcattttgtaggccaatcgtttttatccctagcgagacgacatctaagagggaaacagggatattctaccatgtctatcgacccgcctacgtaactggcctttttatataaccagaatcatgtacaacataactaggagtatttaaatatagaatagaagcaccggccaactacgtattcttgtactaaatcgaaccctgggtactttagtttattgctccgaacacactaacaatccatgaatgttctcggattcaacggattcctatcttcggacattgttgtatgcctgcgcccctcaattgcggggtgcatctgccacctcatactgtccgagcgaattctcactttacagctgatagtccgaggtgctgtataccttcccagtaggtaaacagctgacaatgcggagatagggataggatcacgagacaaggtaaacctaccttggaaccctcaactgataacgctagttgacgaatagatcctctgatcttcctgccatccaaggtctcgaagctatactccattcaagccacagcgggcgccagtgacccggccctacaagcggagatccctggacacagaccttccccacacttcgacctctcacgctcacgcaaatgatcacgacatgcatctctcaccgggagatctgaggaaagacagcgtcggcgttaggtttccacgcgaagtcgtatatcaaactccaagacagagaaacacaaattcaaaccccgtgcactcacatgacacatgacacctataatggcaggtgtctagttccgacgttccggcctcgcaacagtgtgctcagactccaagcaaatggcatttcaaagtcaattcttcgcttcctcgcagccaccccctcaccgctacccatgataaccagtcaagccatgggaataatggaaactgctcatgtccgccacaagagaggcgaggtctaaacgacgtctctcgttatccgcctctttttttcccccttttgttgggactcacccccgctcccactttccgtggcgggccaaggactatactacagctcgactgaaactctttcttctcggccggcctggtatgctcaggtactggtgctcggacttgtattgcgttgtcactggaggtacctctatctctgtccatagaccgtgcgtgttgtgcttccatggcgttgagggacgtgtcctgcatctttgccgccactgtgtcggcgaatggggcctttggtcggggagatggtgaagaatagcacagatccctatagtctggtttagaataggtttgtggacttttaagtcaccggtatcgggtgatttgaatttgactctgttgaccgcttgatcttctgtatgcggggaaatggcatatagatttctggctacctgggctgcctggacacaatgcctttgtttagcatatacgcgatagcctttcatgtggaatctcgcggccgagtgatcatctttggaatttgatcaagactgacaccgaggagccacagtttagctgatggtcaattagactcattcctatgcagttgctgatattcttccgctctagcagttctacctaggctacatattattccaattcgaatctcaggagtcaaagggaatcttcaaagaaattgcacggtgcatgcttagatatatgtattctcctgaaacctcagtttgctattttccgcctaaggcccgcaacctccaaagatctcatgatggaatcaccatcttcgatcttccatctaccacattgctatgttttctcaagtttcatcgggtgtgcaaaaactacccgtcgagaaccactctgtaaaagtggcacaagacaaaattctctccaggcagtccagattcaaagtccgaaagagagtcgaagttgaagttgaagttgaagtgttgttggaagtgaaaaggtgaagctgtaagcgggagatcacccattggtggagccaactccatcccacattcacgaaccttggtcctcacctctgtttacttcttgacgggacttttccaaaacccgatgtctcaagttcaaagttccgcgttggcagatcttgagaaagagctggtatgctcggtatgtacttggccatgccaccccttgcatctctaacactctgccccagatttgtaccgagctcctctaccagcccctcactctcctcgactgcctccacaccttctgcggatcctgcgtgaaagaatggttctccgcacaaggatcgcgtcgctcccatgcctcgcctcgatttacctgcccgtcctgtcgcaccgaagtgcgcgacacccgcccaaatgccaccgtcacgaccctgctggacatggtcctgaccgcgcaccccgagcgtgctagagctgcagatgaaaaggcggaaattgctacgaggtacacacaaggcgagtcggtgttcccggcacttccttcgggcggggagagcgcggaggatggcgaggacgatagacgcctgctggaggatgtacgcgagctgagtctacgcgaaagccgggcacaagctaggcgcgaggcccggcgaacgggccagtcttcgcggacgcgcgagaggagcacccatatcgagaggcctgcggaggacgcccggtcaaggcggaggagggatgaggatccaacgcggcagccacgtacgttgcggcccgatgattcggaccgtgcccgacgggttgagcatcaatctagtctgcgatcattattgagtttgtcatctgatgcggagactatggaggaagagattttgcggcaaattctcgaggacggattactggacaatatcaatcttgagaatcttgggccgaggcaggaagaggaactcagtgaacgcatcgcggatgcttaccgtcggaggcatatgcaaaggtcacagtctcgccagcgacaggaacagggaagagaacagcggcaagagcctgacggagctgtgcgaacacattctcggtcccagtccgcccagctgacggaaacaatggcgactcgagaacataatggtagacgcccgccactttccagaccgcatctgttggattcggctcccgcgcggccgagcaccgcgggccatccaagtgcgcgccgaaggacctcgcccgtccgaatgaacccggcgtctgcatcggatgaagctataaggcctgctgctagatcctcgagtgatgtcactacggaccgccacctctctcaggctggacgcttacgatcgggatcatcatccaccaggccgcgacgtgccacagagtcagaacagaacatttctagagcgtgggtggccggaggacgagaacgaagctcttccagaccgaccacgagccaatcagccacgagctttcccacttttagcgctgcgccctctaattcattccgccatacgagtcacaccgatcatacccttccagcattatcttcgccccttgttccagtccggtcagacagacgaacgagaccatcttcgtcccgatcgaatgttcctgcatcccccactgtacaataccccgagccatccatctcctgtgaccgttgcggaaagaacaacatccaatacaacctacacaagacatgcacaagttgtaaggaagggaacttcaacctgtgtctacaatgttaccgcgcgggacgtggctgtcttcgatggagtggatttgatgcctccgcacacacgacctttcaacgaatcatatcgtcgtctactcgacgccctttacaaataaatgactccggccatgacttattgtggttcaaatacctgcggccctccgagactgcccatcaaaccgtgagcggggaaaccaaaatgaccaacgacaacccagcccgccggctacaaagcggtctcttctgtgatacgtgtcaatcgtcgacaaacgattgtttttggaaatgcagccactgcaacgagggagactggggtttctgtaactcctgcgtcaaccaaggacgatgctgcacccacgccttattgcccatccggcgcattaccaatagcccatctccaccagcaccgtcccccacatcaccggctggatcaaataccctcacgtcatccgagatcgagagcttcaaaatcctctcattctcaaccaactgcgatatctgcacatacccaatcccagcctcaaacacccgctaccattgcctggaatgcaatagcggcgactacgacgtctgtacaaactgttacctcaaactcgtggcaacaggcaaaatcaacaaagagaacggacacaacggctggcgccgctgcctcgccggccaccgtatgatagtagtcggcttcgaagaccacgaagaaggccagcgccgcgtcgttgtacgcgatctcgtgggtggccgcgctctgaaagacgagcacgtagcacaatcaaaatcacactcaccaacttccccagcatccggttctccagtcgcatccccagagctaggaaccggtgactggagctggaaagaaggccccgagcgccgtaagaaagcatcccgtctgcgccccggacatgcccccacaaacagtatcaccgggaattattccgatccctcaaatccagcacattccagtgccgcaagtccggttcagggcatcccgcccttccgccggttcccgcctgacggtggtgtcgggctcatcgtccatgccctgtggtcctggtacccggaagaagaagtcgaagacgagcttgtttttccgcgcggcgcgcatattaccgaggcggagaatatcaatgatgattggttctggggatgctatgctggtcggacgggactgtttcctggttcgcatgttgaggttattggtgagattcataggtgaagtgtcttggcttttttcttttgcttttgaacatcacggcagatatgataagcatgacatgcatcgtatcatatctgtttttttttgcgtttcttcgttgcatggttacgatatttatgatgatcggagttatgaatttggatgctgcatgagcgtttccgagcattgcatacatagcatattgttacttgttagattcaacgagccatgggcttttctatgtctataccgtgatattatcgagcgaatatagattctgtgatgtatacctacataccaccacgccaatgagaccgccaaccagtattcccatacagacacgttatttcactactcatattccattcattcctgtagtcttcgttattcctgagaatgtgttggttattcctgtcaagataccagatgcctgtttgttgcggcatcctagctgagttcagtcgtttgtggcctataaatgtgtacataaaaatgaatttatcaatctcttctcctttctaaagcatactaacgatgactacctatccatactacctgctttactttctggcaatacgttagtgaaaccattcgttcctcaccttacattcattcgttggtttaattatctcctagctaattgccttcttctaattctcgaacagtggtccgcggtctcggttacagctgctgctggcgagtttgaccctgtactcagtgctccagggtaattgttgtggcagacacatccagcacctcctcaatctcctctccgccgtcgacggtctaaactacctaaaccagtagatcctatcacagaaggccatctaccagtaaggctgttcttttggaacgcagcattgctcctgtattcctacgactgggtatatagttcgaggatcccgtggggccaaacagcaagtattagtatactatcccgtccaccattcgctcaattaggccgaaggctttagccgggtcaagttgatgctccaccatcccttccgtgcaatcgaggaactactcgagtgagacggtacccgatttccctcattcaccgctacataccagcattgcagccttgtacacactcatccccatgacgtctacgggaaggatttaggcgaggagacagaggagctatttgaggaagaggatacggtccccgccgataaggagaaatacaggccaatagtactagaaagcatcgtaacaatttcacgaaaatagggtcttcctagtatatttgtatagatagagagctctctgtcaccttctacacatataaaccaggaacagccatcgggcaggactcaagcgccggataataagcggtagctaaaggtcatagagacattatcctaccaatccaaaagccgaatggaataagacacgagctacgagttcactgcgaatataagccaggaaacagattcaacctgcttagcctgatcaagatacgccaggaccaaggagtcaaatgaaaccctgacgacatggtgataaaaccttagcggcacaacggccgggacgtgatggtgcgcaagttaaagacccggacgcacttggccagcgtgcgccaccaattcgttcttcaaccggggggtattgtttctctttaatgggttatccaaacttctgtaattgtaactctgattcaacctgtctgttcatgactcctattaataatctcttgtggccatgaaagccaatctcgatatttcggatccaatacagagtataattgggtcataaggcgcgagcttagaccttccatccaccacatccactcgatctgacgaatagatgcgcaccaatgagcaaagataatgagtgcaatcggtgcttcctggcgcagaagatttaaatattcatccgagacatcgagcagccatcggaagatatccgcggtctcgagcctccgcatgatgccaggtcttatagctaggcccaatgttcgggcaagttcatctaaagcctcttggtagatcgaccggagtgatgggtcagccgcgcactccctccatatcatttgctgcaactcccacacatgcggcttgccttgctcaagggcctgtggcgagcgatgggcagcagctaaataagctccattcgtgaagatcggtgccagcctcccggtacgaagatcctcgccgccggtatggataacagtcgttgtccctcggaaaagacgggcccactctgatagattgccgcgctcaaacaggaccaggaaatcgccttcttccgatggcttggcgcaggagaacatgcacgttaaagaggagaaaatgaaaagtgccgagccgttttctcgtgcgagcggtgagacgagcgggatcatctctctcacggcggtgctgtggtgcatctgtgcgtgagcgaggcaggctgcacgtcgagattcgtcggagcgagctagatggagcgcagaaaatgctagcaaggtgtgcaatactggcggcgttgcaaagccgattcgaggtgcttcattgcaccagacagtctgcacagtgggactgcgcgatagtgtgtaacaggttgacgttgtccagtgatgcaacagttccaggtcaaaaacagccaatgtggaagggaatggtcctaatgaggacaggcttggcaagacttgggagacttgtgctagggcacgactttttccagatgtagtgctttctgggccagatagtgacacgggtgactctgctgagttcgccggtgtggaaagcacagttgaggcactggtaaaggaacaaaccaccccgtgcttctcacgatttcggcaatgtggctggttttcgtcacactgatacagaattataagctagagcgcaataggaacattgatgaatctctcaccttgacttttcgctttttgcattgtaggcacccagatcgcgatttccggtgcgaacgccggcctgggggtaatgtggtcatttcaatcactagcaggtactatgaatatatagaccccgcgaggcatctaacatgtattgcaccattgagatggaatataggaggccaatattccgtggttttacgggggcgtctcaaatgctgggggctgcgctagccgaatccggttagcgctataattttggtgggggcgaagcatccatgggtgtattcttagtatggacctcacgatcgtgataattagaaagaagcataattagttatgctgtgtatgagctggaataattcaaaacagtttgaaggacccatatttagagagagagagatttccctgctcaaatgaaagaatattcaagtcacaatcttgaaggtcaccgaaagaaacaaagcagcctacgagaacaataagataacacgccctcaacacagttatacgatttccaaaatgatacttagtaaaagactatcagtattgactatctagatttaagtatatctgtgtgtagatatatatttcgtcgaatgataaaccatttcccaacatgaacttcaaattatttcgagtcaatcaaatcttgaacatctagatcgcagtaatgttgataaccatgcggttttacataatgttgtccgcaaccgtctttgatctagagcctgcggccggacaaaacggtcgaagtcccgttccattacgtagccccgcatctctggtatgctgcacctccttgcatatgtaacgtgtctcgataagacaatccgccctcataacataggtcgagcacggctctccacttggcctgcatgcatgacatcggacgcactgcacagtatcctgtcttgaaccctgataactgaccgctcttcttgctcggtctctttaaatgaccgaatgagcacatacattcgtagcatcaaacccaatatcagcgaatatctggcaagatctcccacagtaagtacttggcactctgagtcgcgctagcgcatactgatcaactcatagatgcctcaaggaactggaagcctgacaagcgacaaaggacgagtccttggtcaatttgaagttgaaggcgctcagtatattttcgtgggcaatttgactggcttcgggcagtctttctcccttcccaatgccgacgtcacctatgagtcagccgaccagttacacaaagaatccgaagaattcgaaaggttgcccgtagaaaaagaccagattgaactcaggctcaagaatggggttgcaatcacaggcggttttgatatgccatttagcgatggcgagatgaagaaagcgatcattgtcggcggtggagggaaatgggtgaagttgtgatttgctgagtcatgacttttgaatgtttgagagaacttgcaatgttggattgaatgaatcagaggataataaatcaaggggttggaagtgaaacgatgtccacttagcatcagtatagtggaccgaggctatcaaacttggcagtaaggcaacaacaatctctttaattagaacccacaaggtcgaaccctgaatacgaaacgtcctccactcgtgaagattggcagacgtcaacaattctagaaagccggcagggctgtgaacgcccccaccttactgcgccacactcgagccgagctgccggcatataaacagcccctcaaccctcagcccggaccatttatgacctgcatacaacgagccgcagtctaccatgtcttaccaacctaaccgtgagtggcatttcaaatacatttctagtcttgacaggagctaactcagtcaatagaagctccgtatggaggatacgcgccccaatacggacagcaaggcccgcctcaggggggctatcagcagccctatggtgcccctcccccgcagggccactatcccccgcctcagcagggacattatcctcccccccagcaaggccactacggtgcgcctcctccgcagggagctccttacggcgcgccacctcctcaaccccacggataccatgcgccgccggcgcaacccccatacggccagcagccacatggctatgcccctccgggccaaccacccgttggttacggcgcaccaccatccggcggcggttttccaccccagggtattccgtcacagccgtctcccggctacatccctggtcaactagcaccaggcgagttccggccccaagcagatgcgcttcgcaaagcaatgaagggcttcggcacagatgagaaggctttgattgcagtcctcgcgccgctcgatccgcttcagatggccgctgtccgcgacacatactccaagcaccttggccgcgatctgttcaaggatgtcaagtctgagaccagcgggtacttcggcgatggcctacttgccgtgctggatggaccgcttatgaatgatgtcgacaacttgcactcggcaatcgatggtgctggcacgaaggagtggttactcaatgagatcctgctcggtcggtccaatgctgatatgaatgctatccggaccgcctatgaaatgcgacacaggcgttcgctttctaaagatgtcgaaggcgatctctctttcaagacgtccactctgttcgccattgtccttcgtgctgctcgccatgaagagtctacccctatcaacccgcaaaccatcgagactgatgttcgctccgtgcaagggaagaacgtcacagaggtttgcgcaatctttgcccaggcctccaatgccgaactccgcgctattagccagactttcgagtcacgctaccatatctctctcgagaagcatattgagaaggcattctcgggtcatatggaagatgccctgctcctgatgctccgcacggccacggatcctgccatgcgtgatgctatcctactcgagcaatccatgagcggcatgggcaccaaggacgagcgccttattatccgtgtagtccgggtccactggaatcgcaatcacaaggagatggttaagcgcgcttaccaacacaagttcgggaagagcttgattgaccgcgtccgtggagagacttctggtgattaccagcgattgatggttgcccttcttgagtagaaggcttttttctttctttttcctttttttattcctgtacatttatgaccttttcctttgttcatgatggttacatttattctgagataccatgatctgacatgaggaatgtgttacgcgagacagatagtgatgtgctacatacagtacgagacgttaaatatattatattctcctttgaccatcttcggaaccattgtatttgcataaatcagattaacggtgtagagacccggatatttacaagttaatagtccacttcgtccgcagcctctctccccaagtttggaacaaaatcggtataggcgccattgccaaagcaaggaatgccagcaaactatttccccacccaaggccaagtttctcgtacatttgcaatccacacagaggaaggagagccccaagcaagcttcgcagaacagtgcaggcagccacagcacttgcagcatgtgcaaggaaagcatctaccagatatgtctgaacacacatcaatataacgatcatcccgaaaccagtaacagcatttccaatctcgggaacgatccaatggaccactttatctgtcgaccatccatagataaagagacccgccgggatggccaatgacccaggtatggtaaggtacaagggaagtcggtcctcggggataggtgtctccttgcgcgcgagtttgagtttgattttgcgatcactcaacgtccccacgtaggcaagaccaattaacattcccaccccgcttcccaggaatgagaggccactggcgctggcagagaacccatactgaccctcaaagacaagtgtgaatgttgtgaagaggatgtagaggaagccgtaaagaacggcaatgtagctggacattaatgccactatcggggacagaatgagcattttagatggacgaatgagactccgcaggaagagctgttttggagggactccggtgtccaaacgagatttatatgccgtatctcctgttgactttcgcagtcgagcagctttccgctcaaggaggattggggcatatgtctcaggcacggcgaaaaagaagacgatcgatgcgactccgccctgaaaatagttagaaatgagacagacccttttaacctggtattatctttcttaccgtgatggaaagaacccaaaacacccatcgccaatttgtagcctccacgaggaacccacccacgacggggccaatgattggaccgaacaggggtcccatggaccaaatagccatcgcctggcctcgtttctctctcggcacaagatctgcaatggtaccactaccacatgtgatggcagcgacacccgcaaacccgtcgagaaatcggaaaaccaccaaggacgccatattgggagcaaccgcactggcgatattgaataccacgaacaggacattgcaaacattgtagacccatgcgcggccactatactcgctgaccggtgcgacaaccagagggccgaaagcgaatcctagcacgtaaaccgagaccacgaaagacgagaggagattagatgttgtaccaaagtcttcgaggacttgtgtgatacccggcgcgaacatcgaagaggcgaggggactagtgttgttaggaccttggtctatactagatatataagtaagtactcacgtcaagaaagtgatgaaagaaaccatcccaataatagtccatttgcgtccagaactccagttcatcggattctcagggtcctcgctggctggctcttcccagaagacatcgtattcggacatatccgccgtgtattcgttggacttctcagctgtcagtacggtagattgcgcttcaagatcagacgattttgtgtccatgtcgagggcaccgtgaagacaaatccacacacatgggctcttgggtgcggcgacgggcctttgaatgatttcaagtctgtcatatgcaagagatgcataattgccaccggactttccatatccgttcgcctatcaaagggtgcgtatactaaattaaatccccacgttttagaccgagggacttcggattcgtatatctcgtggggtccattggctaacgtcggacgatctaaacccggcttcggcttcgggttcggattcgtacgagggtttgacgtggtggctgatgggattcgggttctcattggcgctaggatgaactaattaagcttggccgttatgcttcaagatggcattgttacagaaatatcattatctgcgatcgacgcgtccccgatcaacatggcctacctcggtgggtcaagacctgcacatataaaagtcaagacccccatttcgcatcggactctgagataacctataagtgaacatcgagacagaatgggaatttttttcaacgtgcagcaggtgctgttaacggggctatttacggtatgtcatgcgatgccttttgacttcttttctaatgcgtccaggctatactatatcttgcctctaaagtgatctacaatgtgtattttcaccctttgagccggtttccggggccgttggaacacaaaatatcacgactgccatacgtctaccggtctatccggggaacccttccctttgacatgctggaaatgcatcagcaatacggtaacattgtccgtattgctccggatgagctggccttctcccaccccgatgcctggcaagatattatgggccatcataaagggaaaactgaattttcaaaggcagattggttctaccatgcggtcgaggaccaaccgtcacatgtagtcaacgaaaccagagagcaacatggacgtctccgccgacaaatggctcacggtttctctgaaaaggcaatgcgagagcaggaaccaatgattcgtggttatgctgatatgttgctttaccgattacatgagttttgcgagtctggtagtccggtgattctttctgattggtataactatactactttcgatatcattggagatctggcatttggtgagccatttggctgtcttcagggatcaaaccttgacggatggatcaaggggattttcgacgccggccggcttggaattatcctgcaagctctctctttctatccacttgtgaagcggacgctactatcgatggtgcctgcttcaatgcaagaggcccacgagaaacataagcaactcaccgaacagaagatgatgcgtcggattgaaaaggaagagggtcgacccgacttgattgagggacttctaagaaagagagaggaattggtgagtatttaactaatttccgttcagaatgcaactgaccattgtcagaacctgagcattgaggaactcgttgcaaatgctgaaatcctcattatcggtggttccgagaccacggcttcattattgagcggggtcacttacctcctcctcacgaatcgcactgcctatcagaagttgaaagaggaagtgcgtactgtgttccaaagccaggaagagatcaacctgatctctgttaacatgttgccctacatgcttgcatgtctcgacgaggcaatgcgcatgtatccgcccattgcaaacggtcttccccgtgtatgtcctgaggccggtgcggaagttttgggcgaatatattccagcaaacgtgagtctcattggcgtgaatactacatattgatgtctgctgacggcgttttgaagacttttgtttccattcatcaatgggcactttaccggcgcgaagagtatttcaaagaccccaacacataccacccagagaggttcctgggtgatccatcatttgcagacgatcgtcgagaggtattgcaaccattccatactggaccgagaaattgccttggaaggaagtaagtattgacctagttgaccgcaagtaacaggcgatactaacggtgtcactagtcttgcatatagcgagatgcgtctaatccttgccttgattatcttcaactttgatatggagattgccgatgaagccattgattggattaaacagaggaacttcctgatgtgggaaaagggtccgctgaaggttcatttgactcgggtatagacttatttattagacgcaggaagatagattgaatgatgaatccctatttggcaagtgatactcagtcaggtgatcttctggataccccctccctctacttctgctctctctctcacactatccagcattcttcaactatactcctaaccctcccacgcatagcataaaattaggcttacttctaggagtattaggaaaagcacggatctaacttacatataaacactgtccctgtcaaatttgttgcttggtgatcagtcattcggttcctctggaattttgtcatcttcttacgcgcttcctatgcatctttctatcgccccgaatttcaccatcaacaacactgcacagatcgggatacatcctcttgctagttctgctatacattttcctagcgatcttcttataggtcgtcacttacgtaccactcccgagtcccaacttcctaagccgattagagaagtacactcggccacctgctcaattccccctatacagaaactatacgcgaatacttcaacgaggcctaccgaatcgagcagggtctgcccgtaaggggactcacctggtctcagggtcgaagtgttctagggcgatgaaacgatgaaaataattaaggtaattgattatccatattaagtcctgcttgtacaatggaaatcccacacacctcacctcttcctcttcctctatggcacatatcagtcatagcatcatgcacgccatatcgaaccaaaaaaaacaagtacatagaagcaaaacaaatgaggccctgagcgtaagccacaaagcccatgtcttcaaaacgctcaaaaaaaatcaaatttcgtcaaggcatatatatgggtatttttcagcgtagagtatcagtcaatcatggatctcataaaaaaaaagaaaaaaaacaagcagaagaggaaatgaaaatgaaaatgaagaagagaatcaagaaaaagaagaagaagaagaaaaagtaaaaacatatgtagttccactacacacttgctgtgcgtcgcggaaccagactgggcttctgagcgtacgcaatgaacatacggaacccggtgccacgcttctggcactcgcgaagcaccttccggtcattccaaatactcggaccggtatttccaatcgaggcaataggatcctcgtagcatttcgaataccaccagcgtccgacgcgggcaacgatcttagcgattgactcgtcatttgccggcgagggggaaggatcggagagcaaatcgccgagagagatattcgcgtcatttgagggggttctcgaggcagttttcgtactttggccatcacccgcagttgtgacagatatggtgggtagcgagaatgcagtggaagagggagccattgaaatggagtgtgctgaggagctggagtcggaggatcggagcaccattcctgcgactggaattcggaccatgcagcgacggagactgtcgaagccctgcgcgccgagctcgcgttgtacgctgtcgctggttggtttcaggctgagagatgagtctgagaggcaggtcatttctttgagttggcggatcgctttgcgcgtgtgaggtcccatgttgaccatgtcgcggtctaggaggctcatttctagatatcctcctgtgcggagaacacgtttgcattcttggatgatgttgccttggactgtctcggagcagacagcgggaaatcgtagtaccgcgactgtgaaatagtcctttgggaaggggagagggttgtccagtccggcgtgatacacaatgtggtggttggtaggaggctcccatgcagcggggtggggaggcgccgcggatacaggacgtccacccaggctatatacctcggcatcagggtacgtcaaggaacagtagaaggaccagtcatcatttcccagtccatcaatcacaagaattcgcccttgtcctccggccttgacgtgattatgcgccgggctgaaaagaactcgaccgaatgacagccagcgactagtcatgagcgaagcagaacgcatgttagtccgtgtcactgcatcccactcacgctcggaagatgcggcttcttgttctcggtggaactttggtctgggggaagggacggcagcgagggagttaagaaatgtagactgctgttgacgacgctgatctgtcgaagaaggcttctcggtaagagcggcagcctgttgcgtcttcgcctcatttgagcctctatgtccggcaacgagatcactgtaagacggttgagacgaaggagcggtcgaagattgcaaagcagagacaatctgagaacgacgaagatgaacagagctgccactcgagcggactgaattaccactaggtactgattggggattattggcattactcaattcatcctgaagagccctgcttgccatcgttgcaagctcaaacctgtcctcttcttcggtcttttccgactcctcgggcttcggttgatctggcgacagaacgtggtcaataagatcatcatactcgttccacacctcgtcatcggtcggcggagaacctggaatcgggggcacggctgtaactgcagccagagctccagagctatctgacgaggttgagcctttcttcggcggaaattgaagaaactcataggttgtgaatggcccagcaaggaattccaaagcgctagtctcctcggaagcgctaaaagtcgggttgaacccatggccccagtctgaagattcgcttggaccaatccccaaattcaatggaacattggcgacaagtggagattggtatgagctttctgtcgttggaaccgtgagggaagccgattcggcaacactgaacggacgcgagaatgactgcatggcgggttggtgatttctatcgcgccgcgaaactacctgtggaatccgaccgacagaagccaagcgcggacgttgttcaggtagtatttcaggctccggggccataaggttgcgattgaacatggcagtcctcggtgatgggcgatcatcattttgaaactcaccgtgcatctttggcggagatggcaataaaattgacggctttctttttctgatgctcaagcctcttgggatttccacgggctggaaaaccttttcctcctctgttggtggtgagtcttcgatgttgttgatgatttcctcgagctcgtctgaatcagcatccaccaaggcgtaatgggccacgggccgacggttgagaacaggggagattgccgcatgaagtctcgcagtttgggatgaggtcgctggaggaattgagtccttctgttcgttggcacggttcttctggaagaagttccacacggatgtctttccttttttggagtgttgcttctcaacctgctcgggcttagggatttgttcagcgggcgtttgcgtacgcttcggttgctgtgaggtggcactgcttggctcatggctagggagcgacgtgtttgtgatagcagcctgggggttctcaaacatgccatgtctctttcctcttggaacgggcatgcgtgaccttgatgcgtttgaacgatcactcgcgttagattgggattcggagcccctacttcccattgatctggcgccattagaataacttggcgtaatggtctcaccaaatgcccccgaagtcgcgagggattcggtagactggctagtcgagtatgatagcagagtttgccgcggcaagttcgaagtggacgcaacgcttatgctgctgaagctctgctcgctttgtgttcgtgacaacgatgagccgtctagtccaccaccgttgataatgacgggctccaggcggctcattagaaagtcgtcgatttccaactccgggcgactcgactgactccctttgctggcggcactccgtgtcgtgcttgttgatctggttcttgtcccgctgctgctactaccgcttgctttgcggccgcgctgtccatactttccgtagccctcatgacctgttcccgcagctggacctttgcgagtagtagctcgaccttgctccgccaaattctctgacatatccggcttggacttctttgtgaacagaccgaaccgtttttgagttggaatttgctttgaatccggcttctctttgggcatctccttggtcagtgtccggggtgtctttttcgatagtacgggagatccgccttcccgagaagggacttgagagatgcttcttgattgcagcgagtctatcgatgcaacggcagactggttgggagctgggtgtggctgttgggtcgccataatcttttcgatcgactcgcgtcttgtgtggcccgttgttctaagataccgtaggttgctttgaacaatcggcgatgtttcaagttctaagcgatgcgttccatctctgctcggtcgtggtggagtttgtggtgtctccgcattccgtgagggggaatattccataatctcttgtgggtcaaacaaacgcctctcggcttcctccacttccttccgagcctgttcaacgtcgatatccggagcttttggagggctgaaattgacggatgactttcttggtggcggactgcggggcgggcctcggggaactgtagagggagatttggacgatggtactctctggccattgccggtgccgattgagcttgcgccagaaggctttgtaggaagtacccgtttttgagtcttgagctccggcctttcttgctgggcggttgcacgtgccggtgaaggagagaagacaggcaatcttgtttgcgacgtgctcggttgtctcagacgaccaatctttgtaataccgggggaatatgatgataatgatgttggggtagacccccgactccaaatactgggagattctgagtatcttgtcgaggggctacttgacagtaagaagggagtaggaggcgcgggcaagttttgcgtatcgagggtcgttcgaaggcttgccaactcttccggaccattgaacctagaccccaccgagttaatcgccagattactctcattcttgtggttcggtttgtaagaggaagtcgattgccctaaaagtgaggttgacgaatttccgtgtcctgacacattgttcataacgagagaatgaggctcttgcggaatgacaaggctaagcttctccgagtgcaattgctccacatgtttccctattgtcggtgccctccttcgtagaacattccgtgctcgttttggcgggggcaattgttggccagcaacgaagagcgatgttctgttaatctccgggctcgaaagcgtcgagtgaatcggctgggtgggattcggagaagaggaagcagacactggcgtatttggagatgttgtgctaccaatgctggggcgtggaagcatggacaggcgatttccacgactagtagatcgcttgatagccgacggcgctggtactgggccaataccttcagcatccgagaatgacgagcttctgctcctaggggtgtgattggctggtctcgcaatttgagatctcggaggtcggccataggcaccagcattgggacgcgataagtttgaagaagaaggattgtgtggcatgtgatgggcagaactgtacgacatggcgtacagatgagtgaagttcccggctccaatccaaggacaaatgattaaacggtgagtacatgtacttcgttatagtaaccatcacgccgttataggggtatattgctgtctgatttaatcagctctcttcaatttcgtcaaattcaacgtataagctcacggcatctgagtcacgtcaaacgaaaatatcaatattgatgggcgcctggcgctcgacagtgggggtatagaattaaataaaaaatagaagaaattcgtaaaaaaaaggaaaagggtatctcaaagtcgcacaactaaaaatcaagtgtcaatagatattacaaggatgtcaagaatcataaaaagaaaaccacatggactcacagacgtcagtagataaacgagaaaagtccactgtggatcgaagccttaaagctgcagctgcttcgccacagtctgcagcaatgtggcgttcgatttcagggttgttcaccagcgctggccacgtcagagataaaatccgactgaagcatgtaaaaataaatgtcaaaagattcaagacaggaatttccgagatgccggagatttatgtgactggggttgccgctccaatgtgggggaaaaagccttgaaaccggaatgcccatgtatgtagtaagagcgtagggatctcattggtacgaaagtaatgtgactactgtgataagacgggaagaagtcaagactgcgaagacctggagcctgtcagaaggactagcacgttgcgaaaggtggtgcttctgaagcgacgacggtccccatcgcaaagtcaaaaggaagttctacaaataaccggggcgatcccccagtggccggatcaagaagattgcgcgcacggaagcccacatgaggtaaagaccggtccactcgagggttctcccctagcagggacttgtcgttggctgctttgcttagacggtatgggctcgcggcggcaaacagggtaccgggctagacacaacgtgacagggcagtggtacaatccgtggcgtatgggcttttcgtcatgcatggcttgagcgttaagaaaaaaaccctacaaaccgtgactcgttcgcgatgtcagatcagctgatagactcaagctgagtatctgcacagtcggaactgcacatggatctagcggacaaccccgtattgaccaggctttatcgcgtctccctcgcctcctccacagcacattcggagacgccgaacaagtcaatcctaaataatgaaatgatcgacgcggtgattttgattttcgttctttttaattttggcggtttgcaactccagcctttcccgctattcggagaatttcccaacgtggtttcaagggaccatgcatatgcggatagacgtaagggtggccctaaaatgcttcatattttccgaaacagtcttatatattcccgatccgatatgtctgatatcgtatattactctgagacatacctttccaacggccgtagatatcaatagtttggtacagaggcccgtcccgaacctttcggggaccattccaaggttcaaggatgaaagcaagcgaagagacttaaagttgggtctagcgtctaaacttgtacaactcgaagagccagtgactgtccgtagagagacaatttcgtctatagaccgggttcgatactcgagccgtggagcctcgagactgtggagcccgctagtcactgggctgtgatggcccactgtatcatggagcaatgaacaagccctggacgaaaatcaaatgttagctccaagccactgtctaaaaaaaggccagctgtcggttgtcattcgcggggaggacactgatccaagtggggagggcgttaacttgggcaataagaacagcgaatgatcacgaacgagaaatgagtctgaaatggcgttgaccagtgtgtgttgtatattgcaaatgtgatattgtatgatgtaccgaatactccatacctgatgcatttgatgtcccacaatcacggtctggtccatcctcgtctaatgactggccatagccatgctgcaggaacaagcgactaatgcacccttcagctgacttcgcacagtcaccgggaatttgtacgaagtacggagtagtctccggggaattattcctgcggcaagaaaagttagattgagttttctccgaggtcagtgcttggatgtgggaatggagaggttgagaattcagaagttgagaattctccatacacgtgaatcgccttcatacggacatggctactttcgctctacaaaccagaaaacccacacttgcacattttcattttgagatccacatatattaaaacaaatagaatggaatgattgaccctgaaattgcccggtagcttatcaacacacaaacgccgatgatgaaagaacagatgggaccgaagcccaagtcaaagaccagacaaagcaaatattggaaacattcaagcagcagctgcaaatcgcttcttgcgagcctccatggccgcattatccttctcactccatgacttctgcgcagtgttcgcaccggcattaggcttctttacgccggcattggtcctgttaccaccatcagcgcggtcaccgcggtcaccgcggtcgccacggtcgcggttgcggtttccatccccacgttgacgatttcggttgcgtccagtatcacgtctctttcccccacggccaccctgctcgttgcggttgtcgctgcggttttcgttacgtctcttgcgggagcgctcatcaggaagtgcctggtcgagacggcttaaacccgcagctggagtagtatcagcttcggcacccgtaccgaaccgcttagcgcgttccagctgctttgtagcctccttcaatgctgtgtcgtcatcctcaacaatgccaaacttctgcgcgcgagccttgcgcttctccagctctgcctccagatcggtctggggcagtcctcgcgtgtaatcgacggcaggcttctgttcgaccgcggcttcgggctgagtggctggttcagcaacggcgccggtcgtctcgaccttcaagtcgtcggtggtagcgggattttcgtcgagctgctggttggggacagcaacggggttggaaactgcgccctggccaccagcggcaatcgcagctgcgccggtttctgtggatggctcgataaccgtctctgcaggttcgtcgtcccagtcaatgacgtcctcgggcgcgtcagtcttggctgcggcaggagctgcggcaggagcgtcggatggcttgctctcatcatcttcctggaggcgcgaaaccatgtcggccttctttccagtgtgtgggagagaacgagtcttaaggatctcgaccaactcggcgttggtcttcttgctgtagtcggtggccattttgcgatcggggataggtaggctgcaattggtgggagggagagggtagaagcagaagtgattgtgataatgatcgaatcctgaatattcactgcaaaccaaatcttatacgggataaacaaaggaatgaaagttggagtgctgaaaaaagacgcccagagacgcgatctcacccagtggaggtccccaggtgcaagtacaacaattacataatcgaactagaatgatcccattggccacgtgggcaccacgcaataaagccagatccagacgccgacttgtttatttctcgagattattcttatattcaacaacctatattcttcaaaagagtacgatatccggatctaccgaggcagctagatggtgtggcatccttagaaatctagacgatgtttacgtccacaggttgtacacgatatatatatctagcgatagcataatatcgagggatcggcgctgaatacctatgtggaagtactgaaagctctaggtgaacatacaattgagactcggagctaaggaccaatacaatatgacgcctcttcaatgtacgctcgagctttgcaaaatctattttcattgccagctaggttgcttcatgcagcgatcaatacgccacactgcagaggctgttggagtcgagctggggattcaggcgaaggcaaagagcttgtcgagaatttaacaggcgctttaatccccgaatcagaggctgacagatgtacaacgtacgatgaaccacgacagcttgttgggaatagggatctgcatgcactgcgccacaagagaagcaggctactccgtacatcacacgccacattgtttcctcagacgtcgcatgagctactaccataccgttctagggttgttatcaagatacggagtacaaattagacgaaaagcacacgatagttcaattcgttcaatcgatcaaaggaaggatgaaacagaaacccaaccctgcgaaggatactcccgtgaccagtaaaagttgtgtcggttgttgcaagctcttccgccctcaagtatgtctcaaatttcaacatccttccgctccagtcgctctaggaatcggtcttttatcctgtcgagtcgactcaagatatactgcctgttctgccaccccaacgagagtcgtagaagcttgtcaccactaagatagacacgttgccaatccatagcatccactgctgggaattcatcactgcgtagacagttgtcctcaatgaatcgacgtctccagtagctgttcgggatcattggatgccaattcggaaacactaaaagcagggcgtggatgtcctcgtgattgtccagatgatctgcgatattcaagatgagttctgtcggaagaaacacattcctggtcttgaacctagcttgggatcgtcgggacattggatgtgtgggtatggagggttgtgatcttggctcaaatcccatcttcctctgcatggtgtactcggttgtgtatttggtgatcacgtcgttcaagcaggggtcattcaaaggatctgcgccgcgaaactcaggaggcatatgacttggacgcgcatcatccttggcacgaaatttctgaggatttagatacaagcctgatgttaaattgtccaataacttgaaccattctagccacagagggtatgtacctgttggatcaagcaatggccttgtgacatcgtatggatcacacattgcgtggaggaagatatccatattcttcttgatcaagtcgacgtcgagcattcgagtcatgagcttccagcatcgttcgtgcataggaaatgctactgaatatgttagctccgagacgaagttcggatttggaaaggcgtgttgaccatcgctttggtgattgcacaaaatcatgtcgttctcattatgtgggaggcttatttgatgcgtcggctgaagctcgccaacaccagagagatggaatgaggatacatcgtcgtacatcgtaaagaacactagcacaacgctcaaagttagaacaaatcgttcaacccaggatgttagagaaacacttacaagctcggagcatgcaagaccatgtccacatctcatcgaagtgtacgtcgtccatatctgttgatcttccgtggatccatggaccattcgagaaaccgtcagcgtctttcggtgaattgcgatatatgagctcagcaatatcagtggtcgaaaagctgtaaatattctcattgcatagattgcaggcagtatgttgatgcagattaattggccctggagggatggttgacactggagggagggctagatgtcttcttccccgtcctcgatgtcctcgcagtcttcgacgggatctttgacgggccatgctgcttttatctggatacaagagtatccagagagtgaggctgatacttgataaacacaaaggttccttcacggtgtagaaaggggatgaggaaaacagagatgagataataatgaggatatagattacagggagagagagagatggagagaggtagggagaggccggcagatagaaggatgtcacctgcaaattcctgaggcagttaccttagcttgagcctcttgacagctttgatggaaattgacagattataacaaacaagtatgcagttcttctcctttcaagatttctattattgcgatcctacgacaagttacggtagggcctaggacatgaaggatcccgccaaagacatacatgtgggttttggatactcatcaccaagtactgctagatataagaaagaacctggatacctcgtagcatagttcgagacttcgtattggaaagatggaactaatctaacattgattgtcgtggaatgtctcttgaatcctcatcatggctctaaccaacttcttcctgctgttcatccttcttgaagaaaggccctcgcttgaaataaagccttccaatctgcctgtattcatcctctcccttgtcaagtttcattctgaactccattccgtcggccaggaactcactgaagcagttcaagtaggcgtccgtccactccatccagtctcctaatccttgcatcatcacgagatcgctcgtttgctgctccacttccttgtctggctgggtcacccattcaaacaacttcaggttcgggatcatcatggcccagaaaggaacgtcgggtgggttaagttccccgctaaaagatgggccaggggcgacggcgaggatgaattggattcgctggatattctcatggctgaatactctcttgattgtatcttcgcattttccgtgcaggtagacttcgaacaagttgtcgccataaagtatgtccaagcattcggcgctcatttgtttggaaacatgtaaaatgccagtccagtgaggactggtgttgaggaacttgtcgtcttcgatggacgtgtcgcgcgtagaaaccacaggttcaacaccatagggccgatacattgcgcttgtcactctgatggcgcatttccggggcacgcagaagccaaaaatttccaaacgtagctcgaggggtagcgtgaagagtagagacaacgtggaagcgggagttggttgctcagactggtggtctggtggggtctccattgttgaacttgcaaggcaagtttcaatcgcttcttatgtcttggaaaagtgctgactagagagtttagcatcttgaatcgttggtccagcatgttccagcgtgtacttcatcaaccagatcagatcgcgatcgatctcgagacagatgacacggttttgagggggatatcgaaagatatggtaaatatagcagcaaatggataggtttcataaaagataggaatgatgatagtggtctaattggcagctcggccaagtggatgaatagcttggatgtggtggatggtaaagcaaagctgagttgtaggaagatgagcctgataaatagtaatttgtctgaaaagcaaacgaaccatctcctacggcaactgccttgggaaatcgtcctgcggcgactcaaggctccaacgtccagaggcttccaccgttcttgatgttttgttctaacgatgagcctctcagaaaatccccggtcattcacagcccaacagaatacatatgaactggctgacttggagtagaatctgtcttttctttgaaatacctaaataactgcccgtgctgctccaaacaatcaacgttgccatatggccccagcctaacagaactaggcgttcatcctcgaaagactcatctcattccctccgtgattgtaagacccttaatcacatgcgatatcccttgctttcttgaaacccctatcaacttgtcttgattacagcaatcggactgcacagtgttgtagcaactagggtcaccaagaacgacgccgataaatgcgagccgggtgatcgttataaatcccagtggttgtcactgttgtatccctaaaagtatcatatgatgcaagctgacagctggtcatcataccacagcgaaagtattcggccacaatccctgtccaaaggcattccatccctcttggcgtttcatccacgcatcgaagatgtgaaggtaagtgcgacgaagatgaggtggcagcatacggatattgcttatatcctaggagctgccgaggactgccccaataagccccgagattcctgttgataggccaagagctggtggggaggtgggaatgttgttcttgtttcttctttttagtttgttgtaggccggactgagccatatcggtattggatgcagaacctctgaaccacctgggataactgattgactgagagatatctgatttactaattataatatttcagaaagatttcactttgttttcaagataataaagaatcattgagtcttttatctcatatagccaatttggatatcgtcacaaagccggccctaatgcgggggtaacaagtaggctgtcatagtcgcaaattctgagtctatgaatactatttgtacctcaaatatctttatgtatggcatggattaaggagtttattaagctagcaaatgaaaagtctaggtgcttcacttttgtggtcatttctagcggcagacggtctaataatcagagggagtggtaacttgttggtagaagcctgtttattattgcttaggaaaccaaaagaaggtggaagtcaatacaatatactaagaacctcgtgactgaaataagattctaaacaaacatgtcatcttctccaagcgcccggacaagccgaacagttgatgaaaaggagttcgcgtcgaccgggggtagtgtaagcccagtgacacagtgcaacgaggcgtgtgcaagcacagaggccaagtcgcgaggtccaaatattggaataatcatgacgttctgcaatgcagaactaccagcgattaaactggcaagaacagatactacacttgatctaagccagaggcaaagagagctgaagaagaaagaaaagaagaagaagttctgggggcagggccaccttcttataggtatcctacgggcggtcggtttatgccactattcacaaatgaggcaaacaacgacataggctcacttaatgtaaatggtaacgtgatgataaacacatatgcagatatgcctagatagactatgtaacatatagatgtatgcaggtaggtgcctggtattgtaggaaccaggcttaagacttatactggattcatggatgatataaaagaaacagctcacggaagaagaatcagacgttcactatacacagggcttgtttgaagcagtagaggtaaaaaaaacaggcacacaaaggagaaggacaagacataatagcacaacgccatgggaagaaaacatagagcatttagtacacccaagccagcgtcggaagttccggggtttacagatcacattgaggaaaataggtggttcctcttctctgatttttcccctggcacaggcgaatctaaccatctaagaggatgccatggaaaggttttctttgggtttggtttttcttttttattattgcgttgccaataccgtttaccggtcaacctcaccgaacacaagatccatagtacctagaaggaattcaatgttagactggaataaaagacaacggaataaaagacttaccgataattgcgacagcatcggcaagcaagtgaccacgagacacctgatcgaaaccacccaagtgggcgaaaccaggagcacgaatcttgcagcggtatggccgctcactgccatcactgaccaggaagacagccatctcacccttgggggcctcaatggctgagtaagtctcaccaggaggcacacagtagcccttggtgaaaagaaggaagtggtgaatgagagcctccatgttctccttcatggcagcacggggagggggtgagatcttatagtcctccacgcggaccggaccggcgggcatcttgttcaggcactggtggatgatacggagggactggcggaactcctccatacggcagaggtaacggtcgtagcagtcaccgttgacaccgacgggaacatcaaactcgacctggtcataggcatcgtacggctgcgacttgcggatatcatagggaacacctgatccacggagcatgacaccggtgaaactcatgttaagcgcatcggtagcgttaacaacaccgacaccctgggttctggccttccagatacggttatccgtaagcagctcctcggtttcgtcaatgcggtcaccgaactgagtggcccactggtagatgtcgtccaaaagaccaagggggagatcctgcgacacaccaccggggcgaacgtaggcagcgtggagacgggcaccggacacacgctcgtagaattcctaaagcacccgaggcgtcagtaaataagacctggccgcagaggctttgcagctgaaaactactcaccataagcttctcacgctcctcgaaaccccacaggaaaggagtcagggcaccaacgtccattgcgtgggacaggacggacataaggtggtttaggactcgggtcatctcgccgaacaaggtacggatccacttggcacgctcggggatctcgacgttcaacagcttctcaacggccaaggagaagcactgctcattcgtcatcatggagacatagtccaatcggtcaaagtaaggcagagcctgcatataggttttgtactcaatcaacttctcggtaccacggtgcagcaaaccgacgtggggatcggagcgaatgatctcttcgccattgagttccagaatcaatcggagcacaccgtgagcagcgggatgctgaggaccgaagttgacggtataatgacggatcttgcggtcgatcccttcggccttggattcaaggccagcagcatcggggtgctcgggagcacccttgttggcgacggaggtgaaggtcgggtcggtcggcacaagtcgtgtggcctggtagctagcagcctctgcgtggcggcgaggaacagaggtggctatcgagcgggaacgaggaatggatgtgttgagcgaggaggggcggaggcagagccttttgggcgcattgcccgctaggcgggcgagagaagcggccatggaggatagaagtggaggtccaagagggaaaagaggggagatgatcctcaatccaggcgcattcaatgggtggatatggctcgctacggggtagggaactcactgaaggtctcaacctgggagtcgcattttggctcgtcacgtgaaaagccgccgggtcatcagccgtgcgctggttggcctgaaggggccactatactgtgtgggtaagggctccacactagcctttctttggtttagtgccatgcattgctcacataatcttgcgattatggattacataatatatcattatttgcgcataagaaaggcctcgtttctgcctcaggcgaactagaaaattacttcgagaaatctctcttatcggtgatcgcggattttaccatcaaccttcaccagaccctctacagttgctcaccatggcgcctcttgttccctcgcaggaggagctgcagcgccgccgtgtatgtctccaacaatgattccacgcagctcagaatactaatcgtcccagatcatcggcatcaatgcggaaaccgtcaccaacatcccctctacagattttcctggtcactggcccggagagtcgcatgggtgggcactcgatgaattcaaggaggtatgtattggaacatagttaggaaggtatactctactggatttagtaaatcctgaccatttactccaacagaatttccaagtcgaattccatcgcaatgaccggttcgaggcttccttctcgctgatcggtctcgacgcctcagtcgccaacgctttccgtcgtattcttatggccgaaatccccaccatcgccattgaagactgcttcattcacaacaacacttcagtcattcaagacgaagtgctcgcacaacgactgggcctgatcccgctcaagggttctgtcgagggtatcaactggatgcactggtataagaaggcgtccgaagacggtaccgaggaggaagacggcccctgcgacttcaacaccattgtgctccgtctcgacgtggaatgctacaagaacgaatacgcagacaaggacgagcaggacccccgcaagctgtacaccaacgcccatgtttacgccaaggacctcatgtacatgcctgtcggtcgtcaggaacaattttttgtcggcgacggcgctatcgcacctgtcaacccagacattctgatcgccaagctccgtcccggccagaagatcgagatggaactccactgccaaaagggtattggtgccgatcacgccaagttctcgcctgtggctaccgcttcataccgtctcttgcctgaaattaagatcgagcgtccaatcattggcgaggatgcgaagaagttcgccaagtgcttccctaagggtgtgattggtattgagcccgtcacccctgaagaggccgcgcagcgtggaagtggatacgagggccatgccggcgagcagaaggctgtcgtgaaggatgcgtttaatgatactgtcagcagagagtgtctgcgccacgatgagttcaaggataaggtcaagctgggacgggtgcgtgatcacttcatcttcagcgtggagagcaccggtcaatttgagagtgacatgctcttcctggaggctgtaaaggttatgaagctgaagtgcaaccggtggaagaggggtctgaccgatttgatggcttgatcaatgggtcttttctctgttacaccttactatatgcattctttggcgttggatttttgggctgcctttgcgctgtacatttacgaaaagtcgatcagtgtttcgcctcacgaggtggagtctagatgtgttaattgtcttgaataaaagcccaacagctatcttttgaattctacacatttaactaaggctaatcatcccggtcataagctatctgattgtcgtaattctcacatgagaggcaggataagattggtcttatttaaaatgaagacgaaagcggaatgtggtagtgtaggctggatcgctgacagcgacttcttcgccatcctcgatcaaatcggccagcttttttcccaagtgaggtcgggtcatttcctccagctgaggtgggaagcgctgatagagggtcttctcttcagtacgcatactaggcttcttcaattgggcctcggctctttccccgagactgtcgatgaactcccccagggtcatgttggggtccacatccatcttccgggcaagttctccgcacacgggacagtcgggctttttctccgcctcgaaggtgtaggtgtacactccttcctcgccagcatacatcatgtagttggaaaggaatggattgcagccagtggcgatcttgagcacttctgaagttgtggaggccgcaatgacagcgtttgttgatgcgatagccggaatgatatttttgaccacaccctgggtcatctggaaggtaacaccatggatattgaaatgctgggcacgttcgtaagcggcattgtatatccacgatatgtgttccatgttgtcgctgtcaaaagtatcatctttgcgcttctcttgccatgcgatctggtgcgcccattcaatgcagtgttgaggctggcgcgggatggtggcaatagtgcagagaggaactgctggacgaggtgcgtgcatatccagttggcactcaatgcaagatgagatagagggtagaatgacacgggcttggcccttgaaacctggttgacacatcagtaacatgttcttggctaagcttgatgatataggtgggtaccttcagttccaccatcaacaagtggcttcagactcgtagggtcgtcttcatcgaccatagagatcaatgtggaattgatccagcgtcgagcttcgatactgtccaagccacagatgacaatattgaactgcatgtaatagtcttcatctttatcctggatcttgccgacgtagggcgtgatcttgactccttttactcgcttttgcacaaaagcagcggcaacttcggctttgggctttccgatatccgcctgacgaaacagaaattgccgattgagatttgatatatcaatggtgtctgtcgactgtgagcttctagtcttggtattctgagttgaaacacatacccatgtcgatgacatgaatatctttgaatcccgacagtgcgagattctttaagatctcgcatcctaggccaccagctccgctagatttcagtcagtccctcatcttgagaataccacaactttgcgaggttgacaaacatcaccctaagactcacgttagcgaaagtactatccccggagtgaatccacttacaaaattttggcagattccaaagcattaataggctcggggccagggttccagtcgtcatctgtaaaagggccacgtttactcaagacattgtagaggtgcttcctgtggggtattagcgcagatcgaaggtctcaagggtcattcaacgcaccatcgaccttgttgatccacgtagatcggagtttctggggcatctgaggttcccacatccacatccatcttgataggctcctgttatggacaactggtgagagtaaataggcgcagtatcaagtcgcgttacacagattaacgcttgttgaggtggatggcaggcagagtgagcctgatgagagtgatatcaggagcagatccagttcagcttttggtcggatcaccaaagtattcaagttactgataatgaagaggctgagttgacagcatcacttgcgcgtgggctgccttggggtgactatggctgactaatctcaggcccgcctattgtaatcctcaccaacctctctttttccccgaagtgtattcgaatcgataatggaaggccttctgacagcagtgaaaactgtcaagcgagattcagatgaccttgttacacctgctgtcgaatctcagcttgctgatccgccagtaagaaatgacttcgatcctgaacatctatcatcacgtcatatcatagatctacttaaaagcagtcctgatcgtgaacaactgtctgccattttggcagcccttgatcctttcagcaaatccaaaacttcaaaggacttcgacctccgaattgcaagtcccgtcacagcccagattcttcaattattagtcagcatcacgattccagatcattggggatccctagatgcaaaagacagcaaagggaaagacgccaaatctcgagcagcattattgagatgtcttagcagcgtcgcgggtctcggttccttggtggctcagctacgatctttgatcaacgcggcccgtgcttctgcccagcaagccaaaggttcaagcagccaacttgctatccgggatctattggctgtgcttgctgctttgctggagccaaaggactttttagcccgtctttcttctgatatttcagtcatttacgacagcaaaactcgacagcaagtcacctggagagagcttgtatccctcgttgctgccggcaaggttttatcgacagcagccgaggctcttactgttgttgacgagtcaagatcagtatcttcaatctcctgggttggaaatggttcccagtatgcatcatggcttgggcgcaatatttcttatatggtggcacgactagccccagataatgaaagcgactgggcctcagttgctttgttgacagggcgagccttaagccttggatatacaggtgaatataaaatgatggccttatttgaatcccaggctgacgttgtgcagatcagattgtcaaagaaatctactcggatctacttgttcggcagtccttgctggcgcactttggaatattattagaccatctcagacggacggagcagcttgcagttttagaagcgatcttccgtgatgtacaacgaaggtacttttcagatgatctattgggaacagtgggtcagtcaatcactacttcagaacccattaaaggagtggcagctttgatctccgccgtcatctcttcccagccagatttggaaagtcaagttgtggattggctctcaaaatcgcaaggtggctcaataaacacgttgggattacgtcgtgcactattagctacttgcagcaagaacgatagtaagttcacgttgtcgaaggaaacgacaacggaactaaccgcaacagatgtgttgaaggcactgctcatacgcagccttgagcaatttggagacaagttttctatcaaacatgtcccaaatatggtccagaatggtttgtcaacagcccacagtcctctgctcctaaaatattagcctctgacattgaatagcaactgcacaagtgattcttcttgccgctggccacctctatcggctagatcaagcgcaagtgaaagaagtaggccggtcaggagcatatctcaacgcagtctccaatcgactcgccgcgtcctctaacagggcacgatttcttggcatggtcgttggaacaggaatatctgaactcattgaggaaccagacaaagtgctgaaatttgacatagaggaaatgcggaacgaggaagccctttggtattcgcatttgacaaaggtccaagatgaggtcggttcgcctgaatctatcaaaggattgcaagaggtattgccagaaaaaccagaactagtccaccccaagccttcacaaaagccaaaggcacaattctcccgccagcatacaagcaagattgttgcgattgaagaagtcgatgacagtggtgaagaggaagaggaacaggaagatgacgacctcattccgtatgaaaagccagacgacgatgcatacgattctgatgacgatcctacgttggtccaacggaataagccgacagcgcctgtgtaagtacagatcgcctgctgatatggatctcgctaacaaatctaagatacatccgtgatttgatcccatatcttcgagacaacgaaaatgtcgagcgctatcatctcgccatcaccactgccccatccttaattcgacggaagataggattcggaactgaacttgctgagcagatcgaggagctagctctgactatcgtgggtctccaaaatgacaataatcatccgtcattccatgaatctcgcctacagagcatgattgcattgattgtgtccgagcccttaaaaatgggccgctggtttactgccatctacttcgatggagacctttctcaagtccagagatctgctgttcttacagctctgggtctgagtgctcgcgagttagccggtaatggagaggatgatgccaaggcactgcatctcccaactactggcgatacctcattcccatccaagcggctctcgcctgccctagaggcgatgtactcaggagcaaatgagtctcctattgcaatgctcacccgggaaacggcccgcacatccttggaaccgctcgcagccaacgcagcagatacaatgactggccccaatgctctcaaagtgcgcactttctcatctcgtatggaagtcgagaagaaacgccagcagcgtgacaccaagcgccaaaatgctacaatcaaggatctgcacaaggttcttgccgagggtttcttcttcccactgcagggcagatttgaaataatgatgctgcagtcttcgtcgtacgttttacgtccactctcaaaatcatattattaacatcgctccaggtcctccacaccctcatacaacccattcttcatcccccatctccttacactcttcctccaaaccctctccctcattctctctacaacaggtcctcacaccccctttctcccaggcctcacccatgaaactctctccctcctcttatctctacacacatcctcggcatccagcgaaccaaccgtcactgccgcactcctgtcacttttcctcgctgtggtggatctcaatattgcgtctggctcaaatggcgagcagcgtcttgtcaccgaatacgccacccaggtgatcgagctgcgagagtgggcttcccaggtcttcgaccggacgccgccttcggctgcgcgggctgatcctagctcagccgttaccgacccacaggagcagatacgcacccttgctgctggtgttatggtgcggcttggggaggtgatagagcggtatcagggtcggctgatgggtgttcattctggttttaactattaggcagatgacggaactatgtgaacattattgaaaatcccacgaacgagtacagccatcaacgcgccttggtcttttacatttcaaggaagaatgtaaatcgtgttgttccctttcttccgaaaatgacatacatatgtagctatcattatgatcgctgaggcgtagattggcccatttactccgccttgacaaagctacccttctcgatggccgcctccatcatccgatcaccactaatgatgctcgtggtacatataataatcttcctccgtggagcctcttgcgcagcaatgaagcgcaacgcggcgatctcggtgaacgtgataccacccaggaaaaagacatacacggtcttcgtagctgagttaccgctgagcgtttgacgagcccgcacagccttatcatcacccttctgcacgatactgaaagtcgcaccgcgagcactcttgacaacgtcctcgaagccaagccagccaggcgacgttgtattaggggtgttcgaggcggccggcgtacctcccttgatcaaggataccatataggatttttgtagcacacattgaaccaggcggacgctgaggggcgcaaagccactgtacacataagaaatgtcgttcggatccttttcgctgacctcctcgatgacaagacggaggtttttgcgcaggtacccgtagttcgtctttgatcctgcttgtgcaccggatgtagggagcagcattgtcgttgctgaggatctaggctggagaagttccattttctctagcgcccagaatgtgagaaggtgctggtggccgtacgcttgaaggacctgtctcttgaaactttctaggtcgcgggggcggagacccccagacatgcaggactccaggcacaggagccgtagcacagtcttaagtggaacatctcgagctatcagctcttcgattgtctcgtgctggtatgtggagtcggcaccggctgcattgttttgctggacttctaaagttttgcggaaggtttcggagcgggttagtcgcattatctcttctgcgaggttggtatgggttcgaagactctggtgctccagctggtacgttggtaatcggttgacaaactctcgaagctcgcctgtcgttttagccgtgtggcggctctcgtattcattttctaagcggcgagccaccttattcaggatatcgcccacgattgcaaagtttgcatctcgcagttggctgaacaactgatccgaggaatccagctgtatctttcttttcagcccctgcttgacttgctggggtgccttggatgactcggactgtggtgtgggagcaggaccgacaatgcttgtatcaacgtctgcctggttgttcttaataccgacatattcatcaattaagccttcataggtgagctgtgtgagaaggggtgtcccgaagtcgacgtcacggtctatgatgatcaagttctctacgctcgcacttggcaacaggcctcgtgcagagggatcagtcaatccggagctgtcctctgcatcaagttctttcctcatacgcaatagaagatctgctaagcgccgggcattgtccccttttccaacaatgcgtgggaaatagccatggcgctgctggacacccatgagagccttagcagaatggaagatacaccctggatctttgtgctgaataggatggtcagaaaatctctcaaatgttagcaacctatgaacttaccaagtacaagtcttcaaacgactcatccagttctaatgacaagatgtcttgttctagaggcataaaataaagaggaagctcggcgatgttcacgtcgccgatgattcctgcctcctccaagacagaattgctcataagcgtccgtcttggagcgaagaagatggaaaactcatgttcaacatttccattattctgcaagcgtttgatttgttctaagagaaatgtcagctcatcctgatggcactcaatcagagatagcaggaaagggccctaatgaaacaagcttggaaatgttgtaaaatagatatcgatatagggaacatttctccagattacatagagtagaaaagcctctgtataatctgatgatggcccatcatgggcccaaatgaaagagatccaatctgacaagccgacaggggggcaaaagagacaatgtcatacctgccacaattcgaacgtggcgagctttctcgccacgaacaaggaatacaacattgcgttgtgatgagtcgatgtttgcattttccagcaagaagacccggtcgacaccatactcttggagcacggagaacttgacgaatagacccactgggccggccagttcctggcttatcacgaggttcttcttaccccgggcctggagaatagttagcgcatataattgcttcgcttcgctccgcaatcagaatagaagatcaaggaggctgtgctcacgccttcgagtaaagtcaagagatccctccgcgccttgtccctaaaatagtccgcatccgaccccgataaaggagccatttcatccaggcagaggcaatgtcgtgagccaaaaataaacagagacgttgaagtgccactgcgcccgcattgggctagcactgccactgctgatgtaacatgtaactttggtattagtatcgttatcactgcgccatccaccatataactgggtggtaaatttggtacgccccttgtatacatattaccatcaggcggcgttctcgaacatctaactagctcccctgaaggcgtctcatattaattctttcttttgtctcacttcattctctttctccttactttcttgtactcccatttaccctcgatcattttaatcttattcaacaaatctttacagcactatacccccacccacgccatgggtcttttcaagaaatccgatggcgacgatgactccagccgccgagcactctttggctcgcggaagaaggacaagagccccccgaccccctccaacccttacgctcaaccaattccggtagacccatacactaaggccaagattggcgtgggtgttgcccccttacctgccgaccaccccgccgccaacggcggcccccactccatcccccccgacaacaagtacgccgccaacaagtacggaaaccaaggcggctacggcagtgatcgatttggcggacccggcgcaggcgccggaccctcaaccggaggctcgcgatacggaagcggtggttacggaggtctgggtagcagcgatcccaatgaccccgcggctgcagactccgctcgcaacgagcttttcggcggcgccaacagaaaccgggcaccggacaacgcgggcggcccatcaccacccccgtactccgagggtcagaatggtcagaacggtccaggaccgaactacggtggcggcagcaatgagtacagcatggcgaccttccaggatcgacagctgacagctgaagaagaggaggaggaagaggtccaggcgacgaagaacgagatacgcttcgtgaagcagggtgatgtagcatcaacacggaatgcactccgagctgccgcacaggctgaagaaaccggtcgcgccactctcgcccgacttggtgcgcagggcgagtccgtccacgacacagaaaagagtctggacatgacggccatcgaaggtcgcatcgcggaggacaaggcaaaggagcttaagacgctcaacaagagcatgttcgccgtacacgtggcgaacccattcacggcctcgcgacgccggcgcgagcgcgatgagaagatcctcaatacacaccgtgaggatcgtgatgtccgcgacggaacacggtccgaggcgcacgcgagtaatcagcgcatggaccggctgttccgtgatatcgagcgcgatgccgcgaaacagggcaagggcaagaaggcgagtgtcaccgagcgtgccaagtaccaattcgaggcggatagcgaggatgaggcaatggaggacgagattgaacagaacttggatctgctcagtggtgctaccggtcggttgaacggtcttgccaaggccactggcaaggagctggatgagcagaacagacatctggagcgtatcatgggcaaggtgagttttccctctaatcaggtgtgggtatgaagatgagactaactggctatagagcgactttgtcgacgatcagattgccatgaaccgggccaagctggaccggattcgttagtcacgttggttgttcaagacaaaagggctgcgatatgcctggtgctgtcgagctcagtaattttctgcgtacgttctgtccgttgggcatggatcacaaattggcgttaagctggttctgcattatctgccgtggtcatatcagacccggcgactagaatattagttgaacattaaataacataatttcattgattcattctgtacacttgaattgactatggcatagggaagtagccggaccgtgcgctctgtgacgcctttggtatgcaatatgagttggatatatcgtccaatactgccttaaagccttgagaaaccggagaagtcctgatattcagctcctcaaacctcaatcgcaaatccacgaagatcgacatcccaactgcgggggagcgcggggagtacccggagaatgaacctccaccgagccctaaatgtaacgaagtataaaaccgcactcccaccaaaaagcaacattaaccaacaaaccactacatctacaaactacattaaatccagcctacacccccccaccaaacccccatgcctctcccccaaaaaaccgacatcctcataataggcagcggcaacgccggcctcagcgccgcgctctcagccgcgcaaaccaacccaaccctccacataaccgtaatcgacaaaagccccctcacctgggcaggcggcaacacctacttcacagccggcgccttccgcacaacccacaacggcctcccggacctcctcccactagtcaacaacacggacgcaacccaagcatcccgcatcgacataccagtctacacagaacaagacttcaccgccgacctgcaacgcatgaccggcaaccgcaccgaccccgcactatcagcagcgctggtatccgactcgcgcgccgccgtcggctggctagccgccaacggcatccgcttccagctctccttcaaccgccaggcgtatgaagtcaacggccgggtcaagttctggggcggactcgcgctgaaaacacaagatggcgggaagggtttggtagaagatgagctgcgcgcggtcaggaacgccggcgtgggtgtgttcttcgataccgcggccacggggctggtgacggacccgacgagcggtgctgttatcggcgtggaagttgtccacactgacagagctggtgctggcgctgacacacacaggaacaagaacaggagaaccaccatcgctgccgacgcggtgattctcgcagcaggtgggttcgaggctagtccgcagctgcgtgcgcagtggctcgggcccggatgggacggcgcgcgcgtgcgcggcacaccatacaacacaggcgagatgttacaaatagcgcagcgcgatgcgtcagctaaaacagccgggaactggagtggatgtcatagcgtggcgtgggacgcggacgcgccgacggagtcgggcagtagggaggtttcgaacgagtatacgaagagcgggtatccgcttgggattatggtgaatcgggatgggaggcggtttgtggatgaggggtttgatatgcggaactatacgtatgcgatgattgggcggcgggtgttggagcagccaggacaggttgcgtttcaggtttgggatgcgcggacggtggcgtggttgcgggaggaggagtatcggggtgaggtggtgaggcggattgagggggcttcgttggaggagcttgcgaggaagtgtgtggatgttgggcttttggatcctgggcggtttgtgcagtgtgtcaaggagtataatgcttctgttgagggggtgggtgggcagaggaggtgggatccttctgctaaggatgggcttgctactaaggggctggctgttcctaagtcgaattgggctttgccgattgacaagccgcctttcctggctgtcaaggtcacggcgggtatcacgttcacttttggggggttggctgtgaatcctgagaccgcggcggtcacttcggagacgacgggtgatgaggttcctgggttgtattgtgtgggtgagatgcttgggggtatcttctacgataattaccctggtggaagtggattgacttctgggactgtgtttgggcgtcgtgctggtcgagcagcggcggagcgagctgggaagagaagactagaacggctgtgatgccttcgaagatcaagggtttacatatcagcatataactaatgactacaagtccaattaatgttcagaatgtcttctattgattagaatatatgtagtagcgacagtaattgactcgaccaaggccaggcccagccagtatcaaaacaataggaacatgttcttcctatgggtatcatcaccaacaaacctaaaattggaaacccatgcactggaaaggcgatcgaggaaagaaaaaacaatgtaatagctttaagccatgcagaaagcaggcaatggaagattaagaagcgaaaacaagtcagggtatggcctgcagagaataaaaacatcgaatcatcacaagccccatggtatcgagaaaaaagcacaaaggtgacgcccagtctagggaaagaataagaaatcaaatcaaaacaacgcatccagccggaaacctctatggtcataacgtgggtgaaacaaaggaaacatggaaatatgaaagaaaaaaaagaagctctctcttgcctgtcgccctcgaacggaacccattatacccataaatcacagaccgttttggaagggtatggtatgtataagcgtttctctctccgggaaatgtttgtcggaggtgaaatagaaaaagggatgaaaaggtgatccatgctgttgtacaaggagacgagaaagccggaaccgtttggatagacatgccaacacagttggtgcatgctcagacggagaacgagtttgtgaagggtggagattcgctttaggcgcgagggcgtaggagagggagcactcgacagcttccgtggaagatgtagtcgtatgaaagattggcagattactcgtcgtcatcgccagagccgggatccttctcgcccttgtggaccttcttgtgacggcgcaggtttgagacaacggagaagtgccgcccgcagccttcaacatcacacgcgaatgctggaaaatgtcagtatgattcgaatgatttagttctcacggaacaataaaaaaactcacgcttttcgccagtgtggctgtacatatgcgtctggagcgaagatggacgcgtgaaccgcttgtcgcagaccttgcacttgtgctttttctgggtgttggagggcatcttggagctgaactggctcatcatcgattgcgggccagggggagcactaccggccaaaaggctagtgggccggggaagagtgcgcgattcgtatgactcggaagttgtggagctgtagtcggtcacggaggagtcgacggagcccaccgaggcgctgtagtaggggtagttgccgccggaggagatagacgaggcggaggattgggtggaagggaaaccgtatgaatcggccgagcctcgcgtgccgcgaggaccggggccgtagatgttgcgcggagtcagatcctggctgagagcgaccattccgcggctggcgtcgagggcatcaccgaacgtaggggcggaagctgaagcgccaacgcgagcggcgtctctgtggattgtgtaagtctttgcgattccatgtaatgcagactcgaatcaacttacgagtgcgagatacggcggccgtcttgcgcggatgggtgaataggggcgtgggcgtaggcatagctggaaggtgcaaagctgctcattgggggagcgctggtgtaggaaggagcctggtcgaaagttgtgcgcgcaacctcgtgttgcattcccattacctcgggcccataggcggcgctcgcgtagctggacccggtcaccattgacggggcagacacggggatgttgggatagggcatggacatggcggagcggttcacttcctcctgcttgacctggcccagccccatgctggcgccattgcccatggaggtcgcatagactgggggcgtcgaatgcgacgaactgtgtgcccacgggtctgtaaactgtggtggggtgtgatgatagacattgtcgaagctcatgccgccatagggacggttctgattttccataaccatcgtcatagggaatagagtcgcgaatcgatcgcgtgtagaactgtatagagagattgaagatcgagtccaaaaagtaatggaatagagtgatcgtctgtgttgatccggaggtatatgaagacaaagtgataaacccgatgatcaacaattattttatatttttaagggagaaagaaaaagcagaaacagtctggggaaggggatcggcgaagcttatgaaggaatataaggcatgatcccatactccaaagtgccactgacgacgtcccgtcgggggtcgcagatcgctggaaatgataataccggtatttattattttattatttttattttattcgaataatgtttttattgtttaaattgtttataattgtttataatttgagtttttcccattttaaggattttcatgactacaaattcgggatttcttttattttcccctctcgggattggtggacagacctggattagggcacaagtggtccgcaccagttcctcggggggacaattcctctggatattgaccctaagcatactagccctcctatttacgctttgtcaatcagggtctaaaatatattaattgcttaatcaactaggctgaggaatggaagatctaaagaatcggccatcaatgttgacctgggaatgtcccagatgactccggcatcggaacggccatcctacaggaaaataagcataaccagaaatattccctaagcttataatacgaaaaaggagaaaatcatgagacgcaaaaagcagtcggtgacctcagaatcaaagggggtgtagactaggggaatgttcaattggagactagccgtgatgaaggctgtgagtggtcgaactgtgccgtgtctgagagacaaaagcggaaggaaatatattttattgtgtaaaaacaaaacaaaagggactgccaagaaataaactcaccaaggttcgccctgagtccgctgtttcaatgtagcggggcagatcccagtgtcaaagggtatacccgttgccgtgggggttaatatgagtgatatagtgatagttcttgcggaatacctctattcgtggctatcaccgttagttcgagtagcttttatccaaactttgatttcagagacatggcttgagaccaaccactatcgtagaatagagtctccattattggcaagctgcaggatcagaggcacatgttctgattctttggaaataaaaagataaaacggaatggcttaagccatggagggggcctatgacacggcacagagagggtttagcgccaacccgaccttacatagagagaaggcagtatcgaatcactagccgccagcattattgactgtattctaattccatcgagtcagggaatccggcaaaaatgcgatgacgttggactaactcgagctcctgtttcagaagtcaactagttagagtagtcttggttttagttttcgttttagtttgagtatatctagatatatactgtaatccgatggcgcacacgggacagtctacggctacggagtacctcagagcaagtcccaaaacacaacattcatcacaccgtttagtttagtcctcgcagaaaccaccgcatatagatacagatacgaccgtgcaatgagctcgcccagcggtacaccaaaaaaaaaaagcctcctgcaggtagaaggcataagttccaataccaacgctgccattagccgggccatgcgagctgtatcacatagagcccgtcctgaagtccacgcctaaggcacccgggccaacagaaaaccccataacaacctcgtattgggccttgataatcaagagagccacgggctgcaagccatgttttccttttctcctgtattaggactggggcagcgacgtcagaggggcggaacagcgcaacccagtgggaaaacgggtaaacggccgctttggtcatagttggtgggcgccgctcccgcaataggtcgacatatcacaattatcacaatctattgacctttttttttttccccttgtggatttggaaatggaaatggtcatggtcatggcctcgtgcagtggaaccaacagattctcctctttctctccgaccaaattttcctattcaatagtgtgtgccaatacgcaataaataaatttccgatatgggtggtctatggtccccgaggctcggggtttgatgtcacccatagaaagttcaaagaagacatggttgatcactcaaggtacaaggtacaaggtacgaggggggaaacagatcgtcgaccaagagccgaggaagaggctgaagaaaaggcgacataccctagtcctcctccaatcacatagtcctatatccgtctccatcccatgattggcgtttagcccgggggggaggaagccatctagcgtaagaccgaagtacgacgtacatatattggacatcccgtactccgtaaaccacacacattcgaggattgattcaggatcaactgccgctctcccggacgagaggacaaaaacatgttcaaccgtgggctcggcacaacggagatctaaccgggaagcttaggagcagggagccaacacaaagcgaaaaaaggaaaagaataagcgcagttccaacttttcctctctcccagcttctccgcattccagtttccaaccatggcgacgccacgtcctttgccttttcgaaaaacttggagtccctacagaaaccatggaaaccggcaattaaacaacctgtgggccgtgggcaactatccggagttcggtcctcatccgttcacctctgctcagatgcagtatgggggtatccatggatatcgcggatgtgtgcctcgaaggcgaccgtgggtcccgggttactggattaagattggagtcgcgattagctttctaggtatgttgtatcagactacagtttatccccagcactttagcctttggatgcgaataaacatctctccagtctcgccatccttactccgtagtcccgtgtctaggcggtcggggtggacatccccccaaaagagaaaaaaaaaagaaaaaaaagagcgcaattgggcagtcagtcgggtacccaactgccatgtccacattgcaccaagttgaaagcgaaaagtgaaagggggcaaaaaataatacataggttcaggttacttcagcttcaaattgccccattctgaaaaaaaaaagcccagatatggagcccttgaaattaaaagaggcgcgcacttctcggtctcggtcagccaacccaacacaacgcaaaaaaaaagaaaaaacaagcaatgcaacaagatgggctggaggctgggcgtgactcccccttttgtgcatgccgtgtttggtggaccgaacaatctcaccggcagaactccgtctttctctcaacgaacgcccactgtgctggcaaaatgtggcgtttttgagatgctcatttttgaggtcgagagtgggtgggggaagggcccggaggggatgtgagaattagaacgtgtgggcgccaagagatggttttgtgttttggggtggatatagcttggttcgtcccgtatctgtatacgccgtacattggcaatggcgtccagtagttcaactttttgaggaaggtatacctgggccataatattgggccggggtgtgccggcagagctggagaatggggtcggctggtactccatacagacctgcagctctcggagttctataggtttgcactttgtacaggtccaccgctgcagaagggcccctagactagacagacacaggggtggagcatatctaaggtcgtgaacgttggaaacctgtgtgagaggacctgcttcaaggtcttctcgcgatgggccgtcaaggggggaagccttgacggccttgacggccctgaccgctccgacacggctcatattaatgacgcgtcttctgggaccctgagaagtttttttttttctgtcgtgctttcacggttttatctgcttttccgagaaacccgctggaaaattcagaaaagggaaaagggcggtcagagattgagatgtgacagttcaacacaggcagatcggagaaatagcgatatcaacccctggatttcgatctcagttgcccatgtcgagccgcttattacctcctcaaggacggagtacgctgtaatcagatccttatctcgcacgttgacgatccgcctcaatgccgagtgtcaatcaggtacccttggccaacaaaggcctgtcatctgcatggggctccgatcttggcagttcccacacggcagatcgtcatgtccctaattcaaggttgactgatcatcgtctcttttgggtggatatgtttctagtagtgctagtaatgagttaaaactcgataatgaggtaaaattggatagcgagtgaaaattcgaggtaatgagtgatccgatagtatgttcgctagtatattgtatttccccgtcacgctcccaatttctatacatagaactgaaacggtgaaccattcatgtccaaagcgttacatccagtggatctgtggatggcgacagacaatccgggtcaatgggacaacccatatggcatccacagcttagcatccacagctaggcagtccctttaaaaaaaaaaacaaaacttattgaactcggccgcccctgattggacgacacccggtatcccgataccggacccctttaggtttctttccacagtttcacactaatccggattagctcggcccagttgggcctagtgtggcttaattgcatggggtccacattcttacatgtttgctgcagagcctgccagccaatccgcagcgtccattggcaatccaggcccacctgaaaacggcagatagtcgatagccgatcttggcagtcgttgatcgaccaattggatcttcagccccaccaggagctgacgcgtgctcatcccgcgcttttaagccaacgtggttatcgactccttggtataggtcgaacaaagtaggaaggttaaccttggattgcgagacttggaatactcgggtttttttttgcaaccgtgatgagtatctttttgctggcttttctttggatgattctacatcgtaccccatagtcctactgacacaaacccaaagtcaaatgaccctcccccagcaccctccccgcaaagcccgttttggctttcgtccccaaactcgagatccctgcgtgcgatcctggttagactccacatttcccgctaggaacactgccactttcagggtcaacgctaaacaacctgaaacgcgagtggggggattcccatacgtacagtgactccgtaatttatattttatattgtcattcctttccctcctgttcgagagagagatcccaatataaactattcttgcattatcctccgtgatctaagccgcaccgagtaatttgtccctgccactagtctggaccagtacttattctgcgattccttatccattacgtagtggggctggtcgagagaatcggaacatggccggagaacctcggacatggcttgcgactggacggtctttagcgttgtcagcgtgagaccaagtgcgcctctttagcctgaagaaacggacttttgccttaataggcgattaactcgactgtttgatcggacctccccgccaccgaagaagaaactttgggccaagtcccatctctgcggttcttgttggagttccccgagaattgacggtggatattggagaaactgcggtgtgcgctgtagcctttccccattcctggactgttgtatcttatggtacaaatcaagcttgctgtctactccgtactcacatacaaccctacatcagatgcatgaagacaagaagtggggaaatcctctctcttggcctatgtcaccagacatcctaaacactgcaggaataccaagacctgagggaggggccgtagtcttagcataaatcttagtgtaccatagccatagcccgtggcccaaaaaaaaggtaatgccgatccaccaagtgtgtgtatccctagctgtgtgcctcaaccgccgtgatggggcgctgcagggtctccgatcccttgcaagattcagaatgttatagtatagtatagtcatctaattctcacagaacaatcatgtcttagctatgatttacgtagcttgctttttggtttattgtcctagaacagaacaataacaacgttccagcattgttaaaagcttccaatcatccgttgcgcaagtattctcctaatcgaaatgatctactacgttacgcaagtcaatcccgcagatcaacataaccttttttttccttagttatctttcctagtgtactccgtagactccgttctctttcacatgaatccaatctcggtatctcgcatgcttgacagctaaacatagttacttgcactttacatacagcgccggatctcgaggttggattgatgcgcgtaacaggccttccccacctctactatacactgcatgcccatatacatacgctttacgccttccaggtggggtcacctcgggattcattccctgcatgtgctactccgtacctccacgatctaaggatctatgaacctcaaaccgggacccatggtccttgcagctgtggtctctggttctgtgccgtgtccaccgcgctaaaagaggaactgatagcttacccggagatgctacggagtagttacggagtacggaagtactccatcgtgagtatgtaataagaataatcaataaactcacgtcctaaagcgggtagcagaccctggaaatctaaaaaaaagaggattccagaccttcccaggttggaacgtgtgcaaaccatggaaaagggtagaaaggggcgttacacaactgcccccttatcagggtctgtgtgttttctttttgacttcaccgttgtgtactccgtagggagtactacgagtacagtacggagtacatacagggaaatcaaatcccctccattccgcggtggttcagtgtgattggggatggaccctgaattcagggggaggctgtgtagtttgaagctacatactccagtgcttagttcgatatctgatatgttgtactctatacattcacattcgcggtagagaatgagtacgtactcgatttatattgaaggtatagtatacaacatacatatccacttacttccatagattattccagtctatactctatatccataatccatattagaataccacatgcctacatctgtactctgtatgtaacctcgatataaaaagaactaagcatgtacaaacgtaattctaaaatggagattccccacacgagccaagagcttacgcggccacttcctgcgccaagtcccttccacggcaagcttagagccattggcgattacatcgcctgcccctcctttttgattactttgtaactcctccggaccctgcgatgacgacttttctggttctggtttctattttttgtgtggcaaaatggggagagggaaaggggagggggttgcccccatattattctcttagctgaatggcttgctggatgttttgcgtaagtactaagaaatataggtttggacttactgtagttagttagttactcgtagactgtagtacttacgtcggataaatgacgtccttatactccgtaccccagactcagaccctgttgtttggagattagagatcttgttgacatcatcgtcggccttggagcgatccctgcctgatcggcccttgtcaccatgcttggctcgattattctacgtatgttatacaatctatagaaacgatcgactctacagaacggttgtttccgaattagagattaaagtcaattgaaattgtagttcgtatatcggactatgaaggagaaggccgttgaaccttggaatgatcgtacctagatagagatatatatcacctaccggaattacacgagagtaagcagccacaaagtatattttagatatctatcacaaacgcttggaatactatgcagtagtcagttccatttttgaattgatgtccacaaatggaatacagttacacttaggcacctcagcatgaagcaataggaaaggcctccgcttccatgcttgcaacataacttcgcttttacgagtatgtctgcattagggtgcagatatagtttaatagtttagtagataaggtaaaagaggttcccattaatattgcgaagacttaatattccattgcagtacatgagatctgatatccatcagaacgaaagaaaaacaccggctagcaaaaacgcacccataaaaatccgtatgaataatacatgagaaagcagaccatccatttacaacaccatccctagacaatgatggacagttccggtcgctccacgtcgccctccatgtccgggtagtaaggaaccatcgcatcggctgcctggacgtatgcatcgttgtagagtctccagtaaggcatgcggacctttcgagcagggtggaacaagccggcccaaacgtagttcataacgataccagtgccgaccgccatccggacggcttcgatggcttcgatgacccggtcgatgacgtggggactggtctcgaagatgttggggaaaagcaggttcagcagatggaccatggcgtcctcgcaaccaagaccgatcacgccgagtgcgacgtgcttaaccgcgctggcagcggtctgtcggtggacttgatcacgatcgacaagggcatcttctagcagcggcgtgacagcgtagacataatccttgcccatctcgccgatgtactcgaacaagaaggacaaggacttgagcacaccgttttgcacgttgagatccggcacccggtactcgttcatcagcgccgggagcacagtgaacggggcacaagtttcggccacgataccgatggcgacagctgtgcagacacgcgactgacgctcttggactcgcaagttgccgagaagagcggccaggacatcctgaggaccaatggccttggcaatgaaaccgaatgtgttgttggccgcccggcggattcccttcttgtgagccttgagcatatccatcagctcaaagcagatgcgcatccattcgcgggcattcacggactcgggaccacggtcggcaatacgaccaacgagatcaattgtgttttcctgcaccttttcgtgacggttgcgcagaatgggggtaagtcggggaaggaggtcgcgaatgggtggctgcatctgggtgataccgaccacggtgacaatggcacgcaaagcacccaagatggagcccagaacctcggggtattcttcacccaggtattcgtagagcacgataccaagcttgcccatgagtgcttcctcgtcacactgcttcatcaccagcgcaacgcgcgagatcagatcggctgcctgttgtcgaacagtgggggacttgttgttcaggcgccagagaatagtactgacaatctgagggatatatgccttgcatcgcgtgccaagtgcatttaccaccgtgccaaatccattgagaataacaaggtcttcgatgctttgttcctggaaggcgaagaggacaccatcaatgaggcgttcttccagcctctcagagatgtcagcggctccaagcgatgcaatcaatttttcgaccgtttccacagtcatcttgcgatatggctcgctttcatccttcaggttgttgacgacgcgctcgagaatctcgccaacacccactttctggcccagatccactgtggtatcgaccacctggcggtagtttcgtcgatcgagtgccatacgtcgcatccagaagcccttgaagaactctgtcaagacgtgctccttcaagtagccggcagtcacacctggagtgtttgcacattgagaaaccaccttcaatacgaccttcttcatttcctcatctggcgaggcgaattctcgaataaggatctccatgatttgagtggtgtagtagttggcatactcttcatccataagaggaatgatgtagccgacagccttgaggaaggcagagagacccttgccacgctgcttgcgggcacccgtccaaagagggcttaagatgtcatcgaaactttcaataccatatgggttcgcagcctccgccaaagaggccagagatagagcggtgacggtccgaaccttagcttgttcatcactgaggttacctgaaacgcatccaaccagctccttgagatgagggagaatggcgcaacccatgagaatagggatgtgctggacaatcttgacaccggtgtgtcgagcctgccaggacttcttactgcgacagacagcgcggaggaaaggaaggagggcgggaataccgagggcagaggccacaacggcaaaagcgcgtgctgtcgtgtttcgcacatattcatcggcgtggtcaatatcaggacgcatagtactgatcattgtagccagaccggcggccttggcaaggtttgagataatctctcggccttcaacacgggcatagtagtcttgatcaatgagcaatggttcgatgacgaccaagatcttatgaacatagggacgaaccagatcatcaagcttgtagaggattcggtcaatgaccttcaccagcaaatgacgctcctggtcttccagagtcctttccatgagcagggggagaatttgattgaaaagagcaccgggaccaaagtcgcgtgcattgtctgtgatctgacgcagagcagtctttcgcatgggtggggtaccgttcttgatcttgagcagcaatctcatgatcttccgctccttcatttcttcgacagtcatgctggtctcatccccaccctccatcagcttaccgaagtaggccatgtcctccgccttgaagaattgaagttcacccacaccggggatatcagttggaagatcctttcctacagactgaacagtttctggctcttgcatcatgaaccctccgacaccagcgttagaaattggtgctggagtggctaagatcctgcgagactgggttcgaatgggttcatatccgggaggagggtcaaggaccttgtaaccttgggcctcaccgggaagcatgatatcgagctcttcgtcagaccagccaacaacttgaccgggcataccaaccccaaaaccgactgcaggtgtagcggcacctgcttgagatggatgcatgggagtagcgagcccttggttgccaacgggggtagcagctgtgagagatggcgctagatcccatctcgaaggcatggattcgggttcctctttgggagcatcgaaacgcgatcttttctctggttcggtagaagaatcgccccatcggttctttcgctttttttcggtagccaccgcgacggtcgaacccgcctcggcgttctctttgtcctgttccacaagtttcaaggtagcctggtgttctgtgacgtcttcacccttctcgagcttctctgcgatcagctgtttcacgcgctcctcttccctctctacctcacggatggccatgacctcccggtatgtttgactttctccttcaacattcgcatgggcattggcagcaaagggatcggcgcgcgtcggggttagggcgccacggttgaatcggcgcttttggtagtctgtctcgcggtctgcgatccgcgccgccttttcgcggcctagcagaatgtcctcctcctcaacgccagttccttgcgccatctcatcaatctggcctctggtagcagtgtattggccaaccagtctgtgtcctccatccgcatcttccatttcttcatcgacatcaacggcgatcgaggtatcgtagcccgaaaacttctccgctccatcccgttcgtacaaaaaggtgtcgaacgattccgtcagggaggctttggttgagttatcggtgcgctgagcagactggtcaaaggtcttggagccctttttactagcagcagcagcattgcgctcggcttgaagccgtcgaacggcctcgatatcggctacaatgggatcagtatggggccaggctggggagcttgcgaaaacttaccgtcagacatggtgataagatgtaaaagtcgcgaggatatgagtgagcctgttttaccgcagaagggaacaccgcagctacatccggattgaaaaccgctgtaacggtcacaataatggtgattgaggatgctgtgttgctagccgcctcgtgatgaaaaaggtcgtgattgggttgcacgtgattcgacacctttgcttcttggattctaaggttgtctattggaatcacgtgcattgtaacgtaagcatgcctttgaaggcggtcaatgacgttggacatcgatgtgaaaggaatatgaaggaatatggcgaacatcctaacaggagggtatagcagcagcccaaagaggccaaaatgagaggggggatattgcttaagggaaatctcagcccctaaagcatttcacattgccatagcactaactcctttgagctaccactactaatatttgattagaagtcgttgatatttctacctagtagtgccattctgggctgttcactctataatgccttgtgtttgatcaattttaacacttttatgttctgagctgtaaatgtgttgctgcccgattgacactcaaaagttgtggcgctgcgagggcgcttacaattcatttatgtcctacaaccagtgtatcagggacattgaaggtctgcatggcctttgctgttcgtttgtacctgaaactaattgtctattttaggaaaaagcttcacatgatgggaataagaccaagaggctacccgatagccaatgacagatctaggctatagtagctgcttcaaataagcgcctgcaacactccaagcttccgtaatatcacttgattagccttccaaggctgacttatatagtagattggaaaattctaatcatacttaatctattctaaggttttccaacatcaaagcgactgtttgctgccggccggtaaacaacaacggtgctagtgtaactcttagagcgccgtggttacatccttttcattctaaccaacacatgaattaaaatctcatttctcatctctccagcaacctttcaagagaagtggcgttgacaacaaagaagccaatgctagcacagcacaccgttaccccggaattcagatggtatcctcagtcaacagactcggatactttcttagctgtatgcactatatagacaactcataggtgaatggtggtatccatttatatagaatctatcattggtcccctcgaaggcctattgaaccataatccactacgccttgaatgcggtttgccttgctacctgtgcggcaaatcttaaactccgagcatgtcctttgttatatatcagagtagccctgccaaatttttattaaataggatatctctccttgcatgttggtttatccttgcccttataccctggttcctattcacagccccagaactagatttgctcgagcaaattctaccatctttctacatcgtatagatccaaactactcgtccaccatgaaactcctcttagcgctgtcattgctccttgtagcggcaaatgtggaaggacattctggtcttcctcatcctctggctcttgcttcctcattctcccaaatctaccaccaacttgacaagatcaacctggggaattgctctctcacaaacgtatcactctcactgaacacgacaaagccaccgctcccagcaccatccacgaacttgactctcaaatacattgcattgggcagaggaacacagaactatacctgcccatcgaatgcttccaccatcaatcccaaagctacaggggctgccgctacactcttcgatgcctcctgcattgcatcatcgtccttagctctcctccacgaagtccccgcaatcatcagcgccactcctcttgaatctgtcgcgttcatggcagcccttgtagcccagggcacgagaagtaacaatatcattattggccaacattacttcaacgctgatggagaacctgtctttgacatgggactgagtggctccaattcctggattgctggtggtaaattagcagctactccagcgccgaactcaacgtcaggatcctccggtgatgttccgtggcttaagctaggatacaagaaggggaacggcattcaggtaagctcgggttgtccataatcggatttgaagtatacatatctgaccgatttatatataggaagtttaccgagttgtgacatcccagggtgatccaccatctacgtgcgctggtcaaaatagaacgatacaaattgcttatgccgcagaatattggttttacgggtgaatcgttctacatactttcgtgtttgaagctatacggtggacctttgggttttttacgacgatatatacgaccgcgagagcctttctaatatatgtatctagaactgtgtgaaaatacagttcatttgttggaatttcccgaaagacaagcttgccttgggaataaccgatttggccaattacattgatcactaggcaaaatagacatctcatactccgtgctgtggactctactgcttgatttctactatcatgtgcacgcaccaaatgttgtccaaagagaaatggttctcttaatgtcttaatgatcgtattgctaaagaataaaaaagtcctgaacgcccgcaagaaaaccaccattccacgattgagaccacaacgggccagcgccaggatgaatgcagacgcgaagaatcaagaagtacaatgtcaccaggcaacatgtaaagcccgtcgctcaaatctcgggggcggaaaagcattcatgcagaaaatgccgatgtaaacgtctctcccaccaacgcagaaccattcctatttcaaacacaccaaccagctccaacttggcagaagctgggaatttatacattgtcatcttcatagacaaagttgatgtcacggatgcgacggcggttggtggcaatgaactcttggtcaccggcgggtcgctcgttgcgagtgttagcggtaagcatgctctgaaggctcatgcaaacgctctcaacggtctgtactggggaccaaccggcggagcccaggaggtcaaggcagataatgccattgctgtagatatggggatgcattgggattgagcggggtgtaccagtggaggcagcacattggatgaattggacctccgggggttctaaaatgatcatgtgtcaaaactcggaatggtctgatcatctgaaagacgagacaaagacaagaggaatggaatagaccccgagaggaaggtacagacagaggctgctgagaagataaggcttaccaataggatacttgttactgaagacaaatttcaaccgataagtctgatccaggtatagtgggttctggtcaaggatcttgatgtccatctgccattcctccagattgtcgcacttgacgattgtaattcccggtgggacatgctcttgcatctataaggtcaaaggtcaggggaacacgtttataggatggtcaatatgcatgggcgctatggtatgctcccaaaatatgcggggagacaaaggcgataagaccaagaggaaaacggaggaaacggtaccttaatgagctcctatagttcatgaacagagtcagcaagatgtgcattccagcaccattcagattcagggtataatcaccttgctcagacgctttgtcgcgaacattgttgcgatatggtgctgaaagaaaaggtttagatgtttgagctccagtggagaaggaggggcggtgtctcgatttggtggagtagagcggatgtatgacgtcgaggacagaaaatgaagaacttcccaagtgagacgagaatgaactgaagaagcaaaggatatgatagagctaaaaagaagagatactgttaaaggatcacaagggacggtctaaaggcaggtggggagatcatctattgatccacgtgatattgacacctgactatattgggttcatagatgtctttcatacttggtagctctcattttgtcatagacatttcaagttgtatagttatacaacataagcattgagtttgacttcaggccagtttgaaacatcggaagagtgactagtctaaaatatcttaacagttcaatcacacatagttattacatagtcgggcagcaacgcaattacatatatcagaatacagtagcgcccgacatcgacttccatgtcggaagataatagtacaaactggcagggggtcaacgtctccgttttgcacctcggggttgcttctcatcatcgcagctgttccacgccacctcagagccggggggagccgagggggtcgatagcttccataaattaaagacggccttccttccttaactccttcacttttcctgccatggtgggatccttcttctttaagaactccacaaagctatccatcatatgagtcttcatagcatttagctccttccatggctgaatttgactcggcactgtcagccccgtatataccttcatcggatgttctcgcgcctgcagccagagattcgtaagtcccacagactgccgatttagcataggatagagctcgctccagactaggttacccatgatgcgcacctggcccgggtattccaagccttcatcctgggggtcttcactggcagtgccgtctgcactttcatttgtgacagtcttatcgaagtctggatcgacagccaggacaaagccttggaagtcccctttgagaagggctttgtcctttgtgatggaagcgtagaaatcgtcgttgatatatgagtttacgcccatgaaatcgatgagaaggaaaacagatggtgctattttattgttccactcttccgaggaccggatttgttggtagtgtctgtaagcagcattagtctcttgctcatttgaatcctgggatggaaagaataaggccatctaaccttcttgctgctgttaccggatttgctgtgtcaaagcctagttccttgcagtcaaaccaatgcagtttgaggtgtggtttgatctcgtcagcgccctggacgtcatcaccccatgccgacaagtgagcttccaagtctcgctgtagggttgcccactgctcatcggagaacttgtccgctgtgcgatagattgctaatccgaacccatagttgtctctttcccatggttgcaagctcaagctcgcttcctgcgcccgaaggagttgctgaatccagggctgtacaggtggctgcggcgaaggcgccagtccgcgtatcttctcacgcagctcatcctgtaatactgtactaatagaaaggcgctcgcggcgggccccgtcactctgcgtcgcacttggaccttgaacaatcgcagcctcgttctgagcctcgatacatttagtgactcggtctaccaggagcttggaaaacccgtagtttttgtcttggtgctctaggtcaggattgtgtagcccagcgatgatctcggagggcgcagtgtaaccgttgtacccatccatggacatccaaatattgaaatctgccattgaggtaacggcaatgaggtcggtccaccgctgcgcgagaattttcatttccgaggattctgtattttcagctgggatcgcaatcaaactgtccaatgtccgttcacgtaattcggcaacgcgggcgaggacccaggaatgggcggtgctggtcatgacttcgtactgtgcgcgaatatattcttcccagagagcagtaaggttgagctcgggagaaaggccgccttgggccttgcgccgtgcattcaaggcgtcctgaatttctccgaagtcaccagatattttgttgaaggtatcgcgcatattagtccggatctgaggattatttaggtactcaaagacggcaatgacggaggtcaggtattcatgggcgatcgtgaaatggtccgggttgttgagatctttttcgcgccaacgcgatgcggacacaggcgcaaggcctccccagaggcgggttttgacaaagtgaatattctgtccaatatagcacagtccgctcaagtcctccgggcccgtgatccgcatcatcgccttctgcacagttgggagagcggccttgttgaacggcgcaggcgcccactctgaactcggggtcatgaacagtgggaattcatctgaatcgattaaagctaaatcggtcttcttcccgttcggtagaataccatacgttatgaattccataaaattcaagacggcttgcggttcaatcaacgtgtccactgattttggttagcgaagtgacagtgacgcagtaacaagtgggaccataccaactactatgtcctggctcatccaatgtttctctgtaatggtcgatcctctgtaatcggcagcattggaaatggaagcgtttgggctggccgattcaccagaatctgtatgggaatatcgcgcgatattggcctgtgttacgcggcaggcccaaggcgcgaggttccgagcattgcgacgtgtcaccaagccagcacgggcactggtgttcgcaacgcgaggtgtcgtgcgggaagataacctagcgaaaacacggcgattaacctgaggcaggcttcgggaaagtctggtcgccatgatgcgttggatggatgtgatctgcagggtgcaggtaaatggcgatctgagcagataagcttgggctccaggggtaaaatcctcttttttcagccgcaacggaaatactaggtatagaagactgaatttggtgctaaatttttatgtctagtatactaaggatctgaaagtggttttatctagaaagtaaataccaccgtcgagcggttattttggatcaggatacctacatagcattgaagatcatgtgattagggtttgaatgagcatctgtatcgccataggatttgcattcagttcctttacaaaaccatcatacattggaaattcacgtagctgagcaatttggttcgggaaaaatgctcacaatagttgtctctagtgggcagatagtgaccaaggtctccgcattgagagagtgcattcgaactaaattattaagtacagagagggaataggaaaagaaagagagatcgaggatcaagaccgtgggttttgcaatgcgctcgcttgcacacttgggaaggagcatctcgcaagggaggaactaacgaccactcagaccgtaacacgggacatcatcttaaaagccttccaaacgattctgcttgataatatcctcaatatgcaaatcacgtagacgaaactcaactcccgcagccgaacataacaacccaagttccacattgaagttcgcaaagtggtccaacaaggcaggtataggacggggtttggtgttagactcctcagttgactgcatgacatgcatccagtctcccttgacctctaaataagtcaggtttgggcagcggcctcccgagagaaggtctttgaccgcctcaactagttcaggtatatgctgtgcctctagagcatcaaggataatgctttccagcgatagaggcaaaagatcactgaatctattccttactgtctcgttccggccactccaacctcggtcccagtctactatatgacatatctgtagccgaagttgcttcagcgcgctgaatcccgcgaatgatccgatgtattcatagccgtaagtcccataattggaataattgttggtgtacgcgtcggtcaatgttaacgtttgcaaggtctcccgatgtctttgtaatggtgggtagtaattcgccgcgtacatcccctcatcttctaggaaaggcgggatatcggcatgctcaaagataaaagattcgaggctcttggctgcgccgatgaaacttgcaaagcctcttcgagaacaactggacttgaggtggatatgagtgacattggagtaccgagcattatcagacccgtagctagccgtattgaacgcttgatcttcgacatctttctcgccatcaaatatcatatccccacaaaagcttcgtaacgagggaagtcgaaggattgggagaaagtgcgatgagctgaggccaccatctgtatcagaacatacgacagtgaggtgtcttaatttagataagccagagccttctttttcggcgattctagccatccactcgagagtgtagtttgaatattcatgaacctgtacaaccagatcctccagattaggcaagagggccagaagcaggacagtccacgcgtcatgactcccttgagtctgtagttcctggtcccatgtggataggctatcgtcaggccctaggattgatttcagaactggtaggataacctcctgttcatatcgcatgacggaaggccgcagccactcatgggagacacggagagtgcgcacttcttgcgctaatgtcggattaaatgcgagtgtgtgcgccagatgactcaagcggccatagtggtgctctatcaggtcgagcgatgtaaagactttgggtaacaaaagtggatagaaggcacggcaacaggaggcgagccgtaaaatatccgtgtggctatcaagatggcttgttattaagagcagcagctctgctggtaacgtagagagcatgtttctttacagcatagtaacggaaaatcgtgaatgcgagtgtatggtcaaattgtatggcaataaaaaataaacaacccgaaaatgacaatttgatgggacacaattaataagcaaatgcataggctaggcaacggtcacatgagcggtctgtaaaaagacatgtaaacaaatggtaacaatttggtttcgacataactagtgaacatgatagcgagtgaaaatctttgataacccaatttagagcaccttgagggttcagtacaagtgccttgaacgttgagtcggaaaaaaagatccaagtgcttgctacccttcgtggttgtatagtttaccaaaacaagaaattcaagcgcgatgattggttgggaatcacagaattatatccaagaaaccgcctggcagataaaagatagatacagggcaggataggcatagaaacagcgtatggacaagacgtaagatgtgaaagagacacaaagaaagatagtaaacaatttacgcagcagcagccttctcgcgagcttcgcgttcgatcttctcccgctcctcggcctccttctgctcccggaccttggccagaacaacttcacggaaaatagcaccacgggcagcacttcccagactcttcttcttggcgtggccgggggcaggagcggcatcgccgcttggcactgatggttccaccacacttgactcttcgactgagttgcccatgtccatggggctggggatgtcctccccatccccatcttcgtcctcgtgcatcttgagcgactcgatacggttggcgagcttgacgatctcgattccgcggcggagacgggcgcgcgcaatgtaggtgcggatttctggcagcaagtcgcggtcgctcgcagtctctccggtcagccatacgtgcttgagggcttcctcggaggtgacccgcttgctggggtccacattcaggagagagagaatgaaatctttggcgtcctgggagacatcgcgccagtaccgctcgtggaagatgatgcggcctgtccggcattcttcgatgaggtcggtcaaggtctcggatcggaagggggagtagccacacaggagggtgtaggtgatgacgccgagcgaccacatatcgacagccttgccgtggccctgcttgagcatgacttcgggagcagcatatccaaaggagccggccatgctggtcaatacctcagaggggctgtgcagcatcttcgcgataccgaaatctgccaagaccaattgagagtcgggggcacgggtgaggtagaggaggttctcgggtttcaagtcttcgcaaggattagtatatacaaagcgctaacgtgggttagggactgacctcggtgaacaatgttgcgcttgtgtagatagtccacggcatcaagcacctggcggatggtctgcgacgcatccttctcagtgaacttgccatactcgcagattcggtcgaacagctcgccaccagtggctagctgtgtaacgatatagaatttgtcctaggcccactattagagctccgcaacgatcggatttaacagagacgcgctcaccttagattcgaaccagtcgacgaaagagacaatgtggggatgtttgagcgactgcaacatctcgagctcatcgtggaccatgccctcgttgccacggacatttttcttcagaatgatcttgaccgcaaccttctgtccgtcggggccatctgcctcgcgaacaattccgtatgtacctgcgcccattgtccgtccgaatttatagagagccctatagccagcggaaaacaggtcagcgattgtggggtaatgggggtatgataaggagcctgtacttcttttcgtagctctccggctgcccggacagcttattgagcatgtttgcgactaggagagcgagcgttagtgaactgtggggcgtctcagacgaattgcacaaaataaatgacagaaaagacccctggaggagccgaccgagcggggagggcttagacatggcgaagcagaccctgatacaaaatgatagctagaagcccaagtcctcccagttcccatatattccacggggggctcacaagaagcgtgtagatcgccatggtatccaacgcagtgcagtcagattatagacaaggctgcagcgggagaatatttggccaaccccagacgacgaatcatagcaagaacggggaacagaagtcccacgaatatgggaatatcgactcacaactcatgatgtggggatagggctgcagacgcctaatgtagcagacgcggtgtgcagttggctcgaatggacacggaacgcgttaggtagcaacgactggaacgaagaagaggtctgaggatccaataattgaggctttttaaggaatggcccgatctaagagagaatagggtcagtgatatagaaaatatagaaataaattcgaggggtgagcgcgggggtggctgcgtgaaacaccaaacaggaacagagtaaacataccacactaggcagactgaaagatccgagatcgtagattcaattgccagtgagcccaaggagatgaatttaaaaaaagattccaaacaaaaaaagtgctggagaggggaagatcaggaagttctagacgcgataaggcttgcgggcttgggggctgtagggtttagcgccagcacagccacaacggggaatgttactgcctccagggctgacgagacgaattaatatcgacatgatgggaaattaggaaatactgagtaggggaaagattgaagacgatcaagatgatcatggaaacgaaagtacgatgtacattcttggagatgtcactatttacgtactccgtactatcgcgagaacccatggtcatatcaatcccctaaatagaatgcaagacccgggtatctatttagagtcacaccattcgaaacaccatccgagacagacaagaatgtcactgtaattgaaacaccatggatgattccctgattggcaataaatatcctgaccccaccgtatctgtgtggcacggcgtcgtcaccggacgtcataccctagccagaggtatataaccaccatatatttttggcgtgttcagctgagcttgagatttttgagatttaccatcataatatcctcaaaaaccagaatatatatatccaaactttcaatcatgctatccttcctcttcttcctcgcctttcatgtaattctacttactgcttgggtctctggttacctagacccataccagaaacagcttcaagagcttttgctggactatatgggcgagagcaaggtctcttacggactgaaaagtatgtcatgccaatgagagaaagaggcaaatgaattatgaattcatactaatctgagtttacttacaggaagtctcactggcaagaaactcaccgaggaccagaatctaagcaagattcaagatcaactcggcaatcaactgggtgacatgtttggaaaaggaggtctgggagagggattgggttctgtgttgagtaagggtctttgaattggccattggagttgaggaagtctggaagaattgttgcgcagtcgcccaattggtttgatgcaaaagattacgatatgaatggtgttttctctgttacagattggacaaaggtcgctgaaaacatatccatgaatttgttacttaatcttcaacatgattttagttccaacaatcaaatgtcttgctattcctgcccttgtcccaccgaaccacaacctagataatcaaacatagacgatgatgacactcatgatctgaattgatatccgcctagacggattcaacaacgcaacacctatcgagcaccctgaatcaaatagccccagggccaagaactgaacctgcatccacacctgcacgacacccaacctccgaaaaatcaaagagcaaacaatcaaagaacaccaacaaaagaataagcagcaaagtctcaccgctgcaaccagtcccgggatccataacctgtctcaccaagctccgccaaagcatcctcacaaaggttatcgtagtactcagtccccttccagtgactgtgcttcgactgaataccaatcctccaatcctcctccctgagccgcttgatgcgctgcgccttagtctcaacccgaataatgtttccatactcatcgagattaggcccctcaatcacaggaggttcctggggtccgccggaagtgctaggcttcacgggagaaaacgtccagaaggatgcagagcgagccatagtcgtgttgcgagagcgacgcgcatgctgcatgtccgaaacatgtttgatctccttgcggagcccggtaatgtcggcgggaatgtgctcgcggagccacttgacagcgctgttgaagttattgatctgcgcggcgcgttcggcgctgacaggcgctggagagggctttctcgactgcaacgagggcgagctgacgctttcctgccctggtgaggctgggcggctgacgaatggggaggcgagggggggcatcttctttcgcggaacgggggttggtgtcgatggagtcatggtcatgggcgaagggaagaacggagtcggacgctttggccgcggtgctcggattgaataactcttcttctctgtgttagcattcagatttccggctgggactattcccagggcagccggggagggcgagctcggccgggtcgaatcacctctttcatagacgtttgtggctctttgcctccatggattactattgcagagttcctacacatgtgcacttcgccggagctcttccgaattgcaagcggggatggaatgagctcgcgacgcttcactggatcgtcaaactcgactgggaacttgattggagacagacgcaatggtggccgctttggatcggcaaagtttggcggcgcacgagtcagaaaagggtcgtcggctgctgcaatcatggagttatcaatcatccgggcaatgtttcggacgatagatgccccgttgggaagtctatctctggcactgttaaaagagagcaattgatctctcgtagctgggcgagcaggagcctcgcatggtggtggaggaggaggccgggtcggaggagggatatgaaaagccgggggaggggcgtcatggtcaaaacgcaagacttctcgagcaggagcaggaggtggagtgatacaaaagtcagtggtcatagatgagcttgaggcgcgagagggagaaggggcaggtacaggcgcaggaggagtttgaaccatcctagcattaaaagcggacagatttcgaactgacagagcttcagcatttggaccaggaccaataacaggagtgacgccatggtccggtgaatgcgcaggactccactcgatagcactcgaggaagaccgggcagacaaggtgggagaatgaagaaaagtaactggcgagtaggtctggttgggattcaaaactggggctgggatagtagctggcaaagactcataggcagtctgaaaccgctccatagcattagtcaaaagcggtatcttgatagccgaaaatatgtgagcagttcgtcccatgtactcgtatgaggtggctgcataatagtggaggtaggtcgcactgatcggatggagctttatacaagcccattagttatcagaagagatgagatgaatgaggcacaaactggactagatgcagtctctatgagctggttgcaacgcatggcacattgtttgtattgctggttgaaacatagccatttcacatcggcgagggctttcttccattcgtaggcatctcgtggaggagaaaagacaccaaaaggcagcgaggtctccggtggcatttctggagtggaagccattttggaaacaaaaggaacaagtgaatgaaggatgaagaaaagataaaacacgagatgggatggaggaagaggacgaagagagggacacgagacgggatggaggaagaagagagggacgcgagatggggtgagaacgtagaagaaacaaagactggagtctcccaactcagagtttcccagacaagtccatttctcatatttgcccacgatatctatgccttcagtcatgtttaccagatttggccagctcccaggacactcaagcctaggcatagctccaagtgtacatcatttaccagtagccaggaatactgttcatattatcatccttaagagacctacacagtgtacataggaattgtagataacctggatgatttccgactaaagatatttactagaaataatatggtcatctagacctgctcaacaacctgaacaccattcgtctcatgcttgatctccacccgtgacaatgcctcgccagtagccgaaagcgactccaggaaatcacccagcaaacggtcaagttctgccgtcaccacaccatcagccataccctccatcagactcgccgcacttgggggattgagagccgggaaggggattggtcccttgtcttctggctgtgacatgaggacttcaggcgtgtcgtgtcgtgcatttcgtacggtttcgaacacgggagatcccggttctgagactgggcccgaagtcaccgaggtgggcgttgggggaattggaacggccgtgggtaaagctgtcatactaatttcgtatgaggaaaccctggagtgcatgttccatgcagggtgagattctttgtctggcccggggccatcttcgtcgggaccggggccatcttcgaccccggaagcctcatcttcactataaccggctaaatccatcatcgcggggagttcggtgtcaaagaattgactgcgacgaagcgagtttgcgtcctgtggggtggtgggacgatcgaagcggaagggatcgtaatctgaatcagaggtatacgatgccgcggtcgaaggacgtgagtcacctggttcacctggttcatctgttgactgtggctgcgactgcggcggaggttgaacctcaggcagcggagcccggagggtgtcatgtcgatcgtcgtagctttggctctcgggcacagatcccatgactgggaatgtccactgcatggtagctcgcttttcagcctggaaagactcctctgttgcgggctcatgtggaggaacttcctcttcctcttctttcggcttttcctcttcgtcttgaacgaatgacgggaatttccagtctatggtgggaggtcgaggaccagacggcacaaatgtatcttctaaggcttgatcatcatccgcgccgctatcagacgactttgagctattctcagaggagctcctgttcaatcggagactggagcgggtcgcgcggatagtgttcgcatcgaccaattggaaaggttgcgcagatggagctcctgctgcgtagtgtgaggcctcgaatgacccgatgtcgatatcgagaaaagttgatgtgacagaagagcgatctgtttccgcacggaggggaagatctgaagtgggctcgggttcgatggggacaaagtcattttttgtttcgtatttgtagctgggcttctcctcatcaaacaggcattccagtgccgctgcgcctcggcgcacacgttcatcgaaattggccttatcttcataattaagatcgtccccggaaaactgttcgtacatgtccagctcaggagaagcatcggtaggactgatggattgctccatctccgccagcgaggccgcaatttcatccaggtcaataacggagaatcttcgctcgaacccatctgttgtactgaaattccagtcatcttctgactcctcggtacctgggagttcagctgccgcggcaccgcctggatggaacaaagagattcgctggcctcctcgctgggaccattggtagtagtttctcaccaactcactcacggaggcggtcggatatgcctcctccgtatcggcaatgtacgggtgagcaagaatatctgccatggtgggacgagtatacggattggagtcaagggcgtaggcaataaggtccttcaggccttggctgtatgtatcgctgtccagtgatggcgtcttgcgatttagttggcgaccgatttgcattcgttcccgcaggcctgcgtttggcggattcccgttggcgaactcgaacagtgtgcacccatacgcccacacatcaatctcatgcccgtattgatgggcctctccacgagttgcaaacatctctggtggcatccagtgtggtgttccaatccaggtggatcgtttgtctcgctgtgattggagaacaccagcaacaccaaagtcacagatctccagacgaccctcttcatgaataaggatatttgcagctttcacatcgcgatgaatgattccagcttcatggatggcatgaagtccaacagccagctcacgagcgattggaatgatgtatttctcatcgagcttgtcgtttgttgcacgcatcagggtacggacactgccaccgggacagtactcgcagactagccacaactgagagtgaattgagatggcttcaatgatttcgttgatgtttttggcaccggaatccttcacttgcttcatcacctttgtttcatggatgaaatcctttatcgactcatctctgaaatctcgaagtgacttgtagtctagcgagtcaatatctaggactttgatagcaactagctggcctgatgatgtttggtgacccttataaacacgaccataggcacctttgcctatcaactcttcaaactcgtatggtgggacctcggttttcgcacgacgacacatctctcggacggccactccttgttcacgagctagcttgattgcctccaccttgtgcttggtgatggccgccattgcagaggatgggtctaggagatgagaagctcgatccattgtgagtgaagataagcttggaatgaactaggtgtgagataagataactgtaaaaatgagataggtataaaagtgagtaaacagtaaagatagagatgggggtggagtgagatgagttaaaagggattttaaagatatgcgactcggtgcggagttaatgattgaatgcggatggagtgcgtttgggggtgtgacaaagcagatgtttgagctttttaacaaaacgtttcaagattctcttgcgcttcggtgtgctcctatttctagaggcaagagagattatcgacggacgagtggagagacgaagaggtgtcttttggtaataccgaggggaatccgtaggtgtagagcaaccttcgaatatactgtgaaaagagtgctgttttctgatcacgtagctgatcggacggacccgagaggagtatgaggggaaaatggtgtatttttcctgatttgcgcgctcctgagcctggtcggaggtttcgagatccacttgttgtccctcgtgatagtcggggagaggcaactctccgcaagagctgggggacggtgaagggatctgagaggaaatcttccgagtgttgacgacggctgaagtgtcgttagaacacggccgggagattccagaagaactagttggtagcccactgttatcgagtgcagatgtatccgctttggcacagactctggaaggctcttgttctccgatcgggttgctgtccaccaaatcttcagagaatcgggaaatccgaggtaggctggtcgcggatttgatatgactgctggtgagtgtcgacgtattagcctgggcactgtctttgggtgacaatcgttgggtggcagaatagacgtgggagaaatcttggtccacaacggtttgatcgcgaccgggaggtcttgggaatgattcaagtagcttcttaaagctcccggtgtgatttaaagtccttgggtcctgggatgcttcgcaattcccttgggtttcaggggtttcgttgaggttatcaacagaatcgggcggctcacctttttcgctgtcatagactgatgagcatgggggttcaacagatccagggcgtgtaacgttctctgatgtcttatggtgttcgggaagctccggggactcgagacagggaggctcgtcgtccgttgcaagctgttggaataactcggatagtagagattccgaatcggcaccgatgagggaagtccactcttcttcgtagtgaaccaggtctctgccttctgaatcctcgggaaagtcactaggacgatgctggaaggattgtagacgaaaatgattcgcacgttcactggggacagtatgttagtcaacgagattcacccactagaaggaggagtatcttgccagagcctagtagatgcaagtctacgagcaagactagtagagctgagttggcgagattgatcttggctgtgactggcctctaggtccggaggaagcccagcaaatgggtcggatgagccgaagagacgaagcaagaattggtgctcacttggaggaaatccgagctcctcgatcaaatcgtggagactaggagactcgtcagccattctgttttgataattacatcgacggtatatcaatcaagctcagaggtcaattcaatgatgggagaagggtagaggggatgaaagcgattatctcgcgccatcaatgattcaggaacctacctggtcctggtcgcttatttaatcgaaatacaagccaccacctgggaaacccgaaaatcgagtagacaagccgagtctcaccatttgtctttccaatatggaatgctttgtagggacaaatggaccttaacaatgaactaaggcagatatggtatttcagatcccacagccaggttcatacacggcttcccactggtgtagtgtaagtcttgagatgtgtggatatcctgaagaagaagaagatgaagaccaactgccagatgttgttggcgatactgtggcacgtgatatatacatccttatcgtgatcttaaggagctgaccgctttgtgttattttaaagggagattgaagttttggctttaaactagctcactaggcctagattttgaggttcttccaatttcacagatgatatcagcaaggtctagtgtagaaccttagaacgcattatatttcattagatatattactcttggcactattcgatgattcccagccttaatggggatcagcatagattgcttatcgtgaaagcttatcgtaatttctctctttcagttgctgtccatggctgcgaatggttataaatgacccggtgagatgacacaagatatgattcaatagaaacactacagctagtgtgccctattgggggccagtcatatcatctatgataaaggctgggaaatttggagcatgataggcccaacaaatgggatctggtagggcgacatatatagttgtgtttgatagagccatcaaatcaatgcgcttaggtggttttaaacttcatcacaaactcattggtttgctgcatcccgacccatgctagaatattcattgggacttagcatcaatcctggtctttatatattccacggttgtgcttctaataacaagagtatcggtcacagccagggatgattcaatcgactttctaacggtaatgcagaccattcatgatagtagatagtctggagccgctacagcgtttatcgcctcgaaatataacacaaacatggtgacattgagcggacctaagattcattgccgaccgtccggaatgccacatcgatgctctagttatggcgtggtgtcttagtgagatgttagtgcaaaataattctttgagaagagatcgttcattataagaaccgtattctccctctttgggtagatcttagtaacagtgccattggacacagtacgaacggaataggcgttcttttttttttcagagacaaagcatatattgtatgcaaagaggcgcctagtatagagctaagaaccacgccccactacgtatgtcgatcagcagttaagcgtgggaatattttctaacttattcttgtactacggatcaccgggattttaattctagaagggtaaaattttatctaactaaattgacacaaaaccgatctgacttggtcacaataggactcgcttatcgaagggactctgagcgatcgggtggcccgctgggtcttcgagtgtcggggtctgtttaggggcatgtcggggtctatttagaggttagcttagagccttagacgcttataacgaagagacattacatggttatacaactctatgttatcaaattacggtcttttatttccaatatgagaagtctaaaccaaggcaacctagcacttgggcctgagctaacttttgatggtcttttccgtagcataataggtagcctttgcaagacaagcatagtgaggagccaagaggccaaaagaggccaggttacactctgcactacttcagagtattgataccagttattagataggtggactgactcaccagattattgcgttggctattccttacaacatatatattgaggtggctgccgggactcggcgccggaatactcgggttggaagacttgtcctggcttatagactgttttgacatccactattttgggtatagagtcaagtttttgacagacttgagcattggttttattagttttacctcctctatacatgtattgcactcccatttcttgtaatgtatgcaggtgggatgatttgatgcctggatgccttggtgacttagctgtccccactagttaatgcacggtggtgctgcacgagctagtggaaacaggtgaaaatttgcttaaagaagatgtaggagtgggattttcatttcaatgcgattgaatgttttaagtatctctattttggattatatccaaatatacatatgtatactagtacatagttgtatagctgtaccgtacaagatacattccaaggttgaccgatagttagaatattaataatgtgcattgccccaccttgatagaggggttttgggcaggaagtcaagtcattcttagaaaccctggaaacataaaagcgtgctgtgaatcataggctttgagatgactctttttaagcatttagtacgatcaaggatcatagctagagatataaaacgagtcggatgacatctctcgcttggggtatggctgtcaaaacgtcaccggagcacccacggatggcaaaaacagacaatatagtgagtcaggacatgccaatctgaaggatttgaaatcaagaaaaaagacccaaagtaattgaaaggaatataagcaattaaaaaacgagaaacggaaaaaaaccgaataatataaacggtttcataggcaaacaggccagtcagctcaaaacgcacaaaaccgggaggagaaaaaaaagtccccactttcgcttttctttttttcctctcccacttttccttcccctcttcttcctcttcttttcccctctatctctgtccaccaggagcagctgcacatagaagtttttgattcagcgatcgagaagtctcgatcctagtcatctgtgtgctcttcttcttttcttgtttatccaagttaaactaaggatcaaccgccaaaatggttaagtaagttgaccttgcttgagacctcgatgtcctagaacgtactaacaatgatgtgaacagcttcactatcgaagaggttagtatttgcctttcaagggttccaaggttatatcaaacactatcaccagaagaggagacatattccctcgatggctccttcaaatgcctccatctacctcccaccgctggtgatacttgaaaaacctttcaaccatttcccttgaaacacaacatcatcaaatcatcatgaatgtcgatactgacctagatcagatccggtctctgatggaccgtcgggctaacatccgaaacatgtccgtcattgctcacggtaagttcagacggcagaggaagcgatatggtgaaatggttgattctgactcggtctctgtgcgttagtcgatcacggaaagtccaccctctccgactccctggttcagcgtgccggtattatttccgccgccaaggctggagaggcccgcttcatggacacccgtcccgatgagcaggatcgttgcattaccatcaagtccaccgctatctccttgtacgccaagttccccgacccagaggatcttaaggagattccccagactgtcgatggatccgagttcctgatcaacttgatcgattcccccggtcacgttgatttctcgtccgaggtcactgctgctctccgtgtcactgacggtgcccttgtcgttgtcgactgtgtctccggtgtctgtgtccagaccgagactgtcctgcgtcaggccctgaccgagcgcatcaagcccgttctgtgcatcaacaaggttgaccgtgctcttctcgagctccaggtctccaaggaggatctgtaccagtccttctcccgtaccattgagtccgttaacgtcatcatctccacctacttcgacaaggctctcggtgacgtccaggtctaccccgaccagggcacaatcgctttcggttccggtctccacggctggtgcttcactgtccgccagttcgccgtccgttacgccaagaagttcggtgttgaccgcaagaagatgcttgagcgtctctggggcgacaactacttcaaccccaagaccaagaagtggaccaccaagagtgagtacgagggcaagacccttgagcgtgccttcaaccagttcatcttggaccccatcttcaagatcttcgccgctgtcaaccacaacaagcgtgatgagatcttcactctcctcgagaagctcgaggtcaccctcaccaacgatgagaaggagctcgagggcaaggccctcctcaagcttatcatgcgcaagttcttgcctgccgctgatgcccttctggagatgatctgtatccaccttccttcccccatcactgcccagaagtaccgtgtcgagactctctacgagggccccatggatgaccgcgccgccatcggtatccgcgactgtgaccccactgctcctctcatgctgtacgtctccaagatggtgcccaccaccgataagggtcgtttctacgccttcggtcgtgtttacgccggtaccgtcaagtccggtgtcaaggtccgcatccaaggtcctaactacgtccccggccgcaaggaggatctcttcatcaaggccatccagcgtaccattctcatgatgggtcgcttcgttgagcccattgaggatgtccccgccggtaacattgtcggtctggtcggtgtcgatcagttcctgctcaagtccggtaccctcaccaccgatgagactgcccacaacatgaaggtcatgaagttctccgtctcccccgttgtgcagcgctccgtcgaggtcaagaacgcccaggatctgcccaagcttgtcgagggtcttaagcgtctctccaagtccgacccctgtgtcctgaccatgatcaacgagtctggccagcacattgttgccggtgctggtgagctccacctcgagatttgtcttaaggatctcgaggaggaccacgctggtgttcccctccgtatctccgaccccgtcgttgcttaccgtgagaccgtcgctggcgtttccagcatgactgccctgtctaagtcgcccaacaagcacaaccgtctgtacatgactgctcagcctattgacgaggaagtttcccaagccattgaggctggccgtatcagcccccgtgacgacttcaaggctcgtgcccgtgtccttgctgacgagcacggctgggatgtcaccgatgcccgtaagatttggtgcttcggtcccgacaccaccggtgccaacttgctcgttgaccagaccaaggccgtgcagtacctcaacgaaatcaaggattccgttgtctccggtttccagtgggctacccgcgagggtcccgttgctgaggagcccatgcgttccgtccgcttcaacatccttgatgttaccctgcacgctgatgccattcaccgtggtggtggtcagatcatccccactgctcgtcgtgctctgtacgccgctgccatgttggccgaccccggtctcctcgagcccatcttcaacgtcgagatccaggttcccgagcaggctatgggtggtatctacggtgtcctcacccgccgccgtggtcacgtctacactgaggagcagcgtcccggtacccctctgttcatggtcaaggcttacttgcccgtcaacgagtccttcggtttccctgccgatctgcgttccgctaccggtggccaggctttcccccagtccatcttcgatcactggagcatcctccccggcggttctcctctcgaccccaccaccaagcccggtcaggtcgtccaggaaatgcgcaagcgcaagggtctcaaggaggtcgttcccggttacgaaaacgtaagtctttatcctcactctcgttggtcacagttactaatctggtcttatagtactacgacaagctgtaaaaatgttcacggtcacccagaatttcccttctgccagtcattcgtggaatctttcatgagattgatgaattcaatacaatttcttcggttcaacaaaattttattccctcattcgtcggtatttgcttcgatcgttccgcctttagaaatcaggacatgaatattgaagcctctaggtatcattgattctgtcctttcattgccgtttctacatttggtttttctgccgagggttttttgctttttgcgtttttgctgtagtctagcagccagtttcgatatgaaaataaacttgggtatgctaggcacagtggttcatctgtagacaagtaattgtaagcataaaaaaaatcagcgaaaccatgactccgatcgcaatggtagcttgaggagttgtgttgtcctatgtcattcaatcacgtgatccaccgagcctcgcgtttttccttcacaatcgcgctcctagccatatccttctattccctcacggttggggtgaatgcttatcagcttaaaataacctattctcaagcattgttatctgaaatacaagggtgtgattttatcgcatatacaattatcactgcacacgcaggcatcttcccgcgtgacggctttgtttaaaccgcatccctgcaatcatcgccactttcacttcgatcttttgttcgatccaattcaatcctcacggtttgaaattgctcggaaataatcttcgtcatgcagtttactgatgcagaagccgctgacgtaaagaaatgggtggtaaaaaaactggaggacatgtgagttgatcaggcaccagaatcggggactgagacccgtggattgccctaggggaagcaaactgagactaattggctttattctgtctttagctcggatgccgactccgacgtgctcgcagactatgttttggcgctagttaggtccgatgcgccagccgaggaaatcaagaagatctcggtggaaaacttggaggatttcctgcgcgaacgtgagtccatatctcaatcccgaattgtttcatacaactaacaactcttagacactcaaccgttcgttaccgagctctttacaacattcggtcccaaacaacccgcacctcctacgcccgcgcctgcaccccagcctcagcgccagccccaacctgctgcccagattcctttgtcacagcctcctgagaatgcccccagcggcccgagagctaccgtcaccccgggcagtgccaaccggaaacgaactttcaatgagggattccagggggagccggatcacgacgatagtgggttccagaatcgcgctatcaagactgcacggcgtggtgggcgcggaggtagtcgcggcgacttcatgggcggacaacatatgcaagcgggtcaacaatatcctccacaacaagcgggtcaactgtttcctctgcagcaacaaggccagcaattcccctctcagcaacaaggccagcaattccccccgcatcagcagggccaacagttccctccgcagcagcccggtggcttccctatgatgccaggtttcccaccgttcgaccccaatgaccctatggcagcaatgatggctatgcagagtatgcaaggtatgggattcccgccgatgccggggatgcctatgcccgggatgcccggtcctcccggtcagccaggagccgatcagatcccgaaaagcaaccagcgatgtccattctatgatacccaaggtatctgttacctaggaaacacttgcccttaccagcacggcgagggagtctcgaaagacgatggtaagaacaattcatttatcctagatataccattgctaacaatcgcagaatatgaccccaagaccgcgggtacgcatgcgcagcggggcggtgctccttcgcgcggtgaccgtggccgcggccgtggtcgcggcgggttcagcggacgaggacgcggccggtccgatttctcatcggcaggacctaatgaagatcagtctgttacgactattgttgttgagcagattcccgacgacaagttcaacgaggattctgtgcgcgagttcttctccgagttcggtaagatcaccgaggtttctttgcaaccctacaaaaaggtggctttggtcaaatacgagactttcccggaagccaaggctgcgtggtctagtcccaaggttatcttcgacaaccgcttcgtgaaggtttactggtacaaaccgaatcgcgatgagacgcacgacagtgcacaaccggaggccccagccttcaacaaagaagagttcgagaagcaacaacaagaagcacagagggcgcacgaggagaaaatgaaaaagcgacaggagaccgaagcagccaagcaggctctagaacgccagcgcgatgaacttatcaagaaacagcaggaggagcgggcccgtctcatgcagcgacttggaggcacgacagacacaaacggtgccaccggtggtggagacgctatggccaccgagcctccagctgacgagaatatcagtgctgagacgaaacagctgcgagctcaactggctgctctcgaggcggaggcaaagagtcttggtctcgaccctgcggcggacccttcagcgcggggtggctaccggggtcgtggtggcttccgcggccgaggcacgtaccgtggacgcggcgcttacgatcccaacttccgcggaggatatcgtggacgcggtggatttgcggctcggggacggggaggtgtactgcgtctggataaccggcctcgacgagtcgccgtatcgggcgttgagctcaactcagacaaggacgaggcattgcgtcagcacctgatggtaagttatgtatctttctaaccaagcaaagcgtgtactaatttgttgtgttctagggcgttggcgaatacgaatccatcgaggcacacccagaccagccaaactcggtcgtggtggcattcaaagagcgcttccaggccgagaagctaatgttctccccgtggaacatcccctccgtgggcgaggttcaactcacctgggtgcccaatccgcccgttgtacttcctaccgctgggtcatccacggaattcaagggtggtattggacaggacgaaccggaagacacagtcatgtcgtcttcgtcggtggccaacagcgctcctgcgcgggatatggattacgacgttgcggaggatgacagctggggcgcttaattccgttacttttcgtgtaccagcatcatatgttggttgtataggctgcattaagctatttttacgggatggacgttccattccgacctgttgattaaacaaaaccgtgccaaaatcgtagatcacacattttgaggaatcaactcaaccgtatacccatcctatccgcatcagcacaataccttaactcagggggccatagaaactcaccggatcagcaaccatagcaaacttctcaaaaaaccacgcataattcgcatgaatctcgccgcgcgcaatacccctctcctcctcccactccgaaagcggcaccgcctccctcgaagaaacacccacatccttcagaatcctaaccccaccatcccgcaacctccgcacagcagccgacacatcaggaaccgtgaaccccaaatgcgcgaatccaagatgcgggggtacattccccgtagaaatagcaccagcacgatccgcaccaccatcaactttctccgtaccatgcatatggaacaactccagcagcccgcacgtcttcgtcaaaacggggatttcgctcgtagtcttcgcccacgcggtaatgtcgtcttcggtcgtggctgatggcggcgggtgtccgaggtagtagattgtgaaggggccggcgttcatggtgaagattatgcgcatgcctaggaggttgatgtagaagtttagggagcgggttgggtcttggatgcgtagggctaggtggtttagtttgtagtcttttgttgcgggtgttggggctgggtttaggcttggggctgcgttgaagaggcctggctcttcttcttggggttggaggtggaggtttgttgaggacatggtggatggatgtatgaatgagtttggtggaattgaatcaaggtgcgcggggtatataaaagatatggattttatagaatgaggggctgtagtctgctagtaactagggcggatccattgggcctatcaaagagaaagaactggatatcttggaatagttcatagcgtgcatcccgagttgatctacgatagcgtgccgcatggataacttcaagagactacatctattgataaacaatcatatcaagacccccctcatacggcatcgtcacccgtcggaatccactgccctcggcatcaacatacgcaaagagctcctgatacctatccttcgccttgacagtattatcaacgatgatcacggcgccaggccggaaatgcggctgaacaagcttcagcgcagggagggcgagaggcgtccagactaggtatgtagtggttagcatatatgcccgctgctactatcacgactagacatatccgtataggtgcgtgtgtgtatgttactgcatcagcccaaggaaatcaacaccacttactatccaacagcaagaaatccacagtccccaaatcggaggtaagagtctcacgcagatccccaacacggagatcaatcacatcctcaatctccttgccagctttcgcccaatgctcacgagctatcttagccttagaatcttctttctccgtggcgatgactcgcggcttagtggtggcgctgacgcgcttcgcattctctgcgacggcaagcgctaggtagatggtgctaacgccgaagctggtgccggcctcgacggcagtctttgcgttgatgctgcgcaggatgtggtagactagttcgcacttgtcctggtccagtgcgatgaacttgtcgaccatgatggagtcgaattcgggactgcattgttgcggtaggttgtgccagtccacggttgattcttgggttagggatttggtgtgtaggtctttgaggtgggtcaggacttctggggaggctgtgacgggcgagggtgccattttgtattgtattggttatttgagattaggaagttgttatgttgaagtacgttttggaatgcttggggaaggtgattgaagaaactaaggactaaagacctagcaaacggaagtggggaagggtggtggcacgtcaaaaagccctcaaactccgagatccaagggaatcaccggccccgtgttaattccggtgtacgccctatggcggggaatttgtggggacaagaaggagaaagtgccgagatgctaaccgacatgactatgatcagtacgcctttgtccgatgctataatgatcattaccgttcaattggccctaaccgccgagagtgcaagcacagcaactgaaactccatactactgctctagcaagtccgcatagctattcaaagacttcccaatcaaagaaaccatctcccagatataatccgccgtaaacagccgcgcccacaacctggtgaccgcagcactgagccgtgtattagtagcgagcagccactccctcgaaacaccatgctccacctccataaccatctcgagcacgaaatctcgcaaccgggtctcctgctccgtaagccccgggtccggatccggcaccgtgatcgcctccagccacttagccaatagcaccgcgcactccagggagcacaaagcgtgctgattcgaccacagagccacctgcgagtgcgcgacaaatccaataccgagcttgacaggtgtgctgagggcatgtgcgcagtggagtgcagcgcgtgtgagacggtcgccgcgtcggacggcgaggttgtcgtggagactggttgcgatctgcacgggatcccaggtttgcagttggcgggctgagccgcagtctgcgttgagtcggatgtaggctagtcgaagcagcgctgctgatgtgaaggatagcgggccgttcgggctgagtgggtcaacggaggattcttggttgcgctcccagcactggcaccagcgttctagtgcctgttcgacgtgtacgagctcgggtgtgggtgccattgacgatggagtgaagcggttccgtcgtgacacgggcagtcggcccgctttcgtcatgagccagatgtcttgcaggattgcgtggattagcacgtagccgccgagagaagaaaatcgctctacattgctggttggtttaaacaaggcggaaagggcatcctggaactttggctcgccaggactcttcatgcgctctatctgccagagatctgagcgcggggcttgccattctttttcggtgctgggtagttcgagtgtgaaatcttcagtgagaatcatgggtgggacgtcgaacacgatagtgtggatattgaagaaacagaacacaattagtttcgtgcgcttcacgcattcccgtcgtatccagctactccatgttccgtcctgctccggtagccggttgagtcctccttgtcggacgactatttccattagactgcgaagcgacagcgcctcgtggtatggggggttgttgataaaccataacgacaccgaggtcatatacaataaagcttgcacagtttgcagggtaccaatgtcgtcggccgcgttgaggccgggcgggggcagcttgcccgactggaagacccggcgaacatgttccatagtcactggtttggcaatctgatagagacgaaatgcagtgtctggctcacggcaataccgtgcacccaatgccgccatcgctaggaaatacggtaaggtcatggaatctacatcgaaggtcgggatatgcacgattgggtagtgctcgtgaaaaccggttacatacccggtcaaacatcgggacagcgcatgtcgagatggcatcgatggatctgggaccacattggcgtagtcggctaacatattcatgaacttctcccggcattccgccgtgactggtacgaatcccgtgggctggcgcgccgcgggggagatgtgatgatatccctccggctggagggagggcagctgagtgtcatttcggggaagtacagagctggaaggagtggaaggagtattttcggtcagcgcccctcgatcagaagattgatcatattccggcaccggggagaagtgcaacggtgggaatagcgggagtggctggtaagccggagagaacggatgatttggcaaggggacgctatccaaaaacgaggtgaagtcatgagcttgatatgatgccggcccaaagccacttagagcatagccaaaatccgggccaggggatggggtggtgggtctttcagaaggagtgtctatgctggccaactgagtacccagcaccgggcggtgtacggctggcgacaatgatgtgaaatggtcgacaggcccttgtagagcgctaggattagattgtgcgtggttgactacagatgccaaggagtttaatccgtccaagggagaaggatttgcgggggagggcgtgtgtgtgttattgctggctggactggcatcagggttgtgagagagacgctcatgacgagccagcagatccctagaatggtgagtacatggaactaatagatgtactgaaattatatatcgtacttgcgtgtaaaggccttgggacattgaacgcaaacaaacggtttctctttggtatctggggggatattagacggagtattcggtccgaggtccagaagacatacgtgagcgatcgtgtctttgaagatgctctagccgggcaaatgccctcgggcatcgctgacactgatagggtttgctattcaacattgggggtgaacatgacgtggagggttggatggtctcggggatttggtgcacaactccggtgagtctgacagggacattattccctggtgtgcccggttcacaagtacctccacaaatactaccacggactaggtcgaatcgagcagaatatcatgaaccttgtactggtcttgcatcgccaagcacttattggcctagtctgccgattcccacgatgattaatgggctgtaccgaatcggtgcaaatcccgaggtctccgaattggagaaatttcatgcacgtgaccgccaatggttaattgcctctgcggagtataccccgtattcgcatctatgaactcgcgatgcgacgctggaaccgtcatttaatactggtttctttattttactcttctaattctgaaatcagcaagtcttattctcttcaaatcatcgagatgacgtgaaacaccgtcaaaaaaggagaaagagctaggccttgttcagtagtcgatatgcctatgactacgacgccaaggcacgggcccccacgtcttccggatggagcattatcagttccaccaacagcccaactttgtctcaatgtactccgtacatggtcggacctagtattaacctgcaaagagtcgtatacatgatcaacaggatccacattagtccacaagcaatgtggttcggatgataatatcaaattggagagatgataatatttcggggtttggtcctttctccggttttgtcttagttggactccacgccctggaagcttagcttagaaaactcttgccaacgatcattctgatttactacatggcatctacaacgcctgactcacttaaaccgcaatcaacaacagccatggcaagaaacgaggagactaccaagtctctatgcggatctcaagatatcgaattccgctatctagagctagagacacccttaccgaccccatgcattactttaccacccggccccgctcagtcaccaccaccagaagcgcccagtctagagaaattcatctctccctttctgtggccaaaatggcgcaagtccatgatgacttatatcgcttgcggggtcactgcgctagcaggttatgctgcgggcgaggtcagtcctgcatcagaggaactaactaaattatggggggtcagtaccgtcgtttacaatttgagcatcacgattttctgttgtgggtttgccctggcgccgatggcgctggctcccttttctgagattaatggacggaggccgatctttatcgccagtgggattctcttcgttggtatgtattactccgctgttttactcggcatatgctgactttctatgttaacagcctgtttaatcggctgtggaggcacgccgtcctttgctggattgcttatagctcgtttcttcctgggtgtgggtggatgtatgtatagcctgctccgaatggtcgcattcaattgatactgacttgaagcctcacagcaacattctccactatggtcggcggcgtgatcagcgatatctatcatgctcaagatcggaacacgcccatggcgctcttctcggcatctgcattgttcggtactggcctggcaccgatgatctccggcgcaatcatctcccgcaccacatggcgctgggtgttctactcgcacgcaattgtgtccgctgcttttgtcattatcatctacttcttcttcagagaaacgcgcggcagtgtcctgctaagccgcaaggccgcaacgttgaacaagtactacgagcgactcgaagaagcaggccatcacggtgtaatactgccgggcgaagaagcgtctgaagaaaaatgcgttcgtcgaatcaggtggaaagtcaagagcgacgagcaacgagaatcgatcgtaaccatgatccagatctcgctgtacagaccattccgtaagtctacgctaaccttcagtccaccatcccctaatgaatgaaagaaaaactaacatcctaatctagacatgctcttcaccgaacccgtggtcttcttcttctccctatgggtctccttcagctgggcagtcctctacctccaattcagctccataccactcgtcttccgcacaaactacaacttcacaatcgagcaaaccggcgccgtcttcacctcaatgtgtgttggcaccatcctcatcactatcatcagtatctatcaagatcgcatcgccatgcgcttcggtaaaaactccacttctcccgaggccagactgcacttcgtctgcatcgagtccgtgcttctgcccattggcctgttctggttcggttggagttctttcccatctgttcactggatcgtgcctgctttggcgattggatgtgctaccatgggcatcttttccatttacctcgctacgtttaattacctcgctgatacatatcaccggtatgcgagttcggcgattgcggcgcagtcttgttgtaagcttttccatgggtcgttgatttgtatgtgatgatattttgctaacgtcttactcactaggtcggaatttgctcggtggtatctttccactggttacgaatgccatgttcaccaaccttggttatccagaggcatcgagtctgctaggaggacttgtaagttgtggcaattaacaccaagagaagaaatcgactgactggatcgaaatagggtgctgctttgactctggttccctgggtgctgatcttctacggacccaagattcgagctaggagcaagctcgcaagtgtaggtgatgcctttcattcatacacactgtttgagactaatggaatcataggaactcgcacattaaatgatctacaacgcataccaaccccgaacaagacaaagagtaatttaatcacagcattttagggtggaggattagagccaacgacatcatacatgcatattatcaactatccaggcctacctaggtagatagaccggtctgaattctcattacaacaaataaattgtcgtatcaacgtacgcttcctataatcggagcatggctacgctcagcaattcaaaaatccccacaatgctaaaacaatgtacatgatatgatccaccatgtgttccatgcaaaatcccgaaatcttagaccaaaacaatgtaactacctcgggcgttgatgccctctaaatggatgtgcaccatttatcccagagcgatacgatgcataccgatcttcatcatcgctatcactatccatctgatccaaaaggcgatcaatatcatctccagcatgagcttccagtcccggtttcctttctagcccacgaccattgtgagattcggaactttgggagccctgacttccatcggggtgagctccgttgctggaagcgtggaccgattcgttctggctgctttgcgtgctcgttggttgcagcgggcgagggctgaaacgataacccgagttctcgggactggacatgaacatcagggtttcaattgcgtcttgttccatgagtgtgttttgggattgggtgcggagtctgtagaacgcgttcggtgtgggtggtgcgtgtgtgtgggatgatgagagcgagggcgttcctggccctaggaccgcttggccgttgagtggtggggtgagtccgttctcttggtgcgaatggtgacgtcgatggtgggagatagggctgcggttggaagggttggagattgcgttagggctgggacgacggcgctggttatgaccatttgatgcaatgatatccacaggcggtgctagcttggggattggaaggaattgattagatgagtatgctgatcgcgagcggttatggctcgggaaataacgggaatttccgttggatgatgtttgggaatcttgtaaaaaatgcgtggagtttcctgccggtaatgatgctttgtcactcgggctcaatggcatgttgcgtgtgcgcagtgcggtttgaggggtggcttcacgcgactgtcgggcctgctctactttggcagccgcgtatgatagacgtgtacggatatggaccgacaactgggaaatataaatgagctataattcctgaatgagcgagtgggcgcgttacctgtgcaatcctactcccatgagctgacgagcccgtactctttgaacgttgtcgtgcagctccattcgcgtcggcgctgtgagctgtggggggatctaaagtggatttgaagtcgccggcggctgttcgtttctggcctggggccaagcgagcatcaaagttcgaccttgtgcgcgaatgctttggcgatggtggcggtgatatagaaacattgccggctttgatcggcgataacgagggttgccatcgatctactgaggcgcctccattgaccggctgtatgtgcggggcgagttgggattccaataactccggatccacccacggtatcgatgtatgtccattcaatgtatgagagttaccgaactctgtcgactggctattaccattggccgaggaaggaaagctggaaagagagtctgtgacggtgctagcggaaaggtctagtcgtcggccatcgcccgatgtatcgctgccgcgctccgaggattcgatataggctgggttcgagttaccctcgccgggagcggggataacgacgttcaagccatctatttgtagtgacaatggtttcggtttcggcgattgtgtggttcgcgtcttggctggagtcgttggtttgtgaggtacgggaggcgtcgcgttgttcacagagtaggtgttcgcactggcctccgcatggagcaccccacgattagacacagcattgcgaccgtcattcatgatcaagggtggggcgtggaagattaaaagaagctgggatagcgacaatcggcaaatacgcgcgatctagctttaatcgcgagtttacgcggcacaatctcaacactcaacatgcatgtcctgtctcgccaagtcaccacattgagagttgggccgggaaggtccgataccaagttaattagatgcaactaacagtcgagatctcaacaagacgcgtgggagtactgtgggaaccagaagcgtctgcccgatcgagtggcgatcgaccagtacgcgcgcaagggttgcgacagcacgaggcggtaaatggggttctccaccgtgattctgaccccggatgaagggctcgacgggggtttggaaagaagaatgcgagcagtaagaactatttttgtatatagatacgccacaatatgctagtagcaaaagcaatcccgttgagtagttggtagggaaggctggtcttagaacaacgcgtgtgaggcgcggtcacgtggatggtactagaccaatttcatctgattcaataagtttatttaggaagagaatattctcaaatcatcactatatggtcattccgatgtaaagatggccagagatggttgtaagtgggtttacaaagggctatacttcggactatgctacgactccaacatctatgagactacctataacacacaagtaaggaaaacccttagaaatcaaatttggagcttcaattaatgataaaatatacaacatcatggagtcatgagaaatatgctccgaacaatgactcaactccaatgacgacagacatgtcaacaacaactcaacggaaagtaaaaataagccgagagggatctaagccctaaagaaaagcaagaagaaagaaagacaaaagaaaagaaagaaaagacaaaagaaacccattcctccgtactccatatcaatccaggcatcagtctggcaggccttcgatacctctaccagcactgagccaacaccaagtcccctagacgatggccgtcgactttctcaggtacttcggagtcagatcacaagtgatccggtcgatatccggagtctgagaaatgtggcgagccacatgagcaggcgctggcgcctctgtaaggaacattagcatcaagaacaagtacattttgttgatgggatcaacttacttggttcgttggggccatgccaggcccccatcttctccttccagccctcatacttctccctgcagtcctgaagcttgggcttaagcttcggcttccactccgcctcatacctgggcttcaacttaacccagctaatagagctatgagtatttctttttggatccattggacagatggtgtacttacattgtgcaccccatgaacacaccgaaggcgaccacgatgagccccaggagaagcttggtgaggatgacttccttccccgtgtcaacctcgtatttttcagcccgaggagagagcatgttgtcgttgacaaggcctgagataggagccatgtctttctaattgttgtttgatgtttgggaaagatgtaatgaagtctaagctttgatggagcttatgaaagatggatgtagttggagagttggaaagtgaagacagggggaattcacgaggataatatagcccagctgcgagtgctactaagcttgtttcggaactcattatggacggagtatgaagctttgagatggtttccgttacccgatgcggtgtcgggacgatggtaatacctcacctactaaaccacattaagtaggatgaaccttcaaatcctgggtttgtttaggactttcctgcttcgggaacgctctgggtaggtaactttgatgtgagtcaggcattctactcctggcatcgggggtcaaccgacggcgagaagcagttcggtcattgttattccgtagcgaatgtagacagcgtgggaggaggtaacgagaataaagcctgggcaaacagtagtgcattcatgaaatagttttgatataataaacatccaacataatgtaggtacaggttttgggtccaaacgccatctatgcaaaagacccaagtagattaagacatgcccaagaacaaatagatcacttgcgcttcttgccgcgtccacggccaccagagtcttcatcggggttcttgcgcttcttgccctccttgcgccagtaatcattgcgctctctcttctcgcgctcggccttcttctccagaccatcagccaccttagcgcggtagaccttgcggcgctcctcctgcttgatggatcgcttggcctgcttctcgttgcgcagggtagtgagcttctgcatgaggtcacgggctttcttttcctcgcctccgaggacaacggcacgcttctgcatgtaggtcggctccttgtggcccctcattttggtgatctgcgacttgaagggaagctcggcggctaattgtcttggcacgcggagcgggttgaagtgacgggcttgtctttcaatgggcttgtaggccgagtctttaatttgaggggtggggatgtcttgagagtgacggacttcaccagtcaagcgcatgccctgccatccattatcacccttttcgccatcgacttggtctaacaagttggtcacaggattgtagtagcgatggggcttgatggggtaccaagcacgcaggaagacaatgtcactcatcaaaatcttgtcctcgaacgtagcacggtaacagccatcaggtttggatagcgcacgcttgatttgaccgcgaataccagagacagtcttgatggatgcaccttcgaacttggcaatttcgagcgcagaggtgaacatgtccttgatgaaggcggtgttcttgaagattttgtaaggatgaccagtgagtttaagcttcttgacaatttctgtatgctcatccacgctctgaacaacaccagtggcggcaatgcggaaaccaggattcttgtttgagaatgagttcacacagcagaaaccggtgttgggagcgacaaggggaccgtagaaggtagcgaagcagtgcatatgctcaggtgtgtacttaagcatacggtttcgcgtccgactgtcggaggtgctgtagataggcatggtctggaagcgacgccaaccaagcgagaagatcaatggatcgttgctcttgagaatcttcttgtgccagcgatgtttcttaatccggatctgcacgtagccgaatcggtcttcagtaggtgagagaccaccaacgatgacagggaagcgaggattgaacttagagacaaactcgtagggtacgttttcaaggacgatacgtgcgtaggtgccggctttgtaaccttcagcccgggcgcgcgaggcagggtcgagtgtatcgaattcggcgcggttgatatcggcctgcttttgcagcttggccttttgcagatcgtaccaatcgtcctcaccgaactcgccatcaataccatcatgcgttccgtcctgaacttttccgaaaccttcacggtcctcttcctcgaaacgcagcttcagttcttccttctttttggcatttcgctcgcgctcagcttcgaggtcagcagcctttccgggctcatcaccttcttcttcctcatcttcatcaccgtcttccttgataccgttgaaaacctcgccagattccaagtcttcgtaatcaccgtcgccctcatcttcatcctcgtcatcttcgtccatatcaccatcctcgtcatccgaggcaccgccagacagtttgccagtgatgaagcggagtttaattgattcaagcaactcctcgtcccgccacttccgctccagctcatcgtagtcgtactctggaacggcgcggaagtcggcttggtcttctttctcgttgtttgtcttcttgaagaaggtctcgccttcgtcgtcagcggttttgtcttcctcgtcctcctcctcatcatcggaatcttcaccgcgccatgttttcacgacatcaagtggagtgatcgactcgtcgtacatcattcttgacaggtcggtgactcggaaaggagggcgctttccatggagagacttggcattagcgagcatgttctccttccatcgaacattaccctcctcatcatcttcatcctcgtcttcgtcctcgtcttcatcctcgtcttcatcgccgctctcgacttcctgatccgagaccgaagagatagagcccaggtcagagtcgctgtcagcgaatgccatatcttcttcctctccaccggcatttccgttctgtttggccttaaagcgggcttcgaagtctgcaggtgcggacatgtcgagttcgccttcatcgcctgtcacatcgttttcgtccatatcttcatcggcctcttcttcgctatcggatccttcggggatatctatgtcatcttggtcgggtacggctacgcgggcacggcgtcgatcttttcggcccgtctcgtcgtcgtctgctttatcgagggcctcaccaccacggaacagacgaacaccctgatcggcctcacccagcatcttgcgctcgccctgaaggccaacaacaaggtgctcgccaagaccccggcgttcctcatcctcctcatcctcgtccgagtcccggtcaaaggtattggtcttgatatcgatgtaaactgcatccttgtctaccaggacaccgcccacatcagacatgggagcgaaaagcagcttctggtgctcgccaagcttgcgcctgttcgactttcccgttgccttggcgatctgctggttcatgaagggagttgggcatggatcgggcaagccctcaatattggcaacggtcagatcaccaacaccaggaacatggactcgggcgccatgagaggggaagttggtgccgcgcaggtagccgtagagcgcgactgtgcgatcacacttcgggttttcctcgatctgggtaggcggcgtgatgtccaagaagcgatctgcaagcgcgtaagggtgcgagttgcgccacacgagcggacgagggtttttcataacggacaagaatcgcgaaaggttgtgcacttcacgatcggggtaacggccgtttataacaccagacaagtaaaagagctttgcgcccgcgtatagctcactccagaaacggtgcttcaggcgcttcttcgcgtccttcaaagtgctgtgcttcttgaattgatcaaggtgagtaagaataccgaagacgttacccggcataccggccgtcgataaggcgttcaaaaactccatggtctccatctcgaatccaaaatttccgtcaatcatgagaagcacaatatctgcgatcttggaaacatcgatcgcggccgcaagagaatcggaagggcattcgatgaaggtgagacgcttgcgcttggtcgtaacaacggtcaacgggccttgcggcgagctgagggtttgcttggtgtagcggcggatcagagatttgagcagagttgtcttaccaactcccggcggtccaacgatggcgacaacgactggcggagcctcctcgggcatacgatccacgaggggaacatgaagtctcttttctctgacctagaggagaagtccgggttagcatcaattgaccggtagaaaaattccatatacatacatcatgcgatcgcgcagcctgcttattgagctttccaggcctggaagtgacgaatgcttttggattagcacctgtaaagaaaaaaacattgttagcatgggctcgacagcaaaattgcagttttattggaacgatctcgccgtaccctcaaatttcttcttctctttggcagggcgatgcgccctgtttgcctgctgctccatgctatctgtcaagaggtataatacctcaacagatccactccttttattagaaaaagaaagaaaggcaagcgcaatccaggtagacgacttgttcccaacgacggtcaaaaaattagcagtaattatttttttgccaaagcggagtagataaaccttagtcaggggatctggagtgtaacctaaggcatcaacatttatccatctggcctaaggcataaatccttatcagctacccttatcatttaccggcccgtgatcacatgtaccggcccggtggctccactccgagccatgccctacctcaaagactccgctgcttgagctttcctttagtgtggattactagtgttagattccgtgcgataacgctatctaacatctcttaaaaaccagaggatgtaatttccctccgcgcctatcatgcggggcagaagtcgttgtacccgtggacctaatctaaagtacaagggctgaccaagcttcgacatcggaaaacccccgatttcccatactataaattcaccatgtatcctgcccgcgggccctatgagttcaatgtttctccgtatctaataaacctttgtgtaacatccaatctctaaactaccccgccaactgcatataatgtctgcacgccggccacccccagcttacacagcaccacctgattcgggggttcatgcaacttcccagttgtaccgctcaatctccgaaactgcatctagcccctctgcacggatcccgaaggaatcattcactatcagaccgtgttctgctcaagcatgggttgtccctgccggccacatctgccgcctgaccactccgaagggaccacaggtgggcgacttaaacatctggaacgcaaataacccacgagagcggatgtgggctgcgcgtacccggcagatccacgccacccacgtctcagtgggtgatcgcctgtggtcgaacttgccgtacctgcggcctctcgtgacgatcacgggtgactcgttgggtggcgggcagctgcatgatgttcttggaccggatggaaagcggaacccggatgtcgtgttcggaactacgcagtttggtgggcgggtgcatgacttgatgggcactcgatgcgatccttatgtgaacttgctcatgggcggagagacctttgacttccactgtcattcgaacctgactcgttccgttgtcccgtatggattgacggagctagatgtccatgatgtcttgaatgtgtttcaggtgacagggttggatgaggaaggaaagtacttcatggagacctcccctgcaaaggcgggtgagtacttcgagttctttgcagaagtggatgttctctgcgcactatctgcgtgccctggcggtatggcaccatcctatacgaatgtctcatttcaatactaattatatgctcaggtgatttgtccaattggggttgggatgataaagaaagtgatatgggatcaacttgtcgtccgctgggtgtggcggtataccaactggcagatgacaaggtcctggaagggtggaaggccccagaaagccctaagtacaagggaatgcatgggatgcagatgcctccccgcgaagaggatggctatgttggacactagggtaagaatatgaaaataaattatagagtcgtctattgaagggttcttgtcgctacacatattgccccgcgattctttagatatgatgtcattgcctcacaccgttacatcaacgtcaattcccccctttacaacatcccttgtaggccggactaggattagtatttaggaaattataaagccattcaagcaagggatttaatgagaatctggctttcagaaattgagtttgtagaagccaccatcccatgtcagacaggcatgtatgaccaatcacgacattttcaagtagcacggaagtaccgaagtatacaggatacatactatacaacgcgaagaaaggtaaggtgaaggagagaatgagaatgagaataaatgattggagggtacctgtttcaacgcaccttcccctaaaaaaatgcgtagccttcccctcgggcccctctcttctataaattctatttttctttctacttttcctcttccctttctccacgttctccatcttgacacatatcttgctatttgaaatcatgcctctctacaatgtgagcttagcttgatcttcaaaagtatccggactaacatctccctagatcactctgaagaccaacgcccccgttgaggagctggaaaagtgtgtccattaccaattatctcaaatgccttgatactaacaaatgttttcagggccaaggccttcgccagggagaagggtggtgtcatcagacatgagtacagcatcatcaaaggcttcacgtaagtgtgctggtttgatctatactatcgaggtgcatgctgatatatggatcaatactagtgttgagttccccgatgacaccgttcagaccctcaagtctactgaacatgtccacattgagcaagacggtgcagtgagccctcactagatgtccctagtcaacatgactaggaccgaggactgcagtccttgtgggtggtccgctttatgattgaatggaaacacgacatgcttgatatccgggggttattttctttttctttcttcttgttcttttttgacaagatggcttgataccaattatgcgaccttctttcatccgccatgcaatgtacttctcatgcttatctatcttttccaggtattcatacagatgatcaatcttcctgaatccaactatcagattgaagatgtgcacagtgcgtatgaatttaaacttgaaaaagccctgtataacacccgaagtataaattcacgtaaatacacctctcaccggtgagatagcgactttggaggttcgtgctgatctgcagcaattggaccgatgatatccgcaccgccggtgcagatcttccgtcccgggctctgacttccacttatcttgctccctatgatctacaattcacaatgacaacctcaatagctagaaatatgccttttcggcctagtcgccgggctcttccaattgggcgacctcatatttgtcgccaatcgtccacgcagagtcaaaactgggctggtcgcccatttgatgtcgccaaagacaatgttgcgcagctggctgcgagtccccgtcggccgttgacacttgcggacctactaaagtcagtctgatatagataacttataccaaagccgaatcaaaatgtgctaaattcatatccatccctcagacacggccgcccaccattgaacaaagaggctctactagcctctgccaacttcactctctccctcctacccgcccgactagcttctcggatccacgcattacgaaatctccctttcatcgtcgtgtcaaaccctcatgtctccaaaatctaccacaattacctccattcgctctcgaccctcttaccatatcaacagcgccgcatcacgactctcgaagaagagaaacagttcggggatgtattggcagacctcgtacatacccatacaaacacaatcccggtccttgctcgcgggtttttggagtgcaggaaatatgtcagcccggccgatgtgacgagcttcttggacacgcatctacgtgcgcgtatcggtacgcgcttgatcgcggagcagcatctggctcttcattatgcatctatgcccatcaacgataacccagtcgatggtgctgatgcacctgcgcccgagaactcgattccatcaaactatataggcgtcattgacacagctttgcagccggcacgcatcatccggatatgcgaggattttgttggggagatctgtgagctcaagtacggggtacgaccgcatttaaagattggaggtgagcccgaggcttcatttgctcacatccctgtacacgtggagtacattatcacggagctgttgaagaacgcattccgggctactattgaaaatggaaatgagcgtgagcccatcgaggtgacaatagctgctgctccagatgtgccaggaaatcacccgtcggtcccgaatgatatcgatgctggctttgagcttgattcgaagcttgccagcgccaatgtgaatgaaatcattgggtactcggccccatcgtctcagagtatcacaatccgtatccgtgaccgtggtggtggtattcccgccgaggttctgccccatatctggtcgtacagttttacgactttctccgatatggactcccagggctcggagaacggcaacatggatgccttgaataccatctctgcgagcggtggccatctcagcagtattgcaggtcttggttatgggctgcctctcagccgagcctacgctgagtacttcggtggcagcattgcagtgcaaagtttgtggggatgggggacagatgtttatctgacgttgcggggagttgggagaatcgactgagaaaagaaactgaacgacagtactaaataccctgaacaagatcattatttttggctagtacaaccaactcctgatacctgcatatagcattgccttctacatccttgccttgacggatggctggataaacatatctatgaaatccgagattaaagtatctggacgttgaacagcacccaatatccgaccgatctctgttgcagagaacataagtcccatgttttggaaaaacttgtcttgtatcgcggctggtgttttgggatttcgcgcatgtcctacgggatactcaatcagtatttgaggcaacgaggacccatctttgagatggaccgtcattcctgcaccaatactcttcttgtccagatccaagtagtcctccgtgagcctagggtcgggctgcaccatgattctctctcgcagggcttcaagctcctcgctcttcgcccatgagctttcgtctaaatagtcagcagcctctggtgggctacccttcaagaaagccaaggtgaccacatactgaatgcaatggtcacgatcagcagcgttgtgcagcggcccatgtttattaatgatcaaaaaagcagcagcagtcgttcgcagatctattcgctggatctgtttcagaggatcggacagcccctcttgtcgaaatcgacgcgcttgcaaaatggctgcctccacggccgagatagcatgcccttctaccggcatacttttgaacagcacattctgtaccgtccacgatccaaatggtcgtggaaggataaaccccgcctcgccaaaagtccgttcccaaaacccccatggtttcgcgctcaacgctcccggcgaaccaggctggtcgttctggaccagtagagccaactgcacagctcttctcgccgcatcgcctgctgcccatcctttcctcgggatagtattttcgccggatcggtacacccggtttggatggccatccatccaaacgtgagaaatagtcgccatggcttgttcatctgtcatcccgagcaaccaacaaacaacagtggcagaagccaatttgaccagcaccacatggtcgattccatagacattgaacgcattccgcatttgataacatccctgtatctcgtatgccttgaccagcgcgacgagcagcgtctgcatcgtcaacggcggaccataatgaacccgtcgaccagacaagcttgcacgcgacagccagtccatgactgagagtatagctccgatattatctacaattcaatccatatcttagtctcacgagcacaatttccagccccatgtcttcaacaagccatacctgaaggatgtccccactccgcacctccaagcgcatcattatgatccaagtaccgaatcaggacacccagatcgaaagcccccttgtccggatcgacctgcaactccgttcctggaaccctgaatccatccggcacgactgtgccctcgatcacgggaccgagaagctttcggcattcggtgctcgtcgctgccgtctcgatggcgcagcccattgcgtctagcagggctgtccgtgcacatttccaaatcgcttcgtcgtcttggttgagggagtaatggtagacatagttcactatgtcgactatcggttggtcgtacgggcgagacatttatggatggatgcgtgttttagcggtgatctaatttgttacgattgagatttattggcattcgcaatattatatttcgtgtagggcacatgtagaagtcctcggtggatttcctagaatgatccggtcgtacacgtcggccttgttcaatgccaatatcgaatgtttatttgtcttagggttactcaaacgtatgtgacttggtttatcacggcgtagctattggctctactaggtgccgtcgcggtccacacttgtcagcaacctatagaatggaagggaacacacaattgctaataagtagtgtaattaaaaatctctaaattgcctttttccaactgccagtaccaaaaaccaaccctagtagttgaatagtcctatacatgacagattgaagacaaactagacaaactacctaagcattacggcgggatggacccgattaggcaaagtaagaagctagttccatggtttcaaagattctgagagaaccatctatcatcgctttcgttcattctactaccgctatcacctcacctcgatctgcgtgagctaagcatctacaacatgcagtcgggcctcgatatctgctctctagcggtatctcgattatggggaaggcgtcttccaccctcagagttccctaagctgaatacgctagccggtcttcctgtcgagctattgttatcaataaccgacttcctccctctagatggttgggtttgcatttcactctgcaatcgccgactcttcgccatattcaaccatcgaatcaattccgcccccttgttaggagttgacaaactgcctgttctactccgactggaacgagatctaccaccgaattactttacttgccacatttgccatattcttcataagtatgatgactatgatggctccgaatgcttcggtctatctggctcagtttacgacctagtgtattgtcctcttccatgtattaagaaatggaaagaagggcctgctaggttagaatttagattgagtgaaccaggaccgatcgggttccatgtgtatcatagggtattttttctgcatattcagcttgctatgaagagatgctgctatggagaaaagtatggaatcagcactgaagcgttatcttacacccaagttcgaacttactccgatgaaccagaattcacctctctcttttcgaccgacgcgcatatgcatccagagatactggggctttgtataagaacacaacatatggtatttgttcactccagcaaaccaaagctactactttctcgaccgaaaattaccgatgcgaaagatccttctgagattatttatatttgcacgcatgtttcgcgtctaaggcgtgctgaactacttgacctagtggtgaacgcttatcttactggagagaaagcccctagttacacttttacgtgtgaaacatgcaatacagtttgcttgattgaagtttgtgaatatggatctgatttggctctagtccttacaacgtggattaatcttgggcctgttctaaccccagatgaccctcgatggaagatctattgtaattcgccggatgcttctgaagtgactctcgatccaaatgatctgaaagatagtccacgggtcttgtttgaaaatgtgtcgcctcagtcgttagaggccttacggtcatgcaacctttcctatctgaagggccagcgatacaagaaggttatgagcctactgcattggcacaaaagcatatggtatctaccaagtaatgacttttggggaagtcattggaaatacggacgaacccacctcgctatcatatgctcatgtggttatttgtctgcttgcttccttttaacctgtcttattattgccatcgtacattattatggctaaacgagaatgttggttgtttacaatgttagcaaaatagacctattaaagtgacctctagttcgagtgggcaaatagaggctgaagacatctactaacagattgaaaagacaatgtccaaaagaatttaaaagacagcgtgcttgcctgaatctacttccctcgctcttgcctagtttcactccgaggccttccttcccataggcattctactactataacatcactttattatcatctttctatcgatcttttttagggtcttttagaatataaccgataacctcagcctttctttaccttctgtgaacttgattttgcaaaatcacattacgatcagattactctcacaatggcattgttccttgtacatcagattttcatttcattctaggcctcgacatttccgcgctccttttcgcggactggctcatcaacgcttgtgtccgtccagttacttgggtgcagctgagtgattttttcttttttatcatatctggtctctttctccgtgagtgagacctgctatcccaagctctaaggcaaattgtacggtgcttacctttgacacacacagttggtcttgagacttactgcttgcatcctcggttgccctgcttcttgcaaggaagtgcagatcaatatgtcacaaacactaagccgggaaaccaccggagtgttaggtgcccgttcgattcaaaagaattgagtgcattttcatcagaatgctaagtacagaaagggaaaagaatagggagaagaaaactatctacgagttccgctccctaggtttaggcgagctctttcagcaaaccacgcaaatggtgattctagcttatgttctaggaagagcgacttcctccataagtggaaagtgcatatggccgcggtacgttcagtgtccctaccctcagatcgtcccaggagaagcacacaatactaataaagtactagcccataatcagaattctcaatctcacaatggtactgctccttgttcagcaaatcttcacctttattctgggcgtcggaatctccgggctcctctttgcagcggcctggctggccatcgcctgtatccaatgcgtgccttggaacctggatgtcatagattataagccgggaaagcactggagaagcacacagtatcaataaaattttaggccaaccgtctgcagaacataaaactgcagatccccactggacttacggtgtctgtggagtaatctggggcgcacacagcctcatcatgcagcaaggaaattttggaccagcaaaaggaaggaggccatcgagataggagtataagctgggggcgaagtcactgccccccagtaagatgtcgctgtatttgggggggacaagttaaaactgatgcaagtatacagtctacgtgactgagaagaggagctactttaccaatgtataattttgtataggatatatggaagcaaaacaagagatattccgaaactccaataatatttatttagtagttatgtggctctacataaacaaataacctttagaatccaccaacacctctcactcgctgtacagcgccaatggctcccctagcccaactgaacctccgcttttcaggccccattgagcccggcggagtctcgtcggtcttcgggtcatgccagcagccatccttggtacttgcagcgccgtatttggcagtattctggttacgatttatcaactccgtccaagcacgacaaacgagctcagaatcaataagcacattgacttcctggctgtggaagaatgactgggtgtcgaggtttccattgcctagaaagatgattaaataaattaaattgtcgtaatgggatctgggacttaccttgaatcgcaatctgctcatcgacaatcatcaacttgatatgacagctgcgcttcttgaagctattatgaatcggacgagtctggtccttgccgacatagtagcatatccgtagacgagacttctcttcgtcggtttcgagggagttgtacagcctgtttgaaatcatctcgttggtcccattttgaaatggaagtagctcgcctgcgtcgttatagccaaggcatagatagcaggataccacgacaccccggcgaacggcgtccaggatgggttccagtagaggttcggcattcatatttggtgtctgaatgaggattgagcgctgggcgttgttgatcgcggacagccacgccgcgttttgcggagtgtggacgctgctgtgatttggagcttgaagaaattgaaagttagagtcatacccggctgtctgagggagcttatctttgtgggtttgacttacatccatatggttccctgtttaccaatgccattgcgaagggctcgtgtcgtggtatgaccatataagggttgaacatatcatcctggtcaacttctggtgcatcgcctgttgtgtcaagctggatagttgtatctgttgagttgttagatattatcatagatagtgcacaggtaccacatactgagatgacggctaacagcctgggtgcgcgtttcgtcaccttgtgggtagacagaatcattgactctccgggcctcttgttcaaagtcattatcataatgtggagagtcggtagtatgctcaggaagaactgtatcgccacgctctgtagaaataccgtcgtaccttcctacatggcatggtatcggagcatctttggctggggagttcagaagtggaaagggggggtcgagagcctttccccacgacagcaaagcagcatcatagaaagaatcaacaatcgggccctcgatatgagatagcatctcaaggttgtcgttgtcttgtatgttactgctctgtatgagagccatgcgccggtcaatcacggtaaactttgcatggaacgttccaacgacaggccggtggtagttgatgacttggagatcgacattggggatctcgctcgcggcaggtagcttcacttttccaccgacatattgatcctcgtggacactcagtctattctcccatgcctagtggtttattagaatcatatctaggtcgtgtgcgatatatatatcaaaagtaagagcactcacctgacgaggatctccgcgatcatacatcaacttcataatcactttctgtccccgttctcctgctcgtttggagagttcccggatggcattcgtcaccaatgtcgatgcatccgagtggatccagaaattggtacccagaaagacttcatgttcagcgcgcgcaatgcaattcgctaaatggcgacagagatcgggtagcggggcgacaatggtcagtggtagaactcctgtgctccccagcagccggggcgatacgacccctgacattgggttattttctaaacagcataaggcgtcatgataaacctggaaatatgtcagattgattcttcacataatgatagaggaaatttgttcacctttaaaaatagatcactcgtttccacagacccaaagttcccgcaagtgcgagctttctgcagctcatccaacgcttcccattctaactcattttcgacgtctgattgttccgcgcgatcgagtatatccgacgcgtcacggctctcgtacagattgtaaaagacatcttgcggcgattgcgacgagtcaagagccaactcccacgttactgtcggctcttgacacatattgtacaccttgcgtggtaccatcttgcaccgaactcgattggggctcggaggttgtcgaatgaataaaataatgccgacggtagaaaaggatacggtcgcagcagctagcttgagaaattcgacgcagttcaagagtgttccagtcaagttccacgggtggaaaataccatccatgactgggctgacgtagggttagccctgttctttccttcggggtttcttctttgtagagacacgcgtcggggacttcgatgcgaatggagtcgaacaacggtgatgcctagaatattttctcttagctccatgtccttctttccaaacttggaaggaccgttcagccctatgacgtctgtgctgtataccccacaaaagtaccgaggggatcttgacagccccggtatttctacgatatttctatatgctggaatattattgaccaagccagtagaatttgtatttattcttgaggagattaaagaatatacataaagctatttccaaaaggcgtgggagaaaaatcataccggtggctctccgatatatatgaaacatgaaacccctaagcttttctagtgcatctccttagttcgagatatctccgctctaaactctccctgttgcaagcccgcggcttcaggcacttcaatcccaaggtcaatatctcgcactccccaaacagagcgacggggtgtcttgatcccagtctgcaaatatagatctagttcatcgacataatcatatgcagccttgccagtaatggcgagcctctcataagagtcaagtccgcctaagcgccactcgggtaagggcttgcggcaatctcccaggtcatacacataaccagggcggcccttctcgtcaatcaccttccgacgggaaaacttgacgtcatgcccaatcggcgtgtagtccttgatctgctccgtcctaaatcccactactggatgaacaaactcaaatgtctctcctagtaggtttccctctttgtcaaaagaatcatagtttccaggccggcgcctctcagacccgttggcgtagtaaaatagcgtaaagctgtcttctagcgggcctgttccccagccatagctgcgtcgcttgttcacagaccggacgggagacgtggagggatgcttgagtttgaaagctgaagctattgctgcaaccttgcgttgggtccagccttccaaagactcgggggctggattttcgacaagcgttgaaatgtggcgttccctctcttctctttcctcggagatagtctcctcattgagcgacaggtggggtttgatccggtccagcatccaggagaaggtaatattagacatttcttccatgtcgccctcgtctttgagggtttcactcgaacccccgccgatgttgatgtgataaccggggaaccacacctgtgtcaatgttcgggggtggagctggtgcttgtggtcatcttccaactttaggagcacgcgggtctcctgattcaaggctgtggccatctcatttagctttcgggctgcgttgttgacatcctcgtcactagccctgccgctgctcttgatccggattgcgtcttgcaagagatcgttccattttttagctttctgatcgactattctcttctgagtttgtatctgatctgaagtgacgtttccaagtttatggagataccacagagtgggcgagaaggcattgcggtgttcatcgagcgccaaggcctgaaatgcatgtttgatatctggaaccgtctgtcactattgtgccccacaaaccaccttgaggcaagaaggaaagacagatcttaatatacttactaggtgaaagtccaacattttcccatccattcttatccgaccaccacaacagccacgatggcaatgtcatccccagtacctccggaattccaatagcgccgaccgtatcatagacgccaacaatttccacgtcccttgatccctcctgagcccagtcaccctcgggacgcttctcaaacacgaaagtctcaccccgagcgccctgattctcatcagcctttccatcaatccactcaaaccagaggtcactgcaatagaagcgctcgccgggtgtatttttcttatagacctcccagagatcgggaaaccgattcaaatccctcttacagcaaataccaatatccgagattaagcccgcaatagcccgggccgtgaacgcgcccctcgagaaaccaaaacacataatctgatctccgggtctgtagttcaggacacagaagttatacgcttcgacgacattcccttctaagccctggcaaatggcgccttcgatcctttgtcccaaaggacctgaggtcgtgccgattccggagtcataccagactatttgctgccattgattcccgtgttcgtcggttccgacactgttcagggcgcggcagagacgcgtcacattagatgggacgtttttcttgcctgagacggcggactgccatgttccgtcgcagcagatgatgatgcgcttgcgcatggggtgagtctttgaatccctcctttgttgggctgtgcatgctggctcatgaatctcggaggatggaggcattgtgtatgtaaaacggagtctaatctggtataaagaggattaagcttagaaggtggcaatgacaccgtctatatagttttcgttttcacccttgtctatgttttgattggttttttcgcatggctaggtttcatctcgaggtcgctttgattatctgttttctctacctgcatgaagccccccgctactatacgaactccagcgccaccgtcagcagggttcgagtcacccgtacgggggactacagtaaaacctagttattgcggagcgaagcgaagcaagtataaaccagaagatcttactctgtacagtgactgttcataagttttaacaccccctaaagccccatatatataccgccttcctatacagtttacaccgccatattatggaggattgcggcagaacacaaggtaggggtacgtgtcacgtggcaaggttttttttcccaggggagctgaatatgacacaagcagggagttgatctagccgaggggtcgctgtgaagccaataagccagcaagagggctttgcgcagcattagaagttagaatcagaagagcgtggtcctcgtcatttcggatcgatgagccatcggaggacaggtggggaggtaggagggactcttcccgggcaagatcactcgtacaatcccgtcacgttattcgttgtatacagtcctaggtcgaaataatttcttgtcggagacctgggggtatgagagtgttatgaaatgcacggacctgcgctttggatgaggtgttgattgaatataattccgcagtctccactgccaactttgattccgcatggtatagtttacatatacaacatatttacaactagaaaaagcttgtcaatcagtcatcagtggtgcagtctcctgaaattagaaattcagagatctccagcgatgtagccatcgcaggcaaagattgcgagggcctggggcagactagcgcccgaaatcttcagttgtacatatatcgctatcacttgtgtgactgatgagatcttcattgcattcttagtgccccactagggtactggacacgttcgaaatgcatcaagctttcccaaaactccatgtaagcacttgctcggtatcggcatcaaaaaagccgatctaccttatcgtggcaagatcgccgctaattatattaccataagattgtccgtacttagctcggaagcatctatagagtcttgtgagaccacttcaggccattcccatagtctagtggaaatcgattcacaaagaggggaagaagcatagagcattgataagagaacagtgaagcaaatccaactgtgacgtgacaaaaccggcagaaatctttctcaatattagctgtggtctatacggagtactccgtacgaagacagaaaaataattttcaatatagaaagtagggggcctgacaggtaggcatcagaagcaccatcctgaggctatgctcgcgtaaagaatccttcacagtgatgtacatcgtatagaaacttgcgataatccctgtcgcaaagttgtgattgggcagatggccttttccagtgatgggggccgtgacgggaatattggcgcggaaaaaaacactggagtaccataagcacttgcgacgatccatgtaagaaggaaatatgctaatgcacataatccgtttccatggaggagcaagaaggggcggtacttgattgagaatccgaggatgtttaattggggcgtgtcgcaaatgtcatataaactagaggctcatcgtttgttctgctattgaattgacacccaagtatgaaagccagtaaactcaccagaccggatggcaaagtagcccggctgcgagcatcctgtgatgcttgcaacgaatccaaagtccgatgcagtcaagccaagccaacttgcgcccgctgcgagaagcagaacatcacttgcgcatatggattatcccgccgcagtcacaaagatgccccacgaattggaactcaacctacgacagtaccagaatcctccgaatcgaccggcgatgcgtcctcgcaatcagccgtgtgtcccccttctccttgccgggcaatagacaacgcaacacaatctacctccgagacgtctgatggaatatgcaacaaggacacctttgatatgatggctgacagcctgtcttccttccgaccaaatatgggactgtataatccacaagtattcgacgcgatcgacaacacattggatctacatacgggattccaccaagtggaagacatgctggatggctacgacttcctcgaccaatgcctcagcctacctgcacccgggcatacagcaaatgaggatccaaacaccgaactagaagctacaagttcccaaaggaacaatcatcaccactcaaccactgagagtcctagccatcataagtgtagctgcacatcccatctgatgaaacaattggtatctttaccgcttgcttttgagaatcaggcaaccttatcatttgatgtgcagctctcagaactgaaactagcagtcaacgtggcaaaagcctgtatgggttgcagttgcaccttgcatgatgatatggcgatgtgtaagatcccaacacgttccacccaagtcacatcgtcacgacgttgttcatagcagagaacaatagaccggaactcttacaaagcaccatactgacaaatcggtctatacctttctagtgatgatcagcattcttatcgggcgagtcattcaaggatttgagaaaaccctgtcaataatccagcccatggcaaatacagaaactttgaacgcgtcgagcggccccccgcaccgcggcggcnnnnnnnnnnnnnnnnnnnnnnnnnnnnnnnnnnnnnnnnnnnnnnnnnnnnnnnnnnnnnnnnnnnnnnnnnnnnnnnnnnnnnnnnnnnnnnnnnnnnnnnnnnnnnnnnnnnnnnnnnnnnnnnnnnnnnnnnnnnnnnnnnnnnnnnnnnnnnnnnnnnnnnnnnnnnnnnnnnnnnnnnnnnnnnnnnnnnnnnnnnnnnnnnnnnnnnnnnnnnngggcaggcccgggcacgcacctacactgtcgtgggggacgctccagatcgaggcagacgaagaagacgagctgaagcagcatatgtggctgctacagttcaagaaatttcgaccggttttaaaccagttcaatacatatatcggccgactgggaggtacttatggctttggtgattctgctcaggttaaagcctaccagtgcatacatatgtggttggcgcaaaagatggataacgtgaatcatcagtataaggcccaagaaaagtgtgaggggcaacttgataggttagatactgtcaatcaggtagcgcgatagagccggagaaagtgagatgaagggaagaagcctggtagtcagatggacacaagagactggacctatgttcatattagaggattcacataaaatgactatagacgcgtacatgaagatggcgattttcttgcgggcaggtttagtataaagcaggggcttctatggtgcattgatggctcatggatagatcctcggtatagaatcaatttgtgttgttatgatgtatggcatgcgtgagaatctaactgactactctttcaaatccgaaagtaaccctagcccctatgcccctgcgtatgctctcattattttcccacttccaagctggtcatcgccaggtccctaagtgactcgagcgtgcaggacgagccgagcaacatgaccaacggcacatcggttgtcaagctctggtagaaccatgttcggaattcagccccaatcatactgtccatgccgtattgcagcaaaggcttcttgacatccacaacctcgtacttcaaaaggacgaggttgccaaatcgccggcggatgtgatccagcacagcctcgtcgagggtgtgacctgattgcatcagggtcgtaacctcagcaggtaggcttccgttctgcgcttgcgatgactcatccgagccaccgtccaaggcgctggctaaaagattggcgcgtggatcgtccaaagctggatgggacccttcgaagcctctcttgcgcaattcctttagtccgaaggcttctagacccgtcagaagatgggaagcggctaattcatcgtgtgcgtgcgatattcccattgtagcgctggatgacaaggcaagatcaatgagctggaggagctcgtcggcatcaatggcctgaatccctttgcgtaaaaggagggcctcaatttcgggattatcatgtagatagccgacttctgagatcatacccaagccaaccgcaacggccggatatccttggttgcgcaggaagcgagagaactggtcaaggaaatggtttgcggcacagtagttagactcggtcgcagtaccgacgctgccagagacggaggaagtcatcaggaagaaatcaagatgagagccccgtccgtgcatctgcaggctgttgtacaaattccaagatccttgtactttggggtcgatgccagtatgccagtattcgttgggcatgacagagaaaattgcttcattcagacccatggccgcctgcacaactccgccaatctcacccatggcggcagccgcagtgataacggcttcgacatcagacgcctcgcaaacgtcacctctgactacctcgcatctggcacctgatgcttcgaggtcttggaccaggtggcgtgcagctgccttgtcaataccggatcgacctaggaaggtaaatttccgggcacctcggttgaccatccaacgcgaaagagtgcgccccagaccgcccaagcagcctaccatcacatagctcttctcactgtcaaattgcgtggtgtgcctcaggggttggattgggatggtggactcagcccgttcaagattaatggccaccttgccgattctgctgcgcgatgagaagtaacggaatgcctgctcagtctcaccgatatcaaaaatattcagcggctcgaacgcggtgatggttccctgccggtagagtttcatggcctgggaaagaaggtcattccatagagagtgaagctgctcactatcggtgtggtagagatggctgagatcgaaggctgtgaaagtggtactttgtaggaattggtccatttctagacggccagcggtggtaaggtccatcttgccaatctccacaaaacgaccaaacgctgcacagcacctccacgtcgcgtgtagctgatcgcctgtcagagagttgagaatgacgtctacgccgcgcccagacgtagcactgaagataccctcgaggaaagaagtatcgcgagagctgaagatgttggatgctttgacgccaagtttatccaccaagaactttttcttctcatctgaagagacagtggtgaacaccttcacaatggttttgttagcatgcattccataaattgaacggtttcaattcgacttacctccgctcctgcatgtagagctaattggattgccgcgatgccaactccgccggctccggaatgaatcaagaccgtctccccagcctggatatgggcccggtagtgcaaggcatagatggcggtggcgtagactataggtaacgtagcgctaatgtcaaagctctccgcatcggtaagcttgtggcatgcccactgaggaagggtttgatatgtttggaaatggcttggtgccatggcaacgacacgatctccgggagcgaaatctgtcacaagagaccctacttgttcgactgtgccagcgcattccaactgacaggtggcgtcgggcgtgtcgactcgtccaaccaagacataatagtctttcgcattgagaccgaccgacgcgacccggatgcgcaaatcggtcgggccaatcgtttgtggagctttcagctgctggaaataaatagtgtccagctgcccagcttgctcgatggcgagtctcacgtctttggcatcgtgtaagctagactcggtcgtctcaagtccctgcttgttgcggaagagggtattaatgctgtcatcgggtgtgaaccgcgagacgtggaccacccccttgcgctgcgcaaattctaggtctggcttcttaccaggctgggtgagaagagataccagacgcttcgcagtcatatggatttgagtttcaggctcgtcaatatcataggtgtagagcttaagcgagggttgttctagcatcaatgctcgggccaggccagatacaagagcaaagtccggcctgtcaccatgcataatattaccattggtaacccacaccaataatgttgcgttgtctgtcatgaccttgacgcgggccatctcatcgtcagagatgacggatagaagaggagactttatctcacagaggttgaaaattgttgtcccgctcgagacatgtgcgggtgtgagctcatttagccggacgcgcatcacccattgtccttggatgggtttcagggtatccgccagtgcagatccgagcgcagttttctcacgctcaacgatgaggaatttgtgcctttgcagtgaaacttgttgcaattcctgcggcttgcgcgcaacgataagtgttgtaccatcctcggaaaggcggacgggaagacaatcgagaccacgcgaggcaaatgaattgcttgtcaatccggggcataaggccaaaatggatgcgtcgtcggccatcaagccgccaaaggtatccacggcccggtcgatatgttcgttcatcgccggaagtaggatgaggtcatactcatggtccagttcagtgggactggagcagcgctctccagtctcaaggtttaagagacctcccaagatagtgccatcatcagaaactgatgctgtgctatatgcggacaggcgcttgaagctcccctgtgcggatagaagtcccaatacagccagggtgatgtcttgcacatcatttccaatttccaaaatacggaggcggggatttttgtgcgccaaaaggtccagcatagcgcccatcttgaggagcgggccggacaccggtgaatgggcctcatcagcaaacttctggacatggtgctgcgcatcatccatggccatgagccccagtccataaatgtcaggcttccaaagtacccgaagaactggatggcgcttatcttctatgtctgcttgactggtggattggtacggggagagtcgaatatcatcgaattgagccacaatttgtccatcgctgtcaatcatttctataccagcatgagtgtatccgaatccaatccgtttgacgactgcatgcatttggcaagtctgattggaggaagtagaagtgtggacgattgccgatggcagcctcgtgggtatctgggcacgtaactccttaggtttgccattggtggctgcaaccacagctagttggatcatgccgtccaaagcgattgggtgcactggatataccgaaatggaatcgccacttgtcttcaatagaggcgctgtagcactagcgaacgactccgatttcatacgcggggtataaaattcggagatggtttggaaggttgggccatagttcaacccctgcctgatgaatttttcgtaccaagtccgcttggctgtggattcaagcgctccgcttggtggcttatattttgactgcagagccgcgttgcgtgggtgaatagcgatcgatccagatgcatgctgtaccgcagatccattgtggtagcttgatatagcaaagtcccaccaggtggctgatgtggctgcattggtaatgacagacttgtgcagagaagtgaagatctccgcgctggtcgagaattctgtgttcaaggtcaacgcgttcgtgatgttgacgttggagaattgaaatgtagggtccgtgcgcgccgcgtcggtggcctgcataacagcctccatcgccatcgccaaataccctgcaccagggaaaacgaccgtatcaccaagcttatggtccttaagccaggagacatcatccaccttgaggatattgcggaagatcttgtcgcgggcatttccaccggtgagtaggctacccaggagttcatgatgcggatacttgcgctgcctgtattcaacactggcgcggcattcgttccagaggatgttctcgtagttgaagcgatacggtggaagatctgtgaccacgcggtacatagagcgcacagacttcaaccctgtctggaggccattgacctttgaccaattgatctcataccctttgagccacaggtttccagcaaagctcaggatgctttccatcgagtccacattacgcttgattggggcagcatatttgagttctgcgccggcttttgccaaggtttgcttgatcggcagttccagtgaagagtgagggccaagctcgataaaacagtgctccgtgagttcatgaatgcgttcaatcgcatgagcaaaccgcacctggctttctaggttgcttctccagtaacttgctgtgaatccagatgacttgagctcaccagtcaccgaagacatcacagaggcaccctggggctgtcgaatcgagggacccaaactagggagggcccgttccaacagggcctggtactcttctccaatggataccatgtggtgggagtgatacgcctgcccgcctgtcttcagcttgcgcgcgaaaatattcctctgttgcaaagtcgccaagaagatgtccaatgcattctcatcgcctgagacggtgaccccctccggagagttgacgcaagccactcggatctggtcatccagtcctgctttcgcaatttcgtccgtggtggagctttcagacaagccgatagccatcatagcaccgacacgagtagattttgagacgcagtatccacgatagtaggcaattacgattgcctcggctgcagagacatgacctgcggcgaaggcagctgcgatttcacccgaagagtggccgactgtcatcgtaggggcaatttcccaagaagacagaagtcgaatgagggcaacttgtatcgcagtacagcatggttgagatcgctgtggtagatggatgaggcttgggttatcaacatccaagatcgcctccatcagtgaccaactggggggccctgggaggctcttgaggactgagtccatctccgtgatggtatcccggaaaagagaaaattccgagaggagctcacgacacatgccgggccactgagacccctgtccggtgaaaacaaacgcaaatggagtagatgcaacacctgtgactgggctggctgatgttacccaggtgcgtgtctggaaactatgagagctttcctgtgaccgcggagcaagtaaaaaccctctctcggcaaagtgagttcgcctggagcccaatgtatacgcaaggtctgcaatatctgtgtcaccaaattcatatcgtgcaaagtccgctacgcgggcttcgagggaggcggttgaggcagcggatagaggtaggatcactgtggactgggtgatgggcagttgtctgagctgccgagatgaactcaaagtcttggtaggctgctctaggataacatgacagttcgcaccgccgtaaccaaaagagttaataccttgagtgatgaattagctgattggtcttcttgtctgtcgaacacgccgtactaaccaacacgccgcactcgagacgagtggtttggccaattcgtcaactcagttggaattttgatattcctgtcctcaaccttcaactttggattgatgttttttaagccatgagtgggtggaatttggccgcgttcaagggcaagggtagacttgatcacgcttgaaattccgctcgctgcttcagaatgtccgacattacttttcaccgacccgatcatgagggggttatttggcgtgcgttgaaacacccgcgataatgcctcaacctcgatggcatcgccgactttggtcccggtgccatgacactcgacaaacgtaatgtcgtccggaacgattccacccttggccatggccttttggattaccgcctcctgaccatcggcgctgggtaaactgattccagatgtcttgccattcctggatacaatcgcatttcagcacaaagccaggagttggggagaaaaaaaaagcttcacttacgcgttgaccgctgacccacgtatcagactccggattgggtcaccatctcgcagggcatcttcgagcctcttgacatacaaggccccaatgccatccgcacgaccatagccgtcggcagaagtgtcaaatgtgtggcacgctgatgttccggagaggaccccagctttcattgtagcaatatgttgctcggcggactgaatcaggttcgcgccggcaacaatggcggcgtcacattcgcgattctgcagggctgtacatgccatgtgaagacagtagagtgatgaggagcaggctgtgtcaagaagaagactgaatagaagcgaccaaaggtgagaaatcataaattccagtggatatgttgcaatttacgacttacctaggtcctagaagattgaagacatggctgatgcggtttgccaagattgtagtgcctagacccgttccagagtaacggctcagactacactggttagctatgagacctaacaacggacccatgaaaaggacaatatgtacttactagtcagggtcttttagctgcatcaccatgtagtcaacagtgaaatttcccacataacatcctgtatttgacccagatgcttgatccagaggtattcctgcattttccatgcattcgtatacaacttcaagcatctttcgttgttgagggtccatatacttcgcttcgaggttgttgatcccaaagaaactgttctcaaactctcgcacgtcatcatcaagaaaataaccgccttctgtgatcatacttccggggcgatccatgccctgggggtgatagaagccgtcgacattgaaacgcgatttggggaccttgcattgggccgatctaccattggaaatcagatcccaaaattcacgagggcttgaaacttcccctggtaggcgacaggctgatgggagataaatattattacaattcacaaagacaatcaagaagcatgccttaccaattccgcagatggcaatggcctcaccaaggccttcatccgcaggtgatgaatctagtaaaataggcgacatgatgaggttcacgcggggcaaataaatttgagcagccaatattgtttcgaaaaagaagtaatagttcctatttggaacttattgagcgtctcttgatcatatacatatgtatatgtttaccttgaggctaagacccgccatatctggtctcattgtgctcattgaaagcgatcgccgacaaaacacctgcatttacagatatcggaattctctggaattgcatgatgaccccggtaaacttggggttaccgtgtattttgccgagaaatatgaagttttcggccatctgggaatcgaagaacgggcttcgcggctcgggcacatgcagtcaccgacgagtctctacgccggacattcaatctccggagtagcccaatcgcattttcttggggaaattttgctctggctatagattctagataacaaggggccagttactctgcttgttgagagatttctattcccgtgatcttgacagtgcatcagaactagcgacctttccagccactagaataggattttattcttcagatatgattaccaaggcacatactcgtccttcggtcctgataactgggtaaaagcagactggatcctgtttacaggttgaaatgctcatgatggaggtagttgcggcgaggggggaatcggacatgctttggcacttgacttcaagaatcaaggtatgttacatagaaaatttgtattaacaagttctgatcgttcaatgtttaggatacgtggtcttcaccactcttctcgcccatgagccacgggaccatttgaccgatctcggaatacactcgttcactgcggatgttacgaaggacagtgacattgagcagttgaaggaggccatttcaagcttgacagaaggcagtctgagtgtgcttgttaataatgcgtaagtaatatatgtctatttttcgttggctgatctaacgatggcttcaaacttggatagagggatatgtgagtgacgaagagccaaaagaggtgataaatgggctaaaccaagcaggctatacgatgaccgcaatcgatacagatgtgaaagaggtagagaagatgtttggtgtcaatgttttcggaccgatgcgaatggtccacatcttccaccctctacttatcaaagccagggggaagattgtcaacattggcagcgtgggcggtattgttccttatgtttatggatgcaagttgacttttgatcgcctgaactgtgctcgagataggagctgaccgactttgaagctagctacaatgcaacaaaggccgctctccaccactggggcaacaccttaagagtcgagatgaagccgctcgggtaagcctctctactagaagatagtcacccgcgctgacttcaataaatgaagtgttgaagtggtcaatgttatctccggagaagtgggcacgaacattttgaaacgggatcacaatcgcaaactaccagaggactcgttttaccgcccgctcgagaaagagttcatgaatcatgtcacaagaacacctcgtgagcatttatctatttagctttgtgagcgaattgcatagtactaacgcttgatacaggcacgactacaccggcggagtattcccggtccgtcgtcattgaagtgatgaagcaacactcgactgcttggttctggacaggagccagctcggggattgtaagatttggcgagcagttctttcctcgtacgctttgggtaaactctctataattccgtttggctgaacaccagcggtacaatggctaacatcctgtctctaggactggatattcactcgacaattcaacttgaacaagcttcgaatgtgagaattgagccaagtgactacatcatagaaagcgcacacttaaactagcttcatagaaatctttcgagatctacgaaattcacccagaaaagattcatcccatcacactggtaatagtctagttgtataaatttgattgctgaatgaaccgttccacattcggaagtttgattcaaaaagaacagcgacaaggctagactttcacttaactcatgccttggtatttcctcatttggcaatcatctcacgttcatgtcgtcactagcatctcaatcagtgcagatccatgtgatacccaaactttgaagttattataagtgtcacgaggatacaaaacctgtgatacgagggatgcatgtaactaggaaactaaagataggaaggaagaagaaagaaatagaatgatacggcgagcccacttataatatagatcgaccaatcatatcaacaaaaaccatcgtcaatgcaaacaaaataaacaccacgagcttgttgctcgtgacataccggttttatgatatatccagtcttgcagaccattgctttcatccagctaggtaatttgcatatgtaacgctttattagaggtatttaagggaacttatgaaagtggcaaagaatatgtatttgagaaatgaaaaggtcattagaaaggttattgaacgatatattgttcttctgtgtactgaaaaggtaagccgatataggactataaaatgatttcccttcgctctagcaagtatggattttacatgactgctgcagaaagatggcttcacttgcggtgatcactgcttcacatccgcgtagtccttttccaaaatccccaagtgctcagtaatctcttccccattcaccttcgtcggagtcacatcgagcaggacaaataacatgcgtcccggtcggttttcgtctaagttcttccacatatgcatacagcctcggttcacacctaattgggtcagccacaaaatactattggaatttatcgaaagcgtaagcaaagacttactcatatcaccaggcaacatcaacttcttctcgccactgtcaagtgtgagctcaaaagctccctccaccacgatgccgtaatcaattgataaggcacggtgaatgggcgattccacgcctgggccaaagtcaatcaaacgaacaacacttccgtttgagacatgaatggggggctaagagggacaaagccaagtgttagcagacgcgatccataatcagacaaataggttgatttgcccagcaaaccttcgtacctcattgtcgcgtgcataaaccaggtcattatcatcattcatgtccactggattcccagaggtgctgtaaatgatgtttgcgaccgccagcccatccaccatgatccggtggtggtctccatcatcgtcaacagcaaatacgcctttgccttccttgttgtgggttgtaatgaacctgcgcgcatggcgaaggccttcggccggaaacttggtaataggtcccttaggagcggacatggcaattttcccaaagtaaagtagtaagatatcttgtctttcgttatgaaaggttagagataattgccacgaaaaagaaatatcttctctatgtataacaaacctgagagcgtctctgctcatgggaattgtcggaacaccgacgtatatcgaataccatacgccctcctgtcttcaaatcaccggtaattatcaatataggaagtctattactagcgcagatatcggaaaactcgggcaagttatcaaaccccgtgacgaattggccctttccgagtcatcattagcaggagcttcgggaatacctaggtgcgagatcgggaattcagaaggtgtggcattttgaaaaaatataccgaatgccaacctacagaatcaagcaatctagtaattccaggatatacatgattaggaggggttcatcatcatcatatactaaaaaaaggacttcaagttaaaaatctggatcaagtacattacattatggtacaggactgaggagtagaccaattccaggtcgcttctgctctaaaatttccatcagttcttcccatagcttctccatcgccaatatgccttcttgacttcttacgaatggagacaatgctgatctgatgataaaaggcatgggtcagccacggcttgaaaattgtatgaagagagatattctcggaagggttcatactcatcaatatggccgtcatttaggtactttccatgacttttgtccccttgcgcaatagctgcgaccaatgtgcgacctccaacttctgtcgtccgagcggtggccttgctcagaagccagagcgcgaaccctgtgatcccgtgcacattctcgatgagaccagaagtgcagtagccaggtgtgaatgaattgacaattatattgctggtgccgttaggagggtttgaatcaagttgttttgccatcgccctcgcaagtagtatctccaacaatttggagatgggatacctgagaatgttacatcagttcttttcggccttgtttgcaatgtgtaaaagacaatagattgaactcacctttcatgcatcctggcttgctgtcgatcattcaaaacttggaaggtgttttgtgttttccactctgggagatcatacattacgtgcctgtcggatgccacgaaactgatgcagggctgaatcacccatgttttggatgagcgtctgagtgctggaagaagcagtatagccagcaaaaacgtattaatcacgttcacggtcaacgtgctttcatgattgtcggcccaaacaaagtcatgggtgtagatacctgcatttagcagaacggcgtctattcgacacatttccattcgggtagcaaattcctgcactgactcttgattggccatatccagttcctcgacttggatgactccagatcgccccgtcaactgttcgagtgtatccgcggctatctggcctttctcagctgaccgtgcagctaatatgagtcgactcacattcaatctcaacaaatgacgggcagcctcaaaaccgatgcccctgttagatccagtgatgataacagtttggccttggaagtcatgcgtgggaactggcggctcgacgaagagctgagagtagaggaacgaaagcgccgacatacttgcggtggagatttctggcagcgtagaaggtgatttacccaagtcatcggggaaattagtcgacagggttgtaatcccagtggcataaacatagagatccccgcttccccgagtgatcctaacaggtcggtcattacgcatttgccgagacgcaagagagaagggaaaacttggatctattcccgttctggtctgtcaatgtgcccatatccttctgtaatttgtgatttgaagccgcgtttggaggggcccaccacatggtgcagtagaatctacacagctataatgagtgatatcactgctgctttcgcatgttttagccatcaagtgtaaacatggcagcaattttattcttgggacctttagttctcatcctagccgtatggctatcgagctgggtcttttcgccaaaacagcgcttgcctcccggtaggagaaaatttgggctcaacctatactttgaactcttcattaagatcatcttgcaggacctcagacactccctttcattggaaatattcaccaatttcccagggcgggtatccacttgcggtacttaggactgctcaaccctcactttcttgcattgtcgctaatgagaactcccacagattcaccgactgggcgaagcaatatggtcccgtctttccactcaggattggttcgcatggtctcatggtggttttgacttctgcgtaccatgcaacacatctcctagataagcgctcagccaactcgagcaatcggccgccatcctttgtgctgggcgacctggtctttgctggtgaccatcctatgtttatggatgcgaacgagcggtggaaactcagacgaaagctttactttcagctaatgaatgaggcgcggtgtaacacggagcatatacgtctcgtcgaggcagaagccacacatttgctacgcgacttgtgcctcgagccggattcgtttatgcagcatcctgctagatacagcaacagcattatcatgagtttgggtaagtgtaattctcatggaacaagatcagctgctaatttcggatgatgttagtgtttggcattcgcacacctcactactctagcccccactgcattgagctgcaacgcatagtaacagaattgagcaatttgggcgagattggtgccagcccaccggtagattggctgccgtttctcaaatatctcccggagcgactctggggtgattggaagacacgagccgctcgacttcgtcaacgagtcctgaacctccattcccctcttgtggatcgggtactggaacgccgcaagaatattggtactgctgcgactttccttgatggagttcttgatcggcaggagaagctgcaactcaccagagaagaaatagatatcatgtgtggcaacttactcgaaggtgggacagacaccatggctacgacaatactcaccttctttcaagccatggtcacgtaccctgaagttcaggccagagctcaaaagcagatcgatagtgttctcaccgatggagagtgtccatcctggagtgactatgatcggctaccctatgtggcgatgattgtcaaggaagtcttgcgttggcgacctccagctccaggatcattcccccatactctagctcaaggtatgctgaaacttaccctatgatcgagaatgaaacagagcaatacgctcatatgttgatatagatgacgaatttgaagggatgaaattcctcaaggggacatccgtggtgctcaacgtctggggtattcacaatgatgagtcccgctacccaagccccgagactttcgaaccgtctcgatttgccgagcaaacccgactcgcttcagtttatgccaatgctggtgatgcacaaaagcgtgatcattttggctatggagcaggtcgacggatctgtcctggcattcatttggctgaacgcgcgcttttcatagctatggctaagcttctatggggatttactgttcaacagaagttggatggttccggcaatcctattcctgttgatgtcaacccggccacagcataccgcgatgggttcttaaatcagtgtctgcctttcgatattgacatcaagccccgactggggagacaagagatgatcatggtcgccgcggcaaatgcagaaaatgatgttctcggcgcctatgaatagtcttaaactagttaaaccacgaatttgaaggagacgacagttcacccaccctacatgccattttttttacccaaccggtggcctacccaaatcacgtgactggtagcctatcttatcttcactggttgggtcaacttctgtaatttggtttttaaacctcaccaataccttaacaataccagctttccaccaatcatttctcgtcaatacctccacttgaggcgaatcagggagggataacaccttaataagaccgtaatagtatgttattctatacattcatagaacatatagtatgtctgttgtataataacacctcaataagaccttgatgtaattagtcaactaggcccccagtaactgactagtaatgatttaattaatgtgcgcaatctcaagaccattaaataatcactgataagctcacccaaacggtggatatctcacgtgatttgggtgggccaccggttgggtgaactgccccggtcgcgatgcaccttcgttgtatagcttctataaaactctgagactaacgatataccgttgagaacagcattttatcaacctaaagatgtggaattgctagtaatgtacccggctcagagagatacatgatcatttcaacaagtttgcacttgcagcgttgttccaccgtctacaacccaaccgacaccagttacatagctcgatctggggctagtcataaataagaccacgtctgcaatctcttccggctcggcaatacgtgacatgggaataattgttcgcatcatctcagggagatccgggtttccattaatggctgcagtcaccataggtgtattgacccagcctgggcaaatcgcattgacacgtatctcatgcggtgctagatcgagggctgcaaagcaagaaaatataagcctggattttggagtttattcgaattccgacataccggcactcttggtcaaccccataacagcatgcttcgtcgtcgtatatgggacaatatctggcgtcgcgatatacgaattgcatgatcccacgttcaaaatgacgcctcggccaacttggcgtgatttcccctgtttgttcaaggtgctgacactctgtgatttcataaccttggtcacggacttgatacagttgagtgttcccaacacgttgacctgccagaaggcgttcatctcagaaacctccgccttatcgacgggcttgtgatgtttgaccccgatcccagcgctgttcacactataatcaatgcggtcaaatgcctgaactgctgccgtgaccatatggtcgacacttttctcgtcggtcacatcaacagccacgggaagtgcccggtaggtggggctagtagctattgattcactctctcgtgccgtctggagtgcagcctcgaggttcaaatcggctataaccacaccccgggcgccttcggcggcataggcgagggcgactgctttaccgataccactgcctagaaacgtcagaaccggtactacgaaagcctccgaacagcatcctaccagcaccagtcaccactgcaaccccattgagttgtagggccatgtttatttcgctgcgatcaaactttgaaaacggctcgagtgaacgaataccttgacgcctggaacatggatgaatctcttgttttattattgttcttcatcgacaaagtaataaagtgtacaaggaacactgattgtcaaccttggcgatcgctctgcgtggatcgattgaatcgccgacgtccccgacgttcccgacatccccgagatgagattgggattagatcacagaagtttcccgatcacggatgcccctgcattaagtccggtggaattaaacatcagtttcgctttcttatgtccgatcggtagttgttgcaggcggaacgagcgtgaccagcaatggggccaagaactacgcattgaatgaaacgggctctttggcagacttcgcaacattttgcataatccaagatttatttatactacgtatcaagcagtcttgtagaacggtcgaaaattatatctagttttcatcgcagacgtagtctatgagcaattttgttgggcggttttcagctgaacgtgtaatgatctccagatattcgtagatggggaaatcactatggatcccagtttcatataggtcccattctcactctccgatatgaatttaacagaaccttgatgtgtgccttgccactcacctttcagctttcggggcgcccctttttaacgcagtaagatcgtctttctgactgcatagttcatagcctaagaataccaagagatctaagtgcatattgcgtaaaagccaagttagccagcagagcattttaggaacaggcaaccatttggtcgatctctgaatcacaagtttcctcttcctttgcttcctcttggtatggaatgtacttcagcgccattcacttactctacaccagggggcagtgcgctagcgcggcttacatctcctgttgtacgtacctctaaggctgaatcacactacattttgttggatttgggggccaatctaccagtctgagcctcgttctgtcgatgtggaaatgaatttcccatgttcccgatctccgtcggtaacttacagggcaaaaaataacatctggatttttatataaaggttgataattgttcacttgaacaagtccaggttcttccatatcacccatctcactgtatactcaacaggatggtgcaaatatcgaatgtttggggctttggtctcgccattatggcgtctctggcagctgctgcaccaaaagactgtccagacggactctgcctgagaacacgggtcaatctcagtccactagaagtcagtcaagaacttggtccgctgatttccaacgcctcaagtatcttcggacctagcgattcacgttgggcaaatgccacggcgagatatcaacagtatgccgcgcccaaatttacagtggtggtgcaggttgctcgcgaatctgacgtttcagtcattgtacgtctccttttccggaccctcaaatccaaatctaacgcccgagaagatcaaatatgccaatcgcaacagtcttccattctacgcagttaatcggggccatggtcttcctatttcccaggccaaattcagtggcttggagatcgatatgcaacttcttactggaattaccatacagtctaacggaaagtccgctcttttccaaggaggaacgtacgatcaacaagtcatgaacacgctatgggaggaaggctacgttacaagtaagtaaaactcgaacaaaaaacacccctactcaaatcaaccaagggaatacctaacattgaatctggaactcagctactggtagttgcggttgcgtgggaatgcttggcccagctctaggtggcggacatggacgtcagcaaggcttccatggcttgattagcgacaacattctcaagctcaatgttgtgttggctgatggaacaactgcgactgtttctaacacctctcatacggatctcttctgggcaatgaagggtgcgggccataattttggagtggtgacaagctttgaaatgagcatctacccaaccgaagttcattcatggtattacaagaattatgtcttcacgcaggacaaattagaggacctcttcgaacagctaaatgtattgcagggcaatggaacccagccagtgaagatggccgctcaatatggcatttacatgatggactctactgtcagtgccaccgaggttagtattttccgatagatatccgagtgaagttttgctgataatttaatcacaaaacaaacaggcaatcatctggtggacttttggctacgccggctcgcaaagcgaggcacaacagtacctgacgccgtttgatgacctcaatccactcagttctactgacggaaatgttccattccctgaagttcccaacgtccaggggactgggatcaacaatgccacttgtgataagggtcttgaacggatagtcggtcccgctgggcttcaggtgtataacgccacagcgcaacgccagatctacgatcttttcaacaaaaacatcaagtcctacccagaactcgccgcttcagctgttgtgatggagggctactctgtggaggcggttcgaaaagtggactcggattcatccgcctatcctatgcgagatgattacttgctcatgtaagtctcagcctttgtccgggtggtttgacaattgcaagcgaaaggaaatatactaatagttctttgtttccataggcaaactaccgtctcctattccccaaattcgacactcgataatgttgccatagattgggttaccgagaaccaaaagttttggaacgagggccagccaacacgaaagcccactgcgtacgtcaattacgcatctggcagagaatcattagaagccatgtatggatatgaaccttggcgtttggagaggcttcggaaactcaaggccaagtatgatcctgagggccgattttcctactacaacccaatcgtctgataaaccaactgttcgtggatgacacgcgcacagtgcaaatttgtctccatccagcctttgatctgttatattgatacaaatcaggggggggctgagatttttccctttctctcgttctcaatacaatgttctatcttgttttaatcatttcagataagctcttcctcatagccctgccgtggtcgcgaaattagaaggcaataaatattgttctactatttagttcaacagttctagacataaatgaaacaaagagattggctttgaggtatcgtaaaaatgctggcaagactgacaagaccaactggcaaactttcatcaaccagtcgctctaccgatgcagtcatcaaggctatagccattgaaactatgatgcgagccaggactctacgcagatcaaccagaaactaaagctagagagagaagaagaagaagggaagagagatagagacgcccaagccccacctctagaaacaatcagccaatcagatccttagcaaacaatatgatgctacagttcgtaatgatgcaaacaaggcaaacaactagcaaacatcacatattgtgacgacctccctggtttacatttcttctgcactctccacgtatatcgttacatctttccatgatctactgcgtcgagtatatctcctggaaaaaaaaatttttatcgaagctaacctatataattagtaagatacttaattgtgccacagtatgatgaggaagacccttcagcactcaggggtagttgagaaatgataggaaatcaattatgaccatattaacatagaactaatgattcttcgtctgctctgcctatcaatgactatcgctccgtcttcgggtggaccgggtggtgtgtactttatgcttcagaaagcgggcgggatcaaatgcctccgggccaatataggacgtaacgtccaagtggctcttcttgaacagacaactaacgtatgtctgcataccctttccatcttctagtttgcgatgctcggtgagatctgcaagcatgtccaggtatctctggctatattcaccccttccgcgagatgtcatccagtcagcgatgccttttgcaagagcaccatcgtccggtccatagcgacgaacaggagtataaaatttgatatccggcactgttgctccaggagcaatatcgaaatagtataaatacccagaaagcaaaagatcaatctcaacgaagttatctttagcggctgggttgtactctgatatgcaagggacctcagaatcctcagggaagtccgagtctaggcctgtaacagctgcaatgagactgcggagctcctggagctgcgattcagggacggggatgcgccctcccattgtcatgacctgccgcacagaggcaaagctggtatggggagattggaagtagaacttgagcctcgatttttcagggacgacattatcaacagccagcatgctaagaattctcgttagcaatattccaaacgaggaagcatctattattgagatgcaaagataaaggcttacaaggggctcagcaattttccttccgggtcattgttgaggaattcgtgcattgcggctcgagattcactgttcggatcaagctgcttgagtgattcttcccacagagcgatgggcaacttcccatccgattgacccagacgacggggaacaaaatacgttttgagattcagaccattcttgagccactccgcggcgactaccaccgtagtggtgaagtgcgcacctgccgccgcttccttggcatatttggagcggtcatgatcgtagagggtggcgaagaaatggttggtccaggtaaggtccacagttggcacgaaatctgctatgcgatgcagcatctcaagtgtggcttgctggttcagaggatccaaaagggttcctgtgaaggagccaattgcctctgtggtgtagcggacatcgggcttgcctgccgcagtattccatttccaagaatattcaatcggagacccttcaactcccagcaaagatttccatttgaggttgccgtctggtccaggtgcggggcccatgtagggaacctatgctagccactccgttagtgttgctgcgtttctagtgaaacatggagaggaagagtgggggaaaaggaacagggatgcgcacgatccaatgatagtggaagagaagtgccacatattgctggtctgttgagtatccagcagcctcgaccatgttagacagatgctggcctgtcagtctccaccaataatctgcatcaggccctcgtgagggcagccatggtgatagagttgcccatgccttggtgggtggtcttgtcacttcagccatgattcgattcaaacaaatgccaattcaatgattgatgagattagcaaagtagtaattatggagtttaatgagaagggatgtattccaaatatatccatcgtggagatatgttgttatcctttcgggcttcatggacctcgccctggctgcaacgaggtagattggtacatcgaaaaccacagcagcgaaccacctaggcaatgtttcgggaaatcgggaatctagccctcaactcgtcgggtatatataaccggggttaccacccgtagccgtggacgacttcgggcactaacttgccagcttgcagggatcatgacttggaaattgtaaatccgattaagtccgaagtgggatacatcctaaactccgttaagaccatttctttccttatgatatagtataattgcttcgtttcgctccgcaattaattgaccatccattgtcttcccaccaacatcgacattacaacatctttcatcccttcaaatacaaactttcctacaatggccgccgtcactaaacccttggttctgatcaccggtgcaaaccagggcctgggattcgcgacagcacaacagcttgctagcactggccaatataatcttcttgttgccgcccgctcccaggaaaaagccgaaggcgcagtcaagcaactggagtctagcaccaatagctctttgacgcctattgttatcgatcttgaccaagacgaatctatcactgcggcagccaagttcgttgaagagcgtttcggatcgctggatatcctcatcaacaacgctggtatcaatagatcgtccgacccaaatgctactctgcgcgagagctaccgagctgtgtttgaaacaaatgttttcggtgtggcggtgatgacagcaactttcctaccactcctacgcgcatcgaagtaccatgaccgacgtattgtcaatgtgacaagcggccttggtcaaattggcatcgcgtactcgccaacttcagaatacagtgctaagatatgggaactgcctatctaccgcagtagcaagtctgcgatcaatatgattagtgctatcgatgctgtcagtctcgagaaagagaacattctcgttattctagctgccccaggcttctgtcgtaccaactttggaggtggtcagggcgtcaaatcagcagaggagggggctcggcctattgtacgggctgctacagagggttcgccaaaagaactatttggaaagcttgtggacgacgagaacacgctggtcgagttcggctggtagattgaactgttatgaggattgggagtgacgagactagcaatatatttatgagatgttggcaggaatttgttgagataggtgtgtggggctgcctggttactcaggtcatctacaaaccgccgctcgtttacacgcagatctcgagatacttttcggactttgtcttttacagaatgaaaacccctttactctctctgatattgtgtttctgtgtcattcctcgagcaaatgatacctctcgttaaactataccagtacctctcaggtgagaggatggagaattcgccacctccgttgcccttttcgcgagatgagcagtttatgttcggtagtaatgaatcatgaaacggccgtgaatatccaaactgtgtgtaaaattctattgatgtaaccaaaaatttcggaaaatatacaaagtgaaagtgatgaagcagtaacgtgggactcaatgacctgggcgtcagttttccatgggattttcccactcgagattcgaacaaattgctttgagatccttcaaaagttcagagctattcaaatccaagcactccacaaagttattcggaaagcaatcgttagggccaattgccgagtgcccgatgccttcgtgtagtaatcaccgggttcccgaattgagaggagaatctcgtgacaattcaaatcattatactcttaccttgatgctagtcctagatagagtattggtctggcaaaacttgccctgtaaaagttttccaactcttgaacagccagttcgggcccttcttgccaataccttgccctccgcacatattcgccatgttgcactctcctcctccctttgctgatgggcttcgccccctcaaagtcatcattataggaggtgggattgctggtctatctttggcgaatgcctttgaaaaagcccctgtcccgatcgaatacgtaattctggaagctcgagacaccattgcaccacaggtcggagctggtattgctcttgccccaagcgggtgtcgaattctcgaccaattgggtgtgtatgacgatttggaacagctggttcatccggtgcaaagcagcggtgtgtgtgatggacagggaaagtcgttattgcccgagcggagtgacaccgcattgctcgtcactgcgcgcatgtcatatccgttgggatgggtcgagcgtcgaagtgtcttgcaagtgctgtttaagcacatctgtcacaagaaaagtgtgttgacgagcaagaggatggatcggatcgaacactcccgtgagcaagagaagcctatcaaggtcatctgcaccgatggctctttctatgaaggcgatctggtcgtgggagccgatggagttcacagtaaaacgcgctcggagatgtggagggcggttgagcaaaatatctgtgatgattttgatgtgcagcaggaacgtcgaggtaagtggccctgaatcgtcgaaattattacccatcaatttgtacggatgtactaacagggataacagccatgatggctgaatatcagtgcatgtttggtatctctagccccattccggggttggacgctggtatgaccgacgacacgcttgcaagagacgtgtctatggtagtggctagtggcaaggacggcaagattttttggtttttgttcaaacgtatgccacaagtataccaaagccatgagattccgcgattcgatagcgcggatgcgttaaaatttgcagagcaatattttgatttccctgtccagtccggtgcgagcaacattaagttttctgatctgtgggagcggcgcgagacggcaacactagtccctctcgaggaggcagacttcgcgcattggacagctggtcgcattgtttgcttgggcgacagtgctcacaaaatgacaccccatactgggaccggaggcatgcttgctctcgaacatgcagcagtgttggccaacataatatgccggttggtggcccagggaaacaaattaccgctcacaacatctcaaatcggaatggccctgagtcaatacgatgaaaaaagacgacaccgtcgcacctccgctaaaataaagtctaccggagcgtctgctcgcatgcagactttacagagtcttgcggatcggcttgttgttcgtttccttttaccttacgctggtgatattcgtgccgatcaattttgcgatgatgccattggcgcagagcatattgaatacatgccagttccagcgcgctctatgacgggtttgatgccttttaatcccaatcgtggtatcggtatgcatgaaagcatatggccacgcgtgttgtgggccttgccactacttgggatggcagttgctgggttgttgactatgttctccgtggcgccatttgaagatgcatacgacttccttgctcgtcgtcgctaccgcgaagtggaactccgagacaaattctaccactctggtttgctcgatgatttctccaggtcgggagtcctgcgcttcatagtcagtgaagcgcacttcttttatcagcctttctccttttttgccgactatggtgtttggtatggtatcatgttggttgagtctgcaaggagagctaaccgactcaacgtcctaagtttgtaagtttgcgacagagtgaccaacactctggatgagaccttctaacatactatttcaccagtgctcttctctggggaatgctcaatatgtggggaatcgccattttcgttcccatttattactttgcttactacatcctcacgccaatttccacctttgacgcatccgacaggcgtctaacaaatctttcctatacaaagactatcctgccagtgcttttggctacccactatgccacttttatggacgcttatctttctccggtgcggtcccaccgtcaggctgctggcttcttgtgggagctattccctgtctggctctctcttgcacaggcgggccttgctcgaaaattcctccaaccgagcacgctgaagcaagatcgactcaataatgttacacgcgatctaccgactatccgaacaaccattctcgggctttgtgccgtttcgactgcagtttggcagtatacagtctggtgcagcgaggactcgcttggaaacatcttcatacccatccgtagtagtgtgcagggccaaacttttgaacagctctttgccgagttcttgaaatgggatcaagtattcttcgctattccgaatttgttttggattatactattgtttgctgatcttcgtgccgctggcttgattcatgctggttggctcaaaatatcattctcggctctgggtctgataattgcgggtgggaatgggacgatgctaggattgatgtggctgtatagggaagaggttctggcaaagagacaagatcgaggcgctgttgtgcgtcccatagcctgacctatggtgaatgcagtgtagagtttgacagcggagtgttaggagaaatgacaagacagaacttagcaggcgttgtcaatgctatccgaagaaataagctgcataagctcattatccttcgcaattagcaacatatccccagtctgtttactaatccagcgataaaagtgaaactagtatgccttatgtcggtattggtgataatgcgcggtgcgccagaatctgcgatgagacctgccacaatagggccgaacccgcatgcgtatgtgttcgggtagccacataaacacaagacctgatgcacagagtcgactgagagaagggccaaggtagacgatgtgaatcgtatattgactcatcatcgatgccaccagtagtctgtcgaagtaatagacagcatgcgatcgcatcggtacagggaagctagagcatacaagatatttgtccgcttcgcattcgactcgagtgacaggaatacgaggggcgtcctgttgtacgatccgagccagcaaggcttgaaccagttggagatgttatagcttacttattcgtaaattttacaaggcgtgcacttgagacgaggcgataattagcttcgtgatcatctcttactgacgagatcatacacttgttttcatcaatgcaaagtcaccattcatgttgtacccagctcgttgcaacctccagttgccgctttcgaggaagctacgctgtagcgcaccgcgcattttctcgcgcggcatagggcgtgatgactcaccaggcacaagcaattgaataactagctgtaatagatgaatgtttcgtgatgcgaacggccagaggctccgccattcatggggtgaagacggcgaggacgaacacgcgatggagaacgcgtcgtgacatcctttgatcttatcttattttggtaagaatgatggtattaacctctggatggtatgagatctcgaaagcgatttggctaggattaccctgtcacgttcatatcccgctttctctgtccaaggcttgacaatatgacgcgcaatcaaatgagaatcgaattgcttcaagcagaagtcgacgaaaacgatcagagtttctttcgtctcctggtcaacgatcggaacataaaatatgtcactatagaccctggtctctatagtgttgacgatatgtatttcggcccctcgctggtttcacttctacccacccgctggagattggaacgatggactggtgaccaaaaacgaagcgaatggccaaccccactttgcccgtgctattcggtcccttttccctgtcgtttaaaacacctggaatgaaacttttgttgatcatacggagatcccggtcggagaaaagttacgaacgggcgtttgtgaagtcagatgcaatttgttcgacgtggttgtggcaacattcgcccgctttgactaggagatccaatatctagagagtgagaccacggcttaccaatgaattgagggctatgatatcggcccacgattccttggccatttgacggaagatggccgcgtgcttcggattcttgatggaacgcatcaaggatgctagacatgctggccctcgggacctcgagacctgtcagaaggcattgtctcgattacatcgcctagggatccaccatggagatacaaaccgattcaactttcttattcgtggttcgcaggctgttttaatcgattttgactcggcacgaaagtgtggcgaccaagatgcgcttctgaaagagctcgaacatttaccgaattccctaaaggatttatcacgtcgaggtgggggagggctcctttgaatagtcagtccttcgaatgcatgcctctggtttttttgcgtcgtctttgatgccagtctggtttcagacaggatcgggttgaaattcacatacttgtacgaaaaggcgcttttttgcatcgaagatccctctaggggcggggcagtgtatcagcgaaatcggctgttatggtggagagggatgttcgtcaagaaggtaaactttacctgaccaatccaagtcctatctttttgatcgactagcagggtggcacggcagaccttgctggtaataaatctctcggtcaacgatttattattcaagctggaatttgaatgatcttcccaaagtcggttatttcaagtaaatttcatagttcttcgatcaaacgcgccattctcgctctattagctaagcattcttcaatcacagcatttcatacttagagataggttatctccaggtaaatgtttgtctacttatgtagcatagaccgaatataagatctatgcagttcggagactggttcccggcagaagccctctcatccaccgcggttatcgggccaaacatggagaacttctcagaaaattcggagatgacccttatagaataaggaataaccgagaaatatgtatattgaattcttcagaggcagtcggtgtttctttggccccccgcgctcggagttgtggccgagatccaaatccaaggcttccccggatcttcagctttattagcaacgtgctgcccctcttctctgttcgatcagataccgggaaaacatcctttttactagtcaacattttataatatcagagaactcagctatgtatggagttgccccacacaaacattcaaatggtctttttactcacatactacaagggcttatacagcatcgtttgctttcttcgaagccctctgggaggtatgtatatgtacaatagcatctttatacaccaaagcgtccattctaacctctacaaccttagggtggcgtcagccatgtctttgtcaatttgggatcagaccacccctccatcctcgaggcgatggtgaaaggccagaaggaaaagaaaggccaattccctactataatcacctgtcccaatgaggtacgttagcaattgcattatgggacccaccaagcctaacggcagcacttcggttagagtcggtatgaatgtgagccccgctgacgatatgctgtttagatggtggcactgtccatggccgacggctacgcacgattgaccggagagccgcaagcagtaatcgtccatgtcgatgtcggtacgcagggactcggagcagcagttcacaacgcctcatgcgggcgcgccccggttttgatatttgccggtctatcgccttacacgatcgagggcgagatgcgaggttcacgcactgaatatatccactggatccaagatgtgccagaccagaagcaaattgtcgcccagtactgtcggtacacgggtgagatcaagtcgggcaagaatgttaagcagattgtcaaccgggctttgcaattcgcaactagtgatccacaggggcctgtgtatcttgccggggcgcgggaggttatggaggaggatatcgagccataccagctgaaccaggctgtctggggtcctgtgtcaccggccgccctaccaacctccggcgttgagttaatcgcagctgagcttgcagctgccaagcgccctcttatcattactggatattccggaaggaaagcccaagctgtgactgagctggtcgcattggcagatagcttcaagggaatccgtgtgctggacactggtggtagcgacatgtgcttccctgctaaccaccctgcatggttgggattgagatatccaggccatgaggcagtgggaacatctgatctaatcctggtggtagactgcgatgtcccctgggtgcctacccagttcaagccgtctgcgtcggccaagattatacacattgatgtcgaccctctgaagcaacagattccagttttctacattcactcgatggctacattccgcgccgacgcttccaccgcactcaagcaaatcaacgattacgttgcttctcgggaatctctgcaacaattcattagctccaaagataatattactatgggccagcgccgagacgaggagtattcaaggcgtcgacaagagatctccgatctggctgttatcccggagggcggcgacggggcttccttgaatatccactacctcatggcgcaggtccgcgagggcgttccgattgataccatctgggctattgagtccgtgaccatgacccactttgttgctgatcaggtctcagctacccaacctaagtcgtggatcaactgtggaggtggcggtctcggctggtccggcggtggtgcgcttggtatcaagcttgctagtgacatacagcagggaggacgtggaaagggaaagtttgtctgtcaggttgttggtgatggaacattcctcttctcggtgcctggatctgtgtactggatcgcccgccgctatggaatccccgttttgacaattgtgctaaacaataagggctggaatgccccccggcgaagcatgctgctcgttcatcctgaaggggacggctctcgtgctacgaacgaagacctcaatatctcctttgtgccaacgccggattacgccggtatagccaaggccgctgcaggcggtgacttgtgggctgggcgtgcctcgactgttgctgagctcgcccggaagctcccagaagctatccagagtgttctaaacggaaaggcagcggtgctggaagcacagcttgacgggaccgcaggaaaatatgtagaaagctcgtgagaaatggaatttggagggcatgaggtacttttagagtactagcggtccatagactgttcaatgagagttacaattcatggagtaaaaaaagcgagatttcaagagatgtatattttgtatgcaaaacacatgcaaaagatacctcgtgaaaaaagcatcggtaccccacgcccttcgacatgctagtgcctccaattgatagaaatacactatctgtccaagctattgaccccaacgtcaaataggaagcttatcaaaagtgggctgtactccgttgcaccgtaaatgagtcatctggttcggagaacgctggagagatagatttccactccgctttcgccgagtcgcccttcgcagcaccttcgattgctcctgtttcgtttttcttcttaaatagtccactgtcctttcacacaatcaggccaatactattacgtcctacgaattcgatatacaatataccccgatataccaaacacccctccgtataaccccgcgcatacccctccgaattccgcatttcgcattcacaccgccaccaactcaattgctcaatcacaatgagtccaccggcacctcttgatgtcgacctggtgggcgtcaccgatacctcggctgtccctgtcccagatcccttaaccatcaatggcgtgtcagcatggcgacagaagatggccaaggtccccaccggcgtggccgcgccatccaacagtgacatgttcaagagtccggtatgataactctagattgtgcataggcctcatggagatatgaccaaggaaggcaatcaattgcaggatacagaatgctgatatgtgtctgaggcattagatttgctacacaaagcctaaggccaagcggtttgagcgtatgtctacctttgccctttgcgtgtggttttcgcaattattcccctgatactaatcattcgtttgcagactgtttttcgaccgaagccaagtctcgcaaggttcgcacccaatcgcgcaatgcgaagtccacacttgctaatccttccacaccttaggcgtctactttgaagactgctgctcgttacctgaacaacccaggtaatactcccggatacttctctttcggttcattgattaattctgtgttcaaggccttatttcgctcggtggtggactgccctcgcccgaatacttccccattgaacatttggatattaaggtcccgactgtccccggattctctccggaggctactcgggagtcaggcacggttcttcgtgctggaaagcaggacattaaagatggaactagcctttacggtgagtccccgttctttatgtgcattagaaatggccatgactgatccaattccttagacttggagattgcccttaactatggacaagctaccggagctgcgccattgcttcgttttgtcacggagcacaccgaagtgagtataaaacaccatatctgtcgtctgtcagcagatactaattaaattagatcatccacagccctccctactctgactggcaatgcaccctgactgctggcagcacctacgcctgggacactgctcttcgcttgttctgtgagcgcggagactatatcatcatggaggaatatactttcgccagtgccgccgagactgccttcccccttggtatcaaggccgtgggcatcccaatggacgggcaaggcctcatcccggaggaaatggacaaaatcctcagcaactgggatgtcgccgcccgaggtgcacgcaagcctcacgtgctatacaccatcccaacaggccagaacccgactggtgccactcagtctgcagaacgccgccgcggcgtgtacaaggtcgctcagaagcacgatctcatcatcgtcgaggacgaaccctactacttcctgcagatgcagccctataccagcggggatgccactccagtgcctcccccctccacccacgaggaattcatcaagtcacttgtcccctcgttcctgagcatggacactgatggccgtgtcgttcgcctcgagtctttctcgaaggttatctcgcctggttcccgagttggctggatcgtcgcctctgagcagatcatcgagcgcttcctccgtaacttcgaggtttcctcgcagaaccctagcggtatttcccagatcgcgctcttcaaacttctcgatgagcactggggccactccggctttttggattggctgatcaacctgcgcatgtcgtacactgctcgtcgcgactcgctcgttcacgcctgcgagaagcacctgccccgcgaaatcgctcactgggaagcccctgcggctggcatgttcgtaagtattccctgtctattccactcacatgtcattcagcaatgaatactaatatctaccagcactggatggaaatcgactggcgcaagcaccccggcgttgccgctggcaagactcacgccgaaatcgaagaagagatcttcttgtccgctgtgaacgacggcgtccttctttcccgcggcagctggttcaaacccgaccacgacactgccgaggagaagatgttcttccgcgcgaccttcgcagctgcttcgtcggacaggattgacgaggctatctctcgcttcggccaggctctgcgcactcaatttggcctgtaaattggttcctgacctacgattttgacgaatctcttttatcataaagaggatgcattaacttgttagttttgtgattttagatggtagatatcgcagttttataaagggcgggttttcattgtgttctagagaagcatattgcattctctctttttggttaacttttgacctaaatagtcaacaattctattgttttattcttctatcgggattcaatatcgagtcgaaagaaatataataatgcacaaaaagaataatggttggtatcaggcaataataaaacaaaaagtaacaataaaggatgagaaatatatccaaacgaatcaggagcattcaaggggatatcttcaaaagagaaaatgatcatgaccccagaatcttgccataagcatcctccacctccttagcaatctccaacagcgtgacaataatgatctggtgcgtcacattaggcagcttatcacgctgcagcccaatccactccaacggcggcgtagcctcacccatatcccgcagctgcggggtctcaataatcggcggctcaagcgcagtatatgtatacctggactggggcacattaacaaccgcagtgatcttctcctgctgctcagggctagtaccactcccttcaccactactagtgatgcgcaccgcagacggcggtaagggcttgccaagccgtgacgcgagcgcccgcgagtgcgtctcccacatatcgcgaatgaagctgatgcgcgagtaattccagccgacatcgactttgccctcgaacgtgctgcggaatatgtagtcgatctggtggcttcctggagcctgccaggtttccatgctcgcgactagtcgcggtactttgaggattgttccgccgcgagatactgcggctcgctcggaaatctcgtccaccgagagctcgtcgagttgcgcggatgtaggccgcgtaatgccagacagcgctacgcgaagctggcccaatgttaggcctagggcactgtggattttgttggcttcgagcgagacggagaagcgggcctcggcgtcgtgggcttctaccttgaagatttggttgtcgaagaatgagctggggaatgctcccaggttgacgtggcggatcttcacgaccactccggtgtgtagagagatgggtgctttttcgggcttgtcgtggtctttctttgcttgattcttggcgctgacatcgaggcgctcggtgaggacagaagacttccggcggaggtaccgctctacctcgcgtagtgatgctttgtaggctgcttggacgtcttggatcaggcgctgccacgcctggaatagcgccaatgtttgtgatgctgtcagagatgtgcagaatagctggagtttgtcgccttccagaatactgaagaggcgctggctctgcgcgccggatgtatttcggacattgtacatcaagaaattgaacatggcgatctgtgcaaccaagaaaggttggtaatcgaatgacaccttggcttggaggtgttggaaggcaattgtggcttgaatcaacggtgtgtgccctgcctcacaggactcgggccattcaatggaggtatgaatcctcagcgttctgagttcgacaattccactcatgcgacccttactctcgatggcaactgagccaaagtttatacacatgttctgttcgctgtcagatgtcttgctggtagacacccacagatcaataatggcgaactgtgccttgcctagggtcgagcccaaatcgagttggatttccaccttctcaatcgcgatggtagtggtccaggggaatgcggacgccgaagcaacctgctggtagcgctgcacgatatagctttgtgtttcggacggtcctggctggacgttctcactcgaggtggtttcattgtcggatggaagccaaatttccttgaagagcaaagagtcttgaacctgtttggcattgactgcgaccttcattggactgacgcgcaaaatagctgacattccgttcatccggccaaggtgcttgctgttcatcaatgacagcaccatggactttacctcgaagcttgcggttgattcattggagtacacgtgttttacagatgcttccaagctgttgaaagctaaagagagagcaaggaaccggccatggtcttccgagaggaccgtgttgacagtcacgtagacactctcaaaccttgcagtagctgcgactcttgcaataggctgacagcttaagctaaattcctgtttgtaaaatagcagtcccacgtttaccttgcaccgaccaaggatgctggttggatcggcggcatcaaatggcttttcctgcattggtttctgtgtctgaaatttcgctgctgcagatggctttcgaggctggccctgctggttgcccatgatctccttgactgtggcggtcatctgcttgacgagaggaacaagggttggatacaatgtatttgttgaggggtcgaccttcaactccgcattgagcgcaggatcgtcggtgccgttgtcctcgaattggactttgagcgccactcccggtgctcgcagagttgctgtggtcgctacatcgccttggacatattggccatattttgcgtcagagagtcggctacccttccatgtggccgctagcaatgtctggtgatcatggccaagttttccttgaagcgtgacaatagcgcctgcaaagtcaacatcgacgaggagagaccgcaatcgtctattaccgaaaaggctgcgatctttgttggtattggtgttttcgggtgagtctgctttggttgcccaaacagccttgccttcacgaagcgcctcgcttgctgtagacattgagtcttgtatcatactagccggaatgataaactccgatgtggcgcgtatgtcgagggatttgccagctgcttggaaagcaagacacacttccttccctttggaggcatacgccacgttgaagaccagctctggcataagggctgaattgagcgagcgcttttctctgtccgctccgaatggtaccatctgaagttgcatgttttcgattcgaagtttggctgcgttcttcttcttgttggacagttcgacttgttggattgaaaagaccaggttctcgggctgtcgaccagattttctgtggaccgtggtcatgttccaagcgatctgaatggctcggaattgtaaagagtaaagagcatttaggaatgtttccgggctggaatcatcgttgacgtggatttcaggggcagcggtggctccgtcttttgtgtcaatgtggccaccatgtcttaatctcctaagacgcttgacttcatgggaaaggtccagggttttgatgcgctcttgtgtatagacggcaatatcgaccacaagggctgctgtctcagcggaaagttcgacatcgaacctatcgctagtgaaatggtatgctctagtgatctctccattttggcggatcgctgatgttccctgaagcttcactccagcagagaaacctccgtatgattgactgctagccttttgttgttttcgaagctcaaatatgatctggggagcatcgatattgaactcgggatgctccatggcgtatccccgatcgagtccattttgaagtcgcatacgcatcatcccaaggctgaagatcatctccgcagagtagtctttgccctttaggcctggtgcaatggcatgaatctcgaatccagccattgtgagacgggatttgtagaggatctcctggctgtcagatgctggcttgggctttggggataccttctgtagagacagcacgtctttcaggtgtaactggagaacatctaaattctgcttgatatcacaaaccaaatgggaaacatccggtcctgtcaaaacagcgaggagactgcgcacagcactggcttctaggcgaatgagttcaatcgtgatatcaatctccacttccttgcgatccggtaagagattagcaaggattcgcccgtttacgggaggtatttccagtatggacagaacattgaacctgtggctttcacccgatacgaacatgtgcgagttcttcttcacatcaaagtcaatctcgattttggatgcctccgtgggcatcactgtcatgcgagcgacctcgccggacagaagatagctcaaagatggtaaaagggtaaaagtcaaccgatagtcttctaagaacattgccacatggaaggtgtcacgagtgggtttatttgatgcgaggctctgaccggtttccggatttggtaccttgacactatccataagctgtcggatgtatctgacttcgtccgcgatgagtctatctgctgtatgtgctaggctgacagggtcttctttcatgtcataacgaagctttctgcaggacccagctatcttccaatcgtgtctgcactcgttgtcatcttcctctgatgcaagcgaaaggtacacgtatgggtcggcgattcttgacaacatcagagtagtagattggctttgaagctctgacgagcatccttcagcgctaaacaatacagcgagatcttctggttctttggcaccaagcgccttgtgaacgatcgatcctcggagagccttcgctattagagcaagcttaacattgacacagtcgagagtgatggaaccaaaatcagtgccaaacattatctgcagctcgatcggtgtcttctcttggaccttgtcaattgggacatgacccggcgaggatgcaagtgtgatattcgacatgaccttgatcaccccttcagcgagatctagaatttcccagcgcagcctcagggctgttgatccacaataagactgcagggtgatgagttgcttgctccccccttcaccctcaggcgcgtgtggagcaaatgatgcaacagtggacaaattccctatgaccaaatcgctttctttcggaccaggatccatggaaaattggaatgtttgaattgtggaggatatgaacatcgaaggctcggaagtctgccgttcggcggcgtgcggccaaacacggcgcatgacatagcttttggcaacatgtgccaggtcccaagcccgccagcggtcgaagccggataatactgcctttttggcattcgccggcagaggaaaattctcacacaagcatttctgctccaactcacgcttctgatgagcagacagactttcataaatcttgcgaatgcgagatataatcttccacgagtcatgctgccgcaagtgagtcgaagcaaccctgaggacgtacgatatgcgagcaaggaatattggatccggtatatcagtagccgattgggtgagggagtacaggaggtactgtaaacgcttttcgctggacgttaaaatctgttgaaaggatgacgcgacagaatcaaacatagtcgttgctcgacgaacgagaaatgcaagacgctccacagactttgctgatgtcattgtattgaatgttcgcatctgaaggttagagcgaatattgggcgaggtcacaagccagaaattcatatcttccatgtgtgagttaaacacagctttctcatggaaagaatctgcgcgtctaccctcgatagaaattgaaacataatccgctgccgcatggaccgttacaccttgtttgagaccttcaagtaaatcacctttctgacgttgaacctttcttcggaactcagtatgcagacgacggatatctaagctgtattcatctcggaactcgacctgattgttgttgggagccgcagacaggtcaaccagtcgtaattgaatagatggaacataaagagagacagctgttgaaattctcggcttgctcatggcattgtcatagccaacgatggaagatatcacatccttttgaagcgagtcaatgattcgcgtaggatgctttggttccaacccatccagtaaagtagctagacttagaaggaattcgggtgtacaaaaccctcggatcccgagggggaggttgcacgcaaggtttatgtatttcgtttgatcgtcatcaaatgtgagaaacacggacttttgattcatgcttgagtcttcactcattgtgtcatcctcatctacaaatggcaatggaagttcggatgtatccagatgaagcttgtagtacgagaactgtggcattatccacggatttgtgtctctagtcgtagaatgcgaggatgcgcctacccgaggcccgtaatttggtccatctctcgaccggttggctttcgagacggacgcgctcgatcctcgggtaggcagaaaaggccgcgatttggaaatagatttcgaggctgctctggggctgttgacagtgtgtatccggacacttttcatacttgatgcttctgactggacaaaaaagctcttggcacttctagtggtacgaggacctgaagctccttgatatgatggtgcatcaacagagccaatcctgtcatgaataggctcaggcattgaaggtatggccatagttggagggaatacgtcgtcgtcagaaggaatggttgaagctggcccagtctcttcccagtcaaaaagcaaccactgtgccctgtgagtacgttgatcgtgggttctgatatgttcttgctgaagtcgtcgactttctgcaatatcggatttgcgtaaagccaacttcaccccaattgtgagctggaaaagtcctatgggagataacattttttcccccgccgatggattgcattgagagacagattggcgatcaacggcagcgattgagatatccggaacgagaagactcatgcgtttcgaaaatttggtgtttgcccaatcgttgaagttcacattcaaaggctgtgtgctcaaaatcacagctgtctggtctagtagcacggaaatatgaattgagtcaaccttggccctcaagaaagtcacgtcaaatagaagctccgggaaaagcatcggcaacgcattttcctcgttgtcaaaggagaaatcaaagctcttcaaagatgaagccaaacaggccaagaactcggtggagcattctccgacaattcgaccgacatcaaaatcccaattacaaacatatgttggttcaagcgggggcaaaccaaacagacgatggccgtaaaccgaaaccccatcgatgaacagctgagtgctagagatagtggaagggccatccagttcagtggtctccaaatcaattttcaccggggtgatggaaaattgcaaatccatatagtagttagtaaaacgcaaattcgcttcgagggaggctgcgctaagtcccatgcactttgagtgatcatagatattcacaggaagcaaggcacgggggctatcaaccgtgacgcgtacgagcacatccatgtcatttgactttcggtttgggttggtgcctgtcggatttgacggtggctcgtcggcatagactagctcttgatattcttcaagtgttctgaagtgcatttcctcgccaaaatagttttctctgattgtcatgaaactctcgaccaagaatccaaaaaggtaaagacgaggtaaagttccatcgacgttgagcatcagcgtgtcagtcagttccggagatgttgactggaaatagttataggagccgtcaatgaacaaattctctagagtggccatggatttttgcggtaaaaattcatgcaaagtatcccacaaaggagtcgtgtagtccacgccgccgtcttcaaggtttaccctgaagtcgatggcattttgttcaggttggtatttgtccaatggtatcatggcatttgccgccaggcgcttgcctttgataacaagaaatcggttgtcctctaaatcagaaggattgctgataatgtttcggtcgttgacgttgatgtaaagttggaagtcggagaaattgagatcgagattgtaaataaaaggcacaaatgagtagtagtccgaaggcggtcccgaagcccaatcgcttacaagatctgtgagaaggaatatgtgatcacgtaggagaaacagctgtaggtcgtggttttcggcagtaaatttccaggggcgaagaccattccaggaaagtgggttggatagatcacaagtaatctgttgccgaggacattgccaaagcaagccatggtttatgctggatgataatcttgactctcgcaagtcgatagaaagtccattggaaaaccctgtgctggatcccaccatatccatggtatagttgatggtagagtcggcgccaacacaaagggaaagccacccaaacgggcgaatttcagggccgaggtagcctttttcaccttctttagctcgagtcgtcttctgttcgtttggcttctttgttctcgatgcacccccaacggcatcagcacgacccttccattgccaatccttggaaggctctcgtgtcggaatacgcaatgtcaattccctattgatttcaatgcgcaatctaaatgccgtgctttgtcgcagagcacccggtgctagtttctctgtgggctcagcgttgcgatagaagtttggaaaaaagacattctgcaggccaacccgctccctatcagcccagggtccgtaatttatcgtaccgccgtgaatcttgaggtccatcccccattcgggagaaggagcataattgatattgctatccattgattgagactgagcagctgacggtggttgaataatgactcgtccagggacgtcccagaagtaggctatattcagcatggggctatccacgatggtagagaacctggcatattcgactgagttccacttctcgtggtcatccccactatcttcgtccagataccgagagagaccggtccagcggacctcaggaaactctgcctggctcctcggcatactgttggcgtgtctgccatcgtcgtggaacgattcgacagatgtctggaaatatgggaccaagtctcgaatactgtgccatactctgcgcctctgaaattggtagttgaagatattttgcggtcttttcttcgatgcgtggtctttctcttgctgcgcacctagatctttggcggtcgccgattggttctgcttgaagtccgggtttggccgcatttggaccactgcattttttacttgaaatgagaatatctgacgatacaaatcaagaggacctgaattggaagcgtcgatggtacccattccagtgtcgaacgtggttgtcaacacagatcgagtatgctcattcccgatgacaatggctcctttctggcaatccagcttcataggcaggagttgtaacatgttggacacaggatccgacagttctgatccacgaatagtagtcttttgcgacgcaactccgctcctctcactcgtgctgcgctgtgacaagggttcgatggttggccgatgtccaggcgtatctttaaaatcaaaggcgttgctttcgttgccgttttctgccgccccgcgagatcctgggggatttgaattgtcaccgtctaaatcaacatttttggaagagtatccaaacccagtaaggatactgtcataggcaggtgtccggttgtagatgaaccattcaaggccatatgtgttgatagtaatccggcacggcaagtcggtcgtctttcccatgccaccttgctcccccagattgtcgtccgttgcatcgcgcgggcacgcttcttcccttgaggtatgatgagcaagacctgtcttgcgtcgaatcccggccaaatcatttcgctcgactgtacgcgtccaatagcgccatgttatgaatcctccatgaataaagatggtctcgttcaccccatggtaccgaatgcccttgaagaagattcttccaccaagtagggagacttgaagtgcgtttatatcaacatatgcgcggtagtaatgccatgtgtatgatcgaatcgcgtaggatatgaggttcgcgaagagtcggttgaagtagagcaaaaagaacagagcgctataccgttgatcagcgtaatccagtcaagttggaatagggcaaacttacagaatgcaagagacaatcagttctaagagaaagaacctagatcgatcagtataacagccatggttcaagcagtccaagcagcgattccataccaattgaagcttggatccggcgtcaggaaggtcgatgtcaaacttgtactacccatctctctccgcctgtcaacatggacagcgccggcgcgatagaacgcgaatgacgagccaaaattgacctctcaatcatcgacaccaaaatggctggtcaaatatcgtggaagtcgcaaggcgaggacgttgataaggaagaccgagagcggtgtcacgcgaggatcgtcatcggataacacgcctcctcattccgaactaacgctcctctagcttgttctccccccatttcggtcttgactaacatgttttgcccctctatcgactctgcggaatgagctggattacctccgtaggcagaaaggggtccttaaaccgtgtttccccctaaatttcagcaatcatgacgaccgcagctggcggaggaacaggctccagcctggcacgagcaattatcattgtcacaggtgtctcggctttggtttcctctctcttgtcctttgtgtcagtctatccaatctttttcgacctaactcatggtcgcgctcgctgtaaactccccggctaacgtgttgtctcaaaccacaggtccatatggtttcaaacgtacgagcttataccgtccaaattcgagaaccgtggctcaccatatatatagcaaaaactaccggaaacccttactccaacgctacgttgtgcgtatattgttgatgttagtgttgactcgagtatcagctcagggggctagggcaaaaaacagtgctgattgaacttagggtcccgatttacgcagtatcatcatggacgagcatcatatcgctaagggcggcacagtttctagatcctgttcgtgacatctatgaggtatgtggggctctggccgactgtccgataagccctcattaacgaatggcattggcaggcgttcaccatctataccttctttcagctcctcatcaacttcctcggcggcgagcgggctgtgatcatcatggctcatggccgccctcctatctcccatgcctggcctctcaatcacttcctcccaaagattgacatctcggatccccaaaccttccttgctgtcaaacgtggtatcctgcagtacgcttggttgaagcccattctggctctcggctccatcataatgaaggcaaccgatacatatcaagagggctatattgggctgagctctggatacctctggacaggtatcatatataatgtcagcgtcacaatcagtctttattcccttgccatgttctgggtgtgtctgcatgatgacctcgcgccattccgcccagtccccaaattcctctgcgtcaaactcattattttcgcctcatattggcaaggcttcttcttgtcgatactgcagtggctgggagcgcttggtagtgttgctgggtacacccccgacaaccttgcggcagccattcaggacagtcttatctgctttgagatgccattgttcgctatggctcattggtatgcattttcgtggcatgactatgcggacccgaccatctcagctgcgcgcatgcccgtaaaatacgcgctgcgcgacgcattcggcgtgcgagatttggttgaagacaccaagttcaccattcgcggtaagaattacggatatcggctgtttgactcgggtgataatatcatcccgcatgaggagtcagggtcgcgggtcaagcgagtaatggccggcatgagatatgagcgtggaggtaaggcaaaatattggatcccagaaccgggtgaagccaacagccgcacgcctctattgggcggcgaatccagtcagcgcggccccggaaataaacgggccagtcaaacctccagagagagaatccgatcatacagtgaaattgatgaaaccgcactggacgacgaggatgagcgaatattcctcaatgctcgcgcactagaatatggagactggaatgtgagttacgctgatacagagtggtcgtgattgcaatgctgaccgcgcatagtacccggtgattaccgccaacgtggtgccaagtgaccaacggctgccaccctcgcggagaaatcaagattcaaaccgaggggcagatgtcaaaaaggcccataggcacaggaaaagtcgcgcgtcaaatggtgagagtaggcaaagtcacaagccaaagtccaaaatagcgggcccaagctcggcgactcccggtcccttgaagcgaaacgtcagttccaccagttctagcggtacgcagcgcagccagctggttgaccttgtggtggagaatacagaggctgaagaagaagttcgagcccaaacacagagagagtatggctctgcctgggcagagcctgaacctcgacgattctcgtaagttgccaaatcgcgcatagcgacactagaggcttcagagcagagttattaatcccgactccaacctccagaagaccctgtgaagatctaatcgaagaagaggctgaagccaactcgatacagccggagaccaatcatgacgaagatcggcccaaatgggcctacgacgatctagagcaggacaatgtttggggcaaatagtgcgcgttctatggtgtatggtgtactctgtctcttcaattatctcggattatgatcatctaccttatttactcatttgctcattctcggtctgatatgtttgtatctgtgttctgtacatatccttcgaaatggaacagaagaaaggaaaacattatgaaactccgagaaattctaaagagatagaattatcctttccaatctctgtaagcgcccgactttctcgtcacaccaaaactggacttgataggcttgagagggtgtagctcaaaataatgagcacagatgtgataaccccactagacgtcaacgaatagtagtgcttcgatcagctctgctaccgacgatcaatgctgctaaatgcgctggcttcggcgtgcatgtctttactgggcatagaccccggttactagtgccacgatgatatgtacctggacgagttgggtaaggcgctcatctttgggcttatatgatggatgttcccatcccgtctgaggggctgatttgactgcctgtgcaactggttcgttcctttcctttgttttctcctttctttccctccaaggtgatggattgatttctcgcgctggtcgccatcatgctggctttggagagggcggggtcgttattcactggctggatacgatcatgctttacatttttacctggtgacgatggttgtcaacctagacaagctgggaacggtatgtgtccgactacgtcaaaaatctagactcgatgggactaatatacatcgcaggcgttgaacgggagatgaaaatatgccatactcaaccacatcttgttccacctatgaagctggtggtatacgataacctccccagtccaagtgtccatcaatctcgaaactcactgtcatcatggttcaacgacagtcggaacttggcgtcgcgagcctctaaccgggcaagcatgtctttaaaacgctcttcaacgaccccattgaagatcagcgcaccttcagactttcgcagagtgcaatcgttccacgatcacccacattcattcaattctccgccaccaacctatcaaccattggatctccgcattcatcgatcaggtaatcgattgtctgaattaccttcattcgaaaccttccaactaaacgaaagccctcagcgcaagacgctaccggtaccccctcgtgccctcacgactccgaccaacgttcgtgatcgatattgccaaaaagcatttgtagtctctcgcaagccagttgggtctcagaaacgccgatcacttggtaatatggagtccctgctcgtcgaagaacccgttcgcgccactagtactctggtaccacatttctccaaggtcatccacaccgagaaacctctcccagaagctcaggcagcatctccaatccacggcaggtcaaaatcagaaggaagcaaggttacgtcgaacacccgatggccaaacgacgcaaataccacctggggcagagtacctcggactccacctgcatccaacagtgtgcacagagactcgccggatacatccccatccaagtactcggcaatgtccaaggacagtccttcgtcagccagctcgcgcacgatgatatcacaaccctcatcgcgccgtccctcaattccacttcccaagaaccgagactcaatcgatgcaatcccattctctctttccaaccgcgtaactcaatggatgtgccctacacccaccaactcctctccgttccccaggcaagcctctatgcccggcgagaaagggtttaattgggagcgaacccgcacgctgagtggcaccacagtggcttcgactagtactacgactttcaccggcggcccaagaacacggaataatggctccatctctagtgccttctccagtgctattactccccgcacctcattccaagtcctcccgtctgctacagaaaaagatcttgacgctggtgtctgctacccgaccatcttcgaggaccagcaacagcaccatcacctatcttcgtatcatgacaatggacatgtgcggtaccaagagtctagtattggggtggcgttttaagttgtctggattttctttggagatgacacttttggccattctgagattttgataatgagttacccagtctccttcttttctttctgttagaattttggtttttcttggatgtctgttgggtattttcttttggacttgttttatttctattgcgcgttggaataccccgttgtgattccagttggttagttctttccaaggttgctatttgaggtgattaaccgtggtacatacatagcttatgtaggaagtaataatgaaaacggtctggatatgactccatgggatctttagcagtcagaaaaggattatattcagtattctactagggagaagaacaattatgcaacggcaacacatatttcaaggtccaggctaacacacatggcatctgaccacgatgtctggacataagtcaattgtacacaaaggctaacgatagctatttctgtagggtatctcaaaaaagacaatatagctgtcagaaaaacaaatagggcacaagttaaaagaaaggatgaatgttatgtacaacatacagcaaaagatcgacgtcttagctttcatacgagatcaaagctttagtccgtgactatatccacaccgtccggggaagtacttatggggccgattttgcggggtttttgcatgccgagaatctcccaggcacggcccatcataccatggcctgagccctggggaaattcgacagaagccttgtgagcatgtctggagacgcgatcacgcatggtacgctcctgcttagcggcagccagacggtcttgttcacgttcgtgattgacaatttcgtcgcgccattcggcccagtgctcgaagttttcgcgctgctggagtacctgataacggaggcgggtcttggacggacgccaagcagcgcgacccgctttctcattgccgtcactacctggaacagccatcgtggacttgagatcggggacacgggactcttttgtcagtttgagaagatgggtcatgacatcccgactttcgagggcagtgcgttggattttttcttgttcgggggttggtttggcacgcacgagcggcgcatcaagccatgcgtgcatttcactagatctctggacggagtatgggtcgaggatgttcgaacggcggttttcctcgcgcaggaaacgcacagctgcttggaggctttccacctcagcgcggagagactcgttctcgtccatggcagctaaagaggcctcactagcgatgatggcgctgttacccgtgggcgtcagacctactgttccagacatgcgcttcattcgatcaagacgagccatgaactcatctcgctctgcttcggctgtctgaagctccttcttttgttgctcaactattttctcgagttcactccctgctttctggatttcctcgattctggcttcgagttctttgaccatggcagccttcttgctcgcctctcgcatccttgattcaagatgctcgatctttaggccctgttcttcaagggtattgtccttgactccaagtgcggctgacgcttcgtgaatctcatttctcaactggcgaatctcctcgtctgcatccggggatgtcattttgttggacttcaattctgcagcgcgagcgacccaggggaatgcagctctctcgaactctgtcgtgcgagacagatctgatgaaatggtatccagctcctcaaattggtcgcctacttgttgcaatctggtaaataacaatgatatagggtcgttactttcatccaggatttcggaggacgaggcaaaggacacggcagcctgggacatacagtccagaatctcctccgggctaaatgggtgcgtgcgaccttcatcactggtgaggacaacaaggttctcgccgagctttcgagcaaactctgaaagttgcttggtttcattctctatcgtcttgaacggttcttcggcgtcctttgggagcgcaagtgacctagaacgcagatcatcaagagaccggctgatcttacccatcgcaaccttgtatccgcgggcctgagaggcgaaggtgtccaatttattcagagaaatcaggttttcttcgtcgccttctgccgcggccaccatcttggagctgataatcagcttaacgcgtgcgattgcaccggctgaatgctcaatgtacgattgagacaaatgggcccgcatacacagctcatcggcaaacatctccaagctggaaggaagaagggtctcagcaaggtgtgcgaggagagcgatagaccgctgcaattccactgcaaactttgcaagattcacttcgtccttcttcataggctcgatccagaagttcaacatgcgctccactggctccatttcgaacattgcgatcttgatattggcaaattcctcgggcgagcaagctgtgatatagttcacaaagcgatcacacacgtttgaaatccacataagatattccaaaaccacatgagcttggaaaagttcctcgttggagactactgagtgctcagatcccttatcttgtagagtgctgctcataacattggctttgaatccgacgcgcttgaatcgaagcaaagcctgaatagaattcttttccccttcaaagtactccggaagatagagctttatcatcgaaaggtgctgtgcattttcttcggactccatacggttcagttcaacatcgatagatttggtcagggccttcgattgattggcctggagtttcatattcaaatcttgcatctggcggtggcgcaatgcattttcggtggtctctgcctccgaaacttgctttgtcgtgcgcatatcatccaagtcacattgcaggttcgtcaccaaatccctgaaacgcgttaatgtatattcaaggtcctcgataacttcgtcctgttgcgtgatctttcggcattggtcgctgaacacactctctcggtactcaatttcttcttgaagttgcttctcagtctcaatatgggtgtactccatctcatcgctaatctccttgagagattccaaatcctcgatggcagctttcagctcattaatctcatcctggtagcgcatgtttttgtctgctaattcttcaatcatttcttccgcccccagtgctgtctccagctgctgcttaagattatcgacattggtctcagcgaccaaaattctctcctttgcagcctcgtaatcagacttgacggtagcgtactcctcgagatcctcctccaattctttgatctgagacttgaggtctaactcttgctgctgagtcatatctcttaaacgaatgagcgcctcgcggagacgttcattggttctttccatctgaagccatccatgagtggttctgtcttcgggggtggtctcctggctgtattcttcattctcctctcggagaacctccacctccaaattcagctcgtccaaccttgatcgtaacgctgcgcactcatgtttgaatgcctccgctgtctcctctgccatttcgcggtcaagagtagccatttccatgagcgattcatgctccgcctgcatgcgttccacgtcgtcagaacgagcctcaagttctttcaactttttgcgcagctcggtgacttccatttgctgcggttgatacttggcttgaagtttctggatgatcgtttcaaatttatcacgctcagcctggagttgctcgagggtcttcaacttctctttgtcgtcggctcgtttcttttccattattctgagcttggcattaagttcttcgagctcgcgattaactgcactgctctgcccctggcgttgagatgcagagagcggggccccaggacgcgaggctgcaggtcgcgaagcagtcatcgactgtcgagaggtcttcggcccggtgagtccgtcttgtgcaccctccccgtcagtgtcaggcgactcggtctcggttggatctccggatcccccactcatggccgcgtctcctccatccgatgcttttgcgttgctaacctgccgtagtgaaggacgctttgtcaatcccggggttgatgaagcaacggcactttgggagcctggtcttgaagttcggactgctggtccagataccgagggccgtgagcctctagaggctgttggctgtgttggagagggacccggggggcttctggtgctgggagctagtcgtggtcgattagatgccactgtagaggtgcgggaagtactcccgatggacgggcggcccgtagtcgttgcgagttgtttcgttggggacttcgtaggggactaaattgagtagaatcataggttagcataatggaacggaacacctttgtaggacatgacatactcggagagcggctacacccttcggcaccggagtaggagttgaggctgcattgctgctctgtcgccttgctgctgtaggaggtagcccagtttgcttgcgcataccagtggagatcccaggtttaggctgcgctttgctacctgcggcgctgctagccagtttggcggtttgtttactctccggctcgggctggacaatcttaacaaccaccgttggacggacaaacatgccgtgtcctggatagcaatcgaaataccgttcgccttggactgcgccatcgtttttgccggtggcttcatctaattcaaggcctatccactgtccgtccgcaaaatgggtgttgccaatgaaacgcactgttgctagccgtccatcgggcagctcaatcaccgtgcctacagataaggcatggccagacatttcgagtggattcaagagctacaatgagctcttgagcgatagctgagaagttctggttgttgggaggacagaaacacggcaactcctgagtccaacggagcgcgtcaagtgactagtttctgcctcaggcagaaacttccggtttacgatgtagatcactacaatatagttactgagtacacgcattattgatccaaaatactgctaactaatggcttctccgttgtattattatagcaggcttgaatcttgatttcgttttgcattatccagagcccttcatgttgtacgtcctatataaataggcccataatcatatacattcatagttgtaaaccaaaagtctagtgggaataaacaaagagtgtcgtagccgggtctaaatctaagcatcaccgctttctcctcactgtttaaagaactggggaaaaagtaccgggagctcttggaggctagagatcgtgtgcttcgaagccggcttgtgtggtacgggggtcccttgttcgactaggtgaacggtagtccatccccgagcatgcgcatgtacgcaattcaggtgtgaatcatctgatacggccttattagcatgaagagtccaaaaggtccagacatgcagtggagagtgacataccaacaaaatagcactgatccgtgcttggagcaccagcttccttctccgctttggcgtacatgtcctgaccaggtttgcacaccaagggcaagattccatagtcacaataggtaataccttcgaacagatcctcaataccgagtaacttcaccacacgctttgcgtggttaatatatgcgttcgtgagcagccatggtttcacctttgttgtgtccagggtttccaacagtttgcgcagcttgggatcaggcttgaggatattgtcaagaggtagcgcatcatcaacctcgtagttgaaggcaagcgggtcgatcttgtggtggcgggtaaggccttcaatggccagtccatactccttgtagtatttctggtgtagcatatgggcatcttccggtgtaaggtcgagatgtttgacaaagaaaacatctagcacaagtttactatattagtaagatagtctagcacactatgttggcttcacttactgatcaatgcctgcatttcatcgtggatgttgcaagctgcgtagaggagcgctctgttattagtagctcatagagagcggaagtcaagagcaccaacatttagaatagagctgtaggagcacatagtaattagtggccacaatgttgaatttaacctctcttgacttacacaattgtcaatatcgaagaagaagaccggccgtgagtcactgactccgttggcagcgttggttgacatcgatcttaaattaggaaatcgcaagggtagataatcaggtgaaagtctagacgaggtcacgataggtctaataagccaacaggaagataacgcaaataaccgatgcataagtcaaagagaaagtaaagtaagatcggcttccacttcttactagcgccctcatgttcccggcagcaatccgcgaccttacataatcggatttagcgccctgacggccggcatggtggactttttacgacacttcatttgctcttctatccaatcctcggagccttctcaatcgtagattggactgagtggatatttgacgtgggttttacgcgtttttagacatatctgcttccagtctctctcatcttgttctagctttaccgatccctttccctagctttcccaatgaccatggccgcgactcatggaccaacaactcaccttccagcaggtcctatggctgtttcagcctctacactggatgatgaggtacgggagtacgaaaaaatcttagccatcaatgaccaagtcttctcgggcactcaccctcggctcaatgttccccagcacttggtgcgcaagcctgggagaaatgtccaaaatgtccctctccaaactcatttacctaaaaatccccctccgacagctgtattggcgaatacgcctgtggttacaaccacaaaacagccttacaatagctcgcagagtgccgcggccagaaacgccttgcctgcagcatcacaacccgcccgtgtggcttcaaaacctacatccgagatcgatcctatcttcttgaccaagtcggatgacctaatcagggcggaactacagttacaaaggcagagattggaaagagcgctgcgtgatcaagtggagtccaagaaacaagagaccaaacagagacctgcggttcaagacacgaagcccgactttgatgtctcggaggttttcaaacaagctcttgaggcagtgaaaccagtctcgctgagcgatgcatctgaggccagtggacctggcggtgctgccagtgattccttcgacgacaattcattttactccagtagagctcccgactcgcctccgcagactggcgggcaacataagtcatcccccgtggctgtaattgcacctacaggacctgccgcacgtggtccggtaacccattatgcagatgagttgcagcgacttgaagctctcaaccgtcctggatctgatcaggaaatgccagatgcttaccttgttgctgaccagcgtcaatcccattctcagaagcagggccgctaccataaagcagaggctcccgtcagccgcttccgcgattcgcatcggtccgagatagtggacgaacccgaatattctccaccagctccagcagtgccgccagcggatcatggcgaacatccccgtgggttagaaactggtgctggaagaacatctaggctagatgcgagataccccgaccgaacccgagatattcgcaagcccccgtctcccacaaacgtgaaggtagttcgaaaccacatcacatcaccggcagctccccggccatctcgggtgtcacctctggcaactgccaaggttccttctgttcagcaagtccgggatgaacgtccttctgaccaggtgtactcggaccttgattctgctcgtggcagtcccaacccaccggcatttcaggtcatgtcacggaaacggagaaggctgcgtgaaggcgatgaaggtccccgtcaaacgtcgcacaggacacaaaatgcagaacccgtggaggcatttatcaaagaggagcctgtttcaccgccaccattcgccgatgattctacggttgttcgcagccgaaaccctgcagagcgccccatctacattgacatcgcgtcccctcaatacactcctgtatatgaaactcgcggaccgctggtgcgagagccagtttacgagattgacccgtaccacgagcctctatcagacgttgggccccagcgcacaatatctcgtctgagcatcagacggccaattcgggaggaagctgatcttcgacgagtcgccagctcacagtatgctcggcaatcagactatgctcgtgagtacattgaggcccagccacgcccagttcgagcggcatcatatgtggtggaacgccctctgcaagagcggtcaaggtactacgaagatgcccctccttacacacagcatcgttatattgctgcggatgacatgctgccctcaacatatcgggaggcttactacgaagaggcaccgccggtgcggatgatggcacctcctcgacgtcggatcgtggttgatgagcatggcacccagtactacgagttgccacaggcaccaagactgcagccgatggcacccccgcccccgcccccaccccggccagtctctcggatgtcaaaagatgtttatgaagaaagagtgcaccaccatgcgggcagtgttcgtgcgccttcagttgtgcaagacccctacggtgaacgacactatgtgcaggaaatgcccccgccccagcctgtctacaggcgagtgacgtctgaatatgctcgtcccgtagcagccgatgagagacaaggctacgctgctcctttggaaggccatgaaccttactcacgcagcagcagtgtacaagtagcggagtacattcctcgtcatgcggtctatgttgatgagcgtggagtgccccaggagagaataattcggacagccagtgttcgtcctccacagcctcactatgaaaactcgcatgaggttgttcagcgagttgggagcgtgcgaccaactggcccaggcggccgcgagcccagtatcttcagggacagacaacttggggagtatgttgagagaccgtattacattcgggatcgacggtactatgaaggtgaaggcgaagagggagatcacatcgcgctggatggcgcgaatgatacgatccagcgaggcccacagcgttattaatagcgtgccatgcttgaactttttcttctatttgcgcagcatttcatgtctttgtatttaaatgtactattccatcaattcatactttacgcatcatactttacgcattatcactacgtaccagattcgtatatcagatatcttgaacccaaggaaatttgcacatcagagggtggcagttaagcatcttataatctcagtcaattcctcgtgcttgttgaatatattggtagtagcagtcatatccacaaatcctcgtcggacattgttcttgttgcagctctgatctgcaaataaactgccaatctgttgtgtaaggagagaatccaagtggtagattgattttgctggatcatctagcttcggggacttgtgttcctctcacatcagatggctagatattttcaacattctgagtatcagaaacaaagcctttatcatcatttgagagttctgaatcaagtattccctgagggctgaaagtggatgtatggaagcatatcaggatatttcaagatttggagcgctcaaaaattctgcgggctatgcttgtaccttgtaatatttcttgttagcctgccatattcaattaaagtcgctgaattcaagtatcattcaaggaagaaaaaaaagaaacaatgaaatagcctaggctgcttccacctcgatcagattgagattaagtttgttcacgtggacttttcaacttcgcctaaatttatcatcatgtgcaagtaaagtagtggagtatggttgtgttgaaaacgaattatatatagtacctactagaatgatagttgtcgagagacaatgtgttcgagctttcgagaaacgaggcatgcaagacgcaatcctgcaacttctagcccgtgctaggtcggtctgatatacctgaatagaatactatcgtgattagctagtgatctctttctttgtcatgggagtagtatggcaagtgcatcatgattagtgacagcttgtatcggagtaattttgtatgacatggtaggttccatacacgatcatccgaattatcatcatcacttgcaatcattgcaataatcagccattgtgtgggagggcttaggattgataccttgttttgatgtgaaccaggtcacgatgaagaaggctgccagagtatctgggatgtcccattccgcaggcatatgaatagatgaggatggggtccaagaggaccagagggttggtccctactggcctctgttgccgtgtggatatttctcactgtattcgatgtaaacttgacttaaggaaccaggttatagaggaatggaattctgtcaaagcaaaagacccagattagctagttgtaggagtcaaatggggactatactggcccagtaaatttcaggcacatattgattttaatttaccactcacatctcgcatcagagtgacaacttcttcgtcatgtaactcggtccattcccgttgatcgtcatttgcaagagggcatattgagacagacgagggtcacgtccaagggtcataagccatgcacaggagtgaacttactacagggcagtatgtagcatctaaatgtgttgtgggtagtctatcgagatggtcagaacctttggccttgaccgtcattaagccactgatagaccgaattggggagagagttagttgatgaaggaagatgcagggtgttcgaagataggttgtaaggagaaagaggtaaacagaaagagaaacaatataggtaggtatggaaagctcttgctttgtttgcccactccaaacaggtcatacacacacagcaccattactgctattttctatctcaccccaattataattcattttgtaatcttattgacagtaaggttgccgcttcaggtagagatcggctcccggagcacagcctgagtactccttgagcacgccctgattcctactatgtgttgattataatggtgtagctctcttggtggggattgggaagtagagtgttgctgggcttataccctgtcgaagaatatgattatgttatctagagtggttgttgatatatgtatgatccaattgttgtattacttgacttagatatatattcctcaagtgaaatccattggatatcgcattcgtatgtgtcaattattgctccaagaatagaagagaatttcaaagttgtcatattcatgtattgtaggttctatgtgagcgaactagccaaagtcctcggacggtataaaagatagtgtccggctgtataaagatagtgtccggttgtagtacttatgcccactcatccctactcagcaaggcatcattagaccagcaaggcatcattagaccagcaaggcatcattagaccagcaaggcatcattagaccagtctccattccctctccgttatctccctgagggacagcaggaccgcagacgacggcacgaacagcccgatcgtctgattgcgcacaagcccaagactaaccaactgcccggcccactgccagccgcccatagcgtagcacggcatgaagacaccagccccagagtcgccagtgccgcaaactggctctgtggcctcactcagcgggtatagcgtcagcaaacgggccaccattaccgtcgggtccgacatgtcggaactatcagcagtgcgggcacggaacatcttcgactcgaacgggccgacacgtccggcgctgcacccggtgcgcgccccgtccttgtaaacgatcgcgccggcatccggatcggctggtcctactatgtggtgcagattgaatgtggctggtggacgtggcgcctctttcgtgacactcaagagctctgtcataacgtctgtcccccgactgttaaaccacctcccattatggcactcccatccgtctgcaaggcgtacaagggctaagtcgctccgccagccctgactattgaccccgatatcgccatggaccacagtgccacatggctccacccatgccgataatagacgcgcgcgactctgactgtctgcctcagaaacggttttgaacaactcactcaggatgtcaagccctccgggcgttatcacctgggtttgtttcttctctaaatatggtagtacatgatacgctgtgagggcatatttttccccgtcatcattgttgctggtaggggcgagaaacaccccaacagaacccttggactcctccttctgtagcgagatcgattgaccatggctaaggcggcctgggtgttgcggagggcgcaacatcaagttcttgcgtaacacaaagctgcgctggctcgcctcccagctttccagtccagcgagtcccaggatatcttcggcatcggctgccgggccggccatctcgcggatctgagcattgagcacaattgtgggcgtatcctggtcggggaggaccgcgagtagcgcggccgtctcgtcggcgctaacgtgaaggcagacgcactcgatccacagcctcttccagccgaacgggcaccgggtggcgagcacggtatgaacagtgcggtcacggcgtagtagattctcgatgtaggttaggtcgtcgtctagagggcgtaccggcccgcgagtcatcgatgggagcatcgggagcatatccggatcgcaaacaacttcttccgggaggggctccctacgctgtgtcatcatgtccagccaggtgtcctctgtatcaaccagtcgctgattgtatccccgcgggccgtcgaggatggccatggagcgccagagattgggctctcgatatgttggttgttgcgggaagacctgcaggccccagcggagcaaagaggtcatcgtctcctggtagagcagaagagatatcgaatcgataggctcggggtgtgggcagagatcggacagtggtaggacaatggtgccatcatcgagcgttgcggcgctgccttctgccagggcacggattgccatcagcacggtctcgggcgttcgggatgatagaatggtgcggatcttctctgcaaactcgcgaaagactgttggcgtggtcatcttctcccgttttacgtgtggcgtccagggagagtgtgcccatttgccatttgccgttaggctttgtgggtgtggttgcccgcgaggtgattaatgctcagcgttatgatgatagatgactccagtacgggcttcttgggcaacgatcaggggcaggggggtagtagcatatacttacagcggtcacagcggggaatatctaagttactgtggttgtggaaggcaggagtcgcaggactctacaggaaggcacgatcaacaaatgaaatcggctgggctgcatgtacggtacgagccacaggagcgatctatggcaccagcgatacaaacagtaataatttactggctcactatacaatgatcagcgagctgctcttgatcgcgcactttaggctcatgtcgatatggatggaggtggagtctctatggaactcaacgtcagtccgagtcccgactcccgcccgccgattcccacctcgacatcaaaacccgtattaccctgtgtattacccaggggtactgtatagcggccccaggatcacttcaagttcctacctaggattggctatttccaaagattgttatataaaaattatgcaatagaaagtttctggtagagaaagaatctctgtaagttgtcaaactgatttcggtcctccctgtaacttgaaatagttacagtcagtggacatatgtttttacacccctagccccactcccctatgattatataatatactgccggtcgaaaacccccatgagttcatactgtaggatcttgtacttcgcattttaggtaggcggtatactaatatggtggcggtgaactgggtggggcattaagggtgtagaaacttatgtccagtcactgtattttctttcgtaatgtaattacagaacttttgtccaacatgctcagccacgctgtaaacagatacgccacaatacccgaagcactgctccctgaccgaaaaagtgggccaaccgtatcacgtgcctcaatgatgactcagcctccggtaaaaagggctccaaaaacagcgtcccaggtagctattttcagagcccaatttaccgtcaactagcattggggtgaaatgaggtattgagaacttatactggtccttgattttctatatagtagtagcaaatggcaggatatagccatgctagatattgttgtagttgtggttgggtttaggtatcgccttgccgcagaaaacaataaatttgcagtggaaacttcctttctactgtgttaatattccaatcagcgtctgcatttgcctggccttagtgctttgacaacatagcctgccatcttgggtccaacttgtttagtagtatcaatgctctatcgtatcttagggtcactacaacaattgaacaattaatctagaagacccttcgatatgactaccctcgagacactagagcttattaacattacgggcatcattaaatggacctaggcacaatttgcaatggttcaggagtaacgggtgttcatcatcaacgctcatgtagggacatgaattccgaatttggtattttatagcaagttgaaatagttgtggtgcaatcagcaacgtctcactcctttgcagttattcttatcgggaaatttcatgaattcaggcttgaattgacggatttcgctattaatagcatgtgttgttaggaaaattgacatatttggacactatcaataatgctgatgcttgagacgtttgtttttgacatagttaacggcttacagcaatcgttgtagtttaccgatgtagtcgaagtaccacgtgtgaagtatatagttctgcggttgaaaagtatatcaactagtaacgatccgcctaggctatcgatactacactctgtggaatagaaaaaggtactgtgctagagattatgttctgaataattcctgatggtgaagtggcaaaagtcgtagttatatatcacgcggtcaagtggataagccccgtacggagtgccaactttacatttccgactttctttgtccgaggaaaagaaacagttcaaatcttcacaagcttattttaactatacaccaattaatagcctcattatcttgaagcttgctctaaagccaaggccaatgtgataagttctctctgactttgaaaccgaggacgggatgcagtctgattttcaaaaccaacggtccagtcggaattgtcgagtcctttggagagctgaagaagtgacccactactgcctgtacgagaagatgacgtctaccatttgaggggaagttattccacctgggtaatagttccagtccccagttcattgcagaaaatacgcatagcattgcatatcattgcataggatttgtgtttggatgtatcggaagcgcaacagtttgtcccccggcgccgtggagcccgaacatgtcagagatcagaagcgatcagaatccagctaaggtatcagcggtatgatcaacctttagctccacatgcctgaccacctgggcaggcttgacccctcagttttcccagcgtccggtccagccggtgggcagtgataggcgtcctatcaccacctgtagaccagtggattaggatacggcggcatacagggttctctgtcccggagcctatgaaaggatcaacctgtgtatgctaggtacggtacggaatgactcggatcccgaagtacctgaggcctgtcaaagcgcgtagaagggcactttactgtaggatctcatcactttcacatacccacgtgatagtaagacaaagccggtatgagacacggtttccagggactcaagttcgagataccttgcgatattggccaggtggtttatgcctgtatcgggtactaacaatggctggattccatttgccaagaagacccttgcgaatagacattcaagatcctgcattctcgattgatgacaatgtggattcgagaaagagatatcaagttaaagaccctttgagacccttccctagctaatgtcttaaggtctcgagtaaaaagggcatataaatcgaaaactgcaaaatcaagtagaagacccgcaaggactgaccagacctatttttttcccctattgtttttgttaggcttccttttcctttcctagtttctttttatattaagatatatacacatattgtatatttgtatatttattctgatcgcattcgcttttgttctcatatcgtatttagaggcgttggttggccccatcgatcttcgtttccaccattcccgggtcgaatcgcccacacaggtcattcccatccctgtcgagaacggcctgattccttcccacatctcccccccccccccccccacnnnnnnnnnnnnnnnnnnnnnnnnnnnnnnnnnnnnnnnnnnnnnnnnnnnnnnnnnnnnnnnnnnnnnnnnnnnnnnnnnnnnnnnnnnnnnnnnnnnnnnnnnnnnnnnnnnnncccccccccccccccccccaacccaatccatccactctctccctctatcccctcgactcgctcaaggggttagagatttctctaactagtcatgcacaagatatccaacttcacgggccaagcccgtcatggttgggaacgaatgacgccgactttcgggatgtccagacctcacaccgatatggcttttcgccgaccacacggtgcgccgcccatgacaccgccgaccagcatcgatcccacagtcaatctgtccttcaacgttccgttctcgtccacactagccggccccgatgtcgaagatgtgctccacgccagccccggtgccctccagcgctggactttcccggaaggcacactggagggcacatcggtgcatcagcttcccgtccacacaaataatgtcgaaggcttgcagagattatgtcggaagatcacggaagagaaaggaggacgggtggaagctacactcacaacctccgaggccaaggctgtgccctcgctacaacgccggccgaatggcttggtgaccaacgtctgtgtcacaggagatggagatatggcacgcaagatgcgggcgagaatcttgaatgagaccccgatcatgctggtacgtgaacgaatttttttggttccggcgccagcagtattttcatgtccacggacatcccttgctaacatcggaccgttcgctagcgatgtgccactgtcgatgtggatatgcatctgattatagatggatcgccaaagggaatcagagctagcgtccttgagcacctggacactttagccgcctacaccggagccgatattttcctactgactcccaaactccatgatgcggatagtgcggtagtttcgtcatatggctatgcgtcggataatggcttggaacagcgcttcagggttgccatttacggtgatttggagagctcggaacatgccaaaacccgggttctgatcatgattgaccaaatagtacgtctttgtgtgtgcgtcgtgaggcaggcgaactgaccagaaaccagctcaaacgccacgtggatgccatcaaactggactcgactatgcacaccttggtctgtggtcgcactcgcaagaacatcaagctcatcgaggctgctacaggcaccgccatttacttccctccacctttcccgcaaattttcggctacataccccccggtgcgaatcgtcgaagcgaggatgaggtttacattacaggtgagacgcccgaacagattgctcgcgccaagcagaagctgcgagaactagtgatgggagtcaagatttttgtcaaggatgtggttgtcagctcaagcaaaatcgacaatatcttactcgatcgtctggataaggtccggaaggtgatggaaatgaacggctcttatgttcttttcccgcagcttggtagccaacgcgggcttgttcggattcaaggaaccgaggtgttgcacgttgagcggacagttcgggaaatcatggctctggtgcgtcgctttgtggtttttggtggaatgatttgctaatatttggatgtacaggctggtcaattctatagtgcctcgtggtggattatcatgcccgaccccgcccaaggtggtctccgtgctccctcaactgccgatattcgctccatgctatcggatatctgtaccaattcggaagcggaggttagctttgacaatctgactttcacaatcaacggttccgatgatgcagtcaaggctgctatgtcagtcatcaaccagatcccattcgtgatgcgaagtcaataccagatgagggtgaagatcgagttagccaacgagcacaaggagtttgttagtggcaagaagaacggaaagatcaacaagatcatgggtcagagtgagtctcaccggacatctacctgtaacacgagatactgattggcacccaggcaatgtccagatcatcttcgatgggttcaacgagtacaacttctatatcgatgtgtgcggcaaccagtatgaatcgaccaagaatggcttggacttggttgagcaggagatgcctgcatcgatctcgttccacgtgcctgaccaatatcacaagcggatcatcggaattggtggacagcatatccagcgtatcatgaagaagtactctgtcttcgtgaagttctccaatgcaatggaccgcggtggcatgggcaaggaggatgacgacatcaaggttgacaacgtgatctgtcggacccctgctcgcaacgctcagagtctggaccttgtcaagcaggagattatggacatggtcgagaaagttgtaagtgcttacagtggccaaagctttgatctcatgatggaaacttacgatttgcaggatgccgaatacgtcgccgagagagtcgtcatcaatcgcttataccatcgtgagctattggcacgtatgcctgagattgaagagctggagaagaaatggaactgcaagatcgagttcccaagcactgagcttgccagtgacgttgtcactatctccggccctgagtatcaggtcccccaagcggtcgacgcattgcttggcatggtgcctgagagccatgagcttcacttccagagctcggctgaactccaggaatactttaagtgctccgatttcctcgccgatgttcggaccaagctcaaggagcagtacgaggtcgatatcaacgtggatgtcggtaccgatcttcctactactcaggaggaaggctcctcgtctcccacccccgggcctgaagaccgtgtggtcctcggatacacgcgcaacaacgccggtggcctaaaggacgccattgacttcttgatctcccgtcttgttgcacatggactggacgcaaacaccgtcaagggagctatcccgcgccccaagtccgactcgttcgaagagtcgctgcccttcttcgactcaaaactcctgcagcacgcaccagtgcccctctcgaccgactcgcccactcggccgaacttctccgatgagagcagcgaacgaggctcgattttcgagcgcctccgcaagcccggaagcatctcgtccttctcctcgttcatcggccgcaagaatcactccgcctcaccggggtcgttcttcaaacacgcctcgagcaacgcctccaaggcctcactcgtatccatggagtcacgcgatagcggctaccgcaacccatggaacgattctggcgtgaacctccccgaagacgacgtgcacgtcctggggagctcgcacagccacaagagcagtaatagcaatggctggcccacacgcttcgacaccaagtttcccttcggcaccgcgccgggtgacatgacgccaaagcatgacccgcgtacttcttatgatagtggtcgtcctagcacttccaattctacttctggatacccggccccaattgggccaccgcgttaaaacaaaaatatccatttgcagcagtatacccttttttttggttgagttgtttttgtctgtctttttctgcaattattttcattcccagcgtgttttttccggttctctttttgttggtcttcttgttgattgataccacggaacgcaagcaatgaaggcgtcagaaaagaaagagatatccaagatctgcgtgcgatagagcagggagaatggtcttgaccatatcctgcctctttttgtcttttttttttcttttttttttttcgcgatgcgcattcggaggaaatgacgggactggatagtctgaatttgatgataccagggccatctggcctcgacttcagaggagttttccgacaagttggggttttatgttgatgttttactcttttgatatcccccaatcatcaatgagattttgccattagaagacattctccaatctaagttgttatgatggaagctgctatacttgatgttctatcatcacatatagatgtaagtacctgaattcttcaatatgcttctcatagatagcttcgagtgacatcgatacctcggtatgcccccgtggcgagtgacgttatacgcggggtcgaagtcaaagcacctctccacacccccaatcatcaagttacaactcccaagagaccatacaatcctattgaaacacacagctaaacacctagaacacctaaaatgacagcatcctaccctcgcccggacttccaacgcacttctctaaactggaacaccctaaatggtccctggaccttcaccttcgacgacaaagacgaaggcctaatctcacaatggcaaaagaccagcctggaaggaataccttcccaccagataacagttccatacgccttccaaaccccagcctcgggggtaaacctcatcgaagcgcacgaggtaatgtggtacgagcggcgcatcatagacatccgcacagccaatgaaaagcaaaaaggcaatagactactcctccgcttcggcgctgtcgattatgagtgctctgtctgggtggacggcgtcctcgtcggcggacaccgtggcggtcatgtgccattcgatatagatatctcggacgtcatcgccgacggcgctacagaagcccgtctcactctccgggctagagactcgccttatgacatgacccagccgcgtggcaagcagttctggggccctgttccggaaagtatcttctacacgcctaccggcggcatctggcaatctgtttggttggagagcgtcccggctatgcggctgctatgtgggagtggagggacggtgattcgttctgatgatattgagggcgggaagttacatgcaaaggttcaagttgccggacgccgcgttggaagtgcggcgaaggtcgaggttgaggtttcacttggggggctaggtattgcaaaggtgcacggcgagctgccgcgggataaaaccttcgttgcgcttgatttgagtatgacggttactgaagctgtggtggcacagctgaagacgaagaatcagaagctgttcggtgttgatggagtctggagtcggggtgtcgcgctctgggctccggagcatcctgttctctatgatattacgcttcgcctgtttgatggggccgggggtcttgtcgatgaagtccagactacgaccggcatgcgcagtctaaactggcaaaatggcgatggaacgttccagctgaatgggaagccgtatttccagatgttattcctggaccagggctactggcccgaaacgggcttgacacctccgtcttcagaggccttgaagacggacatcgagctagcgcagaaactaggcttcaatggatgccgcaagcaccagaaagtcgaagatccgcgcttctactactgggcggaccggatgggcttcctcgtctggggcgagatggcaaatgcctacgagttcgacactgactacgttgagcggtttaccagcgagtggatcgaagccgtgaagagggatatcaaccacccatcgctgatcacctggacaccacttaatgagtcgtggggtgtatccgatttgaaacacaatgtcgagcagcgcaaccacgttcgcgctctgtatttcatgaccaagtatggcccacccgatttagagaaaatggatgaactagctaatacaaaaaaacagagtcctcgatcctagcagaccaatcaacgacaactgcggctgggaacacgtccaaacagacctaacaaccttccacgactacggcgactcaaccgacctaggcgccgcatgcgccaccatgacagcgatcctcgagctgaaaggtggacatgaggtcttcaccaaaccaatatccttatacgccggctctctgatcgtcgacaaaggcgctcagcatacgcccggcgcaccggtgatctgctctgaattcggcggtgttaacatcgcaccacctaaggactctcctgccgccggggagcgggactgggggtatacgactgcgaccgacccggcagacttcttggtgcgatttaagaagctggttatggcagttgtgcaaccggggcatatttgtgggcttgtctggacccagctgtatgttgcattcgtcgttcctggcctttggatttgggacctgggaatttgtgctaacatatttccttttacttcgatctaggtgtgatgtcgagcaggaggtgaatggcctgtacaccttcgatcgcgaggagaaggttcccgcagagaaggtgaaggagattatggatgctgcgaaggatcactactaccgtcataccacttctcactcgaaggggtttaggaagctactggatcagactaagcattttgtgaatctttaggtcgtgcaatgctcattgtggatttgagggatatccagtgagcggcatcgtacctcttaagaccgtagttatcagcaagaggccatcatgttgaagctatctgaagatcagagatatattataggttcatgcggtgtcgggctacctagttccaccctaaattcttcgtataattgatgaatgaacaaaagaacatctaaaagtgatttaaaatacaaattgcccatgtagtgatgtgatcggatgatctctaagaattgcggccagcagtggatatacccgaagtgtcgctggataaaaagtgccacagaaaatactataacggatatgacgttgatccaattctatattgaagggtgaagatatagcgctttgtcgatacccaagcactcgatatattctggaacgcaggacactgtgagacctagtcaagataagtccgcgatgcaagatttaaaaaacaaaaggcccgaaaatactattgaacatcaccaaaatatatattattgtcactgggcgctagacgaaaagatcccattaagtaaagactgaagagcaaaatagcccaaagatcaattcgctggatgctgtactcgaaaaaaaaaacaaccaaaccccatagaaacgccggagatgccaagaccccatatcaggcgagataaagaaacgtgctagatggatgtgaatgcgggatgcagaatgaatgcatattacaagtaaaaaatttacatgttagccaattcctggtcgatctgtcggtccaggaaggctcgcttgtcgcccgtgagcgaggtttgcaggcggtgttcgacaagaacgcggactgttgggtcatggttagcgaactgtatgattatcatagaaattaaggtaggaacttaccctgttttttggtgacagtgtctagatcaacctcggccaaacagccgcggattgcctcggtgatagcaccctcatcgggcccactggcagaacggaaatcaaaggcggtgctggcgggtcgagaggggtactggggcagggggctgcgcgagccagcattgccgaggaggttctcgctactctgcatcatgccgacgctgtgtctgctcgaggccatcgggttgtcttggtaggcactgaggccacccatggacatgtgccgagaagcctgggcagagtggccgcccatgcgagggctcatctgcggcagatcagtgtagcgggagaagttcgacatgtgcgagttgcggtttccggggacgttgccgccgacgaagggtgcgggagactgtgggggcatgtaggggtggttgcggccctggcctgggaacccggtgagaatggtggaggctggcttgacggatgagtactgcgagtgcatgtcatccatctccatagccatttcgtcataccggccggtggcgtagaccttctcctggctggcactgacctcgccgcggcggccggggaggttattggccatggcgtagtcatcccagcgctggagagggatgctgcgtggatcgaagggctcatcttccacggcgatgacacgcttgtcgcccttctcgccgatgacaatacgggtggtaccccatgtgaaatcgtcctgtttccagaaggcatacaacggcaagacgaaattgtagatcgggtacgcaagaaggtagatgatcatccatccgatgtgttgccactgccgtttgacaatgaagatgatcgcttgcagaccatatacaccagccagcatgataatcgagatcatagggaagggacccgtgttgctggcaactcggtagatcaggtaggtgaggtacacgcaggtcgcaggaagaatgagagttcccaccagatcgacgagaacgacgaaacgcatactgaaacagcagaaaccgcagagatcttccagagctgccagttccaccaggttgtggattgtggagttgatccaacgacgtctctgcgacataaggacactccaggtatcgggggcggctgtgctcgcgtaggcatctggaataaacttgtacgacatggctgggaagtgcttggtcatgatggttgttaggtaccgatcctcgccaagagataagaggttcttcttgtggagggtgtcaacatcattgtcagcgtaatcgtgaatgactttgtccgagataataagaggacgtcctttgtccgcagttcgaaggcggtacatggtgaaactaggtattgttagtatcacttatttccgagaaagcatataggaacgtaccatccaggaagacaagtaacactgccgaagagcgactcaaatgccttggccaggtgatgcgagatatagtattcgtaaacctgaatcatggtccaccaactacgttcctcgttctgaagactagtctcgccgcaaatgccagcgatcttggcatctgctgcacatgctgcgaccaagcgattcagagaatcctccttgacggtggtatctgcgtcgaccatgagacagtattcatatagctcgggatccacaccgatgacgttgttgatttggtggaacatttccagttcaaggggggacataggtgagcgatggtgaacacggttcaagaactgcatgagaaggacctgcgtgtctcgcttgccacgattgccgggtttggacttgcgctgctcggattccttgccaaccttgacgaccacaatgtagggcacgacattgccttcgtactcatagagtccagagtaaaccttgccgtagttcagctgctcacttccctgaccgagagatttgcatggcagtgccggtgggtccatcttaggatcaaccccgagaatgtccagaacgatctttggggtggggcggtcatttccgccaccaacaatcataccatcacagatgacaaagatcagctttctcttgttgtcgtactgcaaggcagtcagagaatcaagacctttcctcagatcgttctcgccctcagtgtatgcggggaccatgcagatgacaaatttgtcctgaggcgtgggccgacgtttggaccccagctgcagagctgccaggaatttgaccagaatgacagcgcagataagaatggtaaaggtgagcaggatccaattattgacagtgcatcgtgcactttcacggaaatcaactttgccgacatagaagacaaagtcgagacatgtctgagcatttttgaaatctgtcgtgtcctcccatttgtcagtgacgtcttcgcccatgttgtccttgaagagagcagtcagagtcgagggtagccaatcgtatgtgtcgagattgttcatcgtgctcagtgtatagaagtaatctgtcaagtcatacaccttttgatccttgataacccagtagcgagaatcagcgtcggcctgcttcttgatggtatcccttgtccaaaccaggtcacccttgtagtatgtaccaatctttggcaagaatttcttttcataccaggtagacttgtggagtgctgaggtggtgcttgttgcttgtgcccccgatttgtgctcggccgtagaaagggcgatggcggatgtgtcgttgtgctgcaaagcgagtgtatcggatgtaacaaatgaggaacaataacgattgaggggagggggaaagtaggcatctaaaatctctcctccaaattgttccatgttcgtcgaggatgttgtttctccagtaatgtcactgtgttgtgtgcgccagaacttgctgatgtcgtagacacggccgtggatgccgacgtaaaagttattgtcagttgtgtgccagctgacttccttcttattccagactttgtccttgttgggacagagaaggtcaccaaacgcaatgatatagaagcaaacaattgcattgaaaagcagaatcaaaaacacaaggacgagcttttctcgccaggccaggcggacatccgggcgtttcatgcggccaatgtatcggagcacgaaggaaggaatccagaaagtcagcgcccagacaaaaccagtccagagccggcggcccaaggtgatggtcttcttctcgatgtgctttggatcaccaaactcagggtcgaattcgccgacgtaccggccatactcgtcgtagtacgcaatgtctccttttttgtcgtcacctttccggcccaaaccgtagtcaccggtattaacagcgttggcgaatggcgcactgggggcgatggacttggcaccgtcaatcacactgggggcgatggcgccgctaggtggcatgctaagaagattggaattctcatggatgggagtgccatctggggtgaaggcggtctcatacaacgcagggccgtacatgaatggattcacctgagtttcctctggcttgagatccagcatactttccgcttcccaccatgccccctcgcgcatccatacgcgctgttcaccgacgacggcgtcgccgttgctccagcctctctcaatgatccagttctcaacaccgtcctggccttcggtgcaaccaagtcgcgcatatcgactgacaaactcttccacgtcgaaatcggcggtgaaatcgagttgcttcaaacgacgattggcccattccggcagtcgccagtcccgcagttggcgggagactgcaccagcagaccacgctgtaggtcccaatgacacgagctgctccggcatatcatcagtcggatggatggagaggtggtaccagacacggctgctgttgagcgtgttggcaagatcgaatcggccacgctttcccacggagataccttcggtatcattggggaacagaacgcgtctgagaaaagcgtcaatctcaagttcaacaccaaccttttccaataccccctgccgcttgtcgagatcatgttcgcgttcccgcccggcaaggcctgtcatgatattgagatctggttcgacttgagctactgcagagttcatttcactgatgatggaagctccaataggcggaaggggaattccatcgtccttcatttcagcattgagaccaagagcatcatcgaagatgcctctcatcatgatcgctttaccgagagccggtcgtggaatatcgattacagtcaggttgactgtatcgtccgttgaccattgtgctgcaccacccccgttgctagaatcgttttccaatgcaatctgaatgtcggctgcgatagcttcatttgctttgctgatgacccaatcgaccagagcttcgtagagtccggcgatcaaaacctctcgctcatcagtggaacatttatgaagaaggatttctggatcaattcccaggagacctccagcatcctcacagacctcttccaggtcttcttggtccacctcgaacccgactgcgttgccgagcttaagaagaccagcaagggccgatagcaagcctcgctgggcagcacctttgataccaatggatttcaaagaagcacggaagtcttctgcagcggcagcatcatcggctgtgggtagatagtgtggaggattatatgtgtttgatcggttgagcaaggtatattcggcggggtctttcaagtccaaaaattcccgctccgcagctgtcgatgtcgatgttaggagataatagaaggcatcaaatgcacggtagccggtctcgggctggatgtctaaaagacccttgcgcacattgataccggaagtggacaaggcgaaggagaggccgacgacagatccttgcaaagataagttgaaagtggcggccaatgccgaatggagagaataggaggggttgaacgaggtgactgcagtaaggaaaggtcgtatagcggatagggcgatcagagctacctcgggtgtttccactgggatcgctgcgatgaagggttcgagcaacgagggcgtggattgatggagggcgctattcgatattagcacgtatggtcttcggatcgatgcagtgttaaacataccctagaacaacggagccatcctcagctcggcgtcgagcatgttcccaagctctgatagccagatcacggtcgacggtggcacccgttcgcccatcgggtaaagtggttgctgcggtcacccatgtatttacaaccaaactcgtggcggagtctagttgatatggttgccccgcggtataaaacgaatggagggcattcagtaacgttgttgttgagacctgagctccatgttggggtctgggtccgactgagagacctgtcgactgcgtggagaagaccgaataacggttcgacatgacgaatgtgaggtcggagggtcaacaatgttgaccgcaagatgcgatgtccggcctgttcgttatcaaaatcgcatgagggtactcttttttttgtgttggtcgtttgtctcgctaaatgtacaagagtggacgtgtagaggttgtaagagagttggatttagggtaggtcagggttgcacgatccaggaattggataattgagcgagtgactggagacggaactcctgaatgagtgagaaagaagacaaaacaaccgagaagatggcgtggggagaaagaaacccatggagtttgaaaattacggggtatggaaaaataccgtcgatcctgacgatcgtctcgaccctgtccaatctggcagttaagcttttgacatttcgtccaatgttctccctgaacagtcaaaacacacgcaattcaagtttctggttgatttgcaatgttcacatggcccaggttggattggaacctggtatctgacagtttcccccctgtaattttgaaaccataacatgtttgttgctctttcaccctaacgggtccctgatgggtccctgatggcttctgcttgataagttccgaccaatcagaagccacccgagcagacagcgaccctgggacccagaactccgtcgatggcgtattgtcatttgcgtacggctgtatgtatttaattgtattaatagtacctgaccttcgtatggcacatgtggctgctatatttgggatgtctcacacttaactccgtacagatgaccagtttcgccacacaatggacggagtatgatcggagacttgatatccactgtgctacctgtcctagcctggctactggtctattcgcgagaatgtcgaaccactctatcttttctcttctctagtgatgtattttctagaaccccctagttgccctagtttcagtctctatccattgtcttttgcctcttttcacggtttttgatatgcaggtctattgcaagggggttgatcttggcaaagaatatggggagttgacgtgttccagggacctggaccctgtacggaccaaactaagtgctatctacaagatacgtactccgtagtacaacctgtatgtactccgtagctctgtaacagctggagtggagatcgctagatattaaaaagatccaaaactggttctgcttcacgtattgttttgtttttgtttttgttttgtttttctctctcgctaagctatattgcagtatctctagctcttatatcatgtctcattctgtaatattgtgggaacactatcagctatggtggattccacccgagacacgtccaatgaagccgaaccgaattaaatatcggaccatccctaaatagccccccagttgatcggtatggccgaggtttacctattcttagcgaccgagctagtaatttgtgttgtatgccgtattgcacaataccgcatccacccccgacctcttatcgatttgttgctttttttccctttgtgatcttccattctgggcttctggcttctggtttctgtttctgttcctgcttctgcttcaatttttgtctctcagccgcttgtcatcctatacgcttcccattgcacctcaaattataacctagtcgaatcttcctccctaggcaccccgatgtgtacgatctcggtctgttgctaggggtctttattccgccaagtccacaaggcattccgattcgcctcgctccacgttcattccgtcactggagacttcttaagccactcgctctgtgaatatttgacgtcccaattgcccttcgcacactcgttcacgccctcggatctcatcccgaggagactcaaatatggccaacgcctattctgggagtggcccggcacacgctcagccctcactcccctcattaccagcccacctacagtctgatacacatctcacggcccatctcgccagtcggtatgaagatccgaccctgttcattacaacctcggcatagctaacgtgtgtttcaggtttcatgtgggattacctactgcccacctgtcatcccaggccctaatttctctgaatacatattcatcggcgattaaaggacccgatggcgggaaagagggaagtgctgccggcgaggctgaagatctcgcgcgccgtgccttcactcgtctcggtgcgcgtggtgagaaccaagccgttgtattcttgtaagctgaatccactctctgcatagaaacatatctaacagtcattcaagaggagagagcggatccggaaaaaccaccattcgctcgcacttattgtcttcgtttttatccttctcatcgaccccgctctcctctaaaatctcatatgccgcctttgtattcgacactctaacaaccaccaaatctgtcactacacccaccgcctcaaaagctggtctcttccttgagcttcaatacgatgcatcatcctccgtgaaccccaccttgattggtggtaagatcattgaccaccgattggagcgaagccgcatctcctccgtgcccacgggagagcgaagcttccacgtgctgtactatttgctagcaggaacaagtgcggcagagaaggcacacttgggatttgagaatagcatccatgttcaaactggtaacaggctgtccggatcacatgttagccacaagcgctgggcttatctcggtcatccaactcagctcaaggtcggaattaatgatacggagggcttccaacacttcaaaaccgcgctgcggaagttggaattttccagaggggaaatcgccgagatctgccagatcctggccagtatccttcacattggacagctcgaattcgccacgggtcagtctaccaccacaggtgcggaagaaagtggcggctattctcacgagggtggtgagactgttacggtggtgaagaacaaggatgtcctcgacaatgtcgctgcattcttgggtctcagtgtcgatactctggaaaatagccttggttaccggacgaagacgatccaccgcgagcgcgtgacggttatgctggacccgaagggagcgcgagagaatgctgacgcattcgcacgtactatctattctctcttagtgacctacgtcattgaggccgtgaaccaaaggctctgtgcagctgaggacagtgttgccaacaccatttctatcgttgatttccccggttttgctcaagccccctccacagggtctaccctagatcagcttctcagcaatgccgcaactgaatcgctttacaactactgccttcagtcgttcttcgaccacaaagcagatatcctggaccgtgaggaaatcacagtagccgcgacaagctatttcgataacacggacaccgtgcgtggtctgctgaagcatggcaacggtctgttgagtatcctagatgatcaaacccggcgtggaagatctgatgcacagttccttgaaagcgtgcgaaagcgcttcgagaacaagaaccccgccatctcggtaggtggcaccagcggatcaggtgcctatatgtcccagacccgcagtgcgttcaccgtcaagcatttcgccggcgaggtggattattccaccatcggcctgcttgaggagaatggagaagtaatctcgggagatttgatgaacgtgatgcgctccacccggagtgactttgtgcgtgaattgttccaccaggaagctctgcagaccatatcccacccgcaagaaaagactgccatcatgcaggctcaggtgagctctaaaccactgcggatgcctagcatggctagacgcaagaccggaccaccctcccgtttcgctgccccaagcgctcaccccgaaagtgaggaaggcgatgaccaagaaagccaagttgcaggatccaagcgagccagcggtcggaagagcggaatgcctggaccgactcaaggagccgccggtcaattccttgctggtctggagatcatgaacaaatgcttgagctcctcgaacctcaatccctacttcgtcatctgtctcaagcccaatgatcgtcgcattgccaaccaattcgacagcaagtgtgtgcggatgcaggtccaaacattcggtatcgctgaaatcagctcccgtctgcggaacgccgattacagtgtcttccttccgttcggagagttccttggcctcgctgacatcgggaacattgtggtcggcagcgatcgtgaaaagtccgaggttgttctcgacgaaaaacgatggcctggtaacgaagctcgtgtcggtagcaccggcgttttcttgagcgaacgatgctgggcagatatcgccaaagtgggcgagcgcgtggtaccatcctatgcaaatgccggtgctgatgaagtcgatggcttccaggccgccggtggaaacccagactccaaactccgacttcttcacgccaccgaccagtctccgggtacttttatttatggagatgatcccaaacaaggctatttcggtagccgcgaactggatggacgctctgatgccggaggttccgccttcaattccggtgatatgttcaaaaatcttgacacgaaagagcaaatgctcgagaaaaacaacgaaaaacagatggaggaagtcgacgaggctccgacctccccgggtcgtcgccgttggatgttcctagtctacctcctcacgttcctgatccctgatttcgcgatccggttcattgggcgaatgaagcgcaaagacgtgcgaattgcctggcgtgaaaaacttgctatcaacatgatcatttggttcgcctgtggtgtagcagttttcatgattgtcggtttccctggagtggtttgtccaactcagaatatttacaacacggcagagctcagcggtaagaatggcgcgggtacagctgactcttatattgccatccgaggcgtggttttcaaccttggaagtttcatgccatcccacttcccttcgatcgttccccagaagtcactcaagacctacgcaggcaccgacgctaccaatcttttccccgttcaagtctcggctttgtgccagggtgttaatgggaaagtggatcccagcgtaccattggactatcgatcaaacttgaatgattccgcagccacgacatccagctccacctttgatatcaatgccaagtaccacgatttccgctactggactactgacccccgagctgattggttctacgagcaaatgcttatgatgcgctcgaattacaagaaaggctacgttggttatacggcaaaggcaatgaagaagctggccaccgacgattcgaagaatgtagtaagtatacacgggaaagtctatgacatgacatattacattgccgggccccgagtacctcgccggccagcggggaagaacgccactggcagtgttgataccgattacatgagccctctgcttgtcaatctcttccaggaaaagcccggagaagatgtaagcaagtattgggatgacttggatttcgacacggctctcaagtcgcggatgcaactttgccttgacaacctgtttttcattggcaaagtcgacactcgagactcagttcgttgtcagtttgcgcgatacttcattctcgcaatttcgatcatgcttgtcaccattattggcttcaagttcgtagctgcgttgcaattcacaaggaagaaccttccggagaatttggacaagtttatcatttgccaagtcccggtctacaccgaagacgaagattcattgcgtcgtgctatggactccatggctcgcatgcgctatgacgacaagcgcaagctactgctcgttatctgtgatggtatgattattggccaaggcaacgatcgtccgactccccgcatcgtcctggacattttgggtgtccccgaatccgtggatcctgaaccgctcagcttcgagagtctaggcgagggcatgaaacagcataacatggcaaagctctattctggcctgtacgaagtccagggtcacatcgttcctttcctggtcgttgtgaaggttggaaagccttctgaagtgtcccgtcctggtaaccgcggaaagcgtgattcccagatggttcttatgcgcttcctcaaccgtgttcactacaacctgcccatgagccccatggagcttgaaatgcaccatcacatccggaacattattggcgtcaacccgcaattttacgagtacattctacaggtcgatgctgataccatggtggcgcccgatgccgccacccggttcgtgtcggcattcctttccgatacgcgtctcatcggctgctgtggagagacgtctttgtctaacgccaagacctccatcgtgacgatgatccaagtttatgaatactacatctctcacaatctgacgaaggcattcgaaagtttgtttggatccgtcacttgcttgcccggttgtttcactatgtatcgtatccgcacagcggagaatggaacgcctctctttgttagtaaggctgtcgtcgaggcctactcggagattcgcgtcgataccctccacatgaagaatctgctgcaccttggtgaagatcgttacttgacgacactgcttatcaaatatcacccgaagttcaagacaaagtacatcttccgatgccatgcctggacagttgcaccggaaagctttactgtcttcctttcccagcgtcgccgatggatcaattctacggttcacaacttgatggagttgattccgctgtcacagctgtgtggtttctgctgtttcagtatgcgattcattgtgctcatcgatctgctcatgaccgtcatccagccagtcacagtcgcctatattgcttacctgatctattggtgtgtgagtgagcctagtgtgctgcccatcacatcattcattctcctcggtgttatctacggtctccaggccttgatcttcctcgttcgacggaagtgggaaatgattggctggatgttgatctacctcatggccattcccattttctcctttgctctgccactgtactcattctggcacatggacgatttctcctggggtaatacgcgtgttatcaccggagagaaaggtcgcaaagttgtcatttccgacgaaggcaaattcgaccccgactccattcctaagaaaatctgggaagactaccaggctgagctgtgggaatcccagacgtcgcgcgacgatcggtctgaattctctgcacactcctacggcacccgactgcctcccttcccgcagtcagagtatgggtaccatactggctcgcgcccggtctcgcagctcgacttgccccttggagggggtggtactcgttactctgctgccccatctgaaatgatgagcagctatggcatggaagacctcagccatctacctcccgatgatgagattctcgaagagatccgcaagatcttggcgactgcagacttgatgaaggtctcgaagaagaccgtcaagcaggaacttgaaaggcggttcgatgtcaacttggatgccaagcggccgtacatcaattctggtaagtcatcattcaatcaatatcgtaatggacacagctaacagatatatagccaccgaagccgttctatcaggggttctttgaacgatctatctatttacaatattccttttttttttcgtcttttcaaggtgtggacatagttcttgtgacaaacatgtgttattaattatttctggctgtgtcttgatttttttctttttacaagcgaacttatgcatggatgagagctttgcgcagcgggtttcttgaccttgattctttttttgaaaatgtcgccattcgcctcataaactatttatctgtatccttgaaatcgataattcccagagcttacccctggtgtttggttttggtccatgtgaattcgtacatcgtaggttttatattaatatatactaacacacttttggtctcatgagaccacagatccgttgtactagagaagttgcggggtgatattattcggctgattagagtcatggtatggaggagactgcaaaacagcaagtgaagagacacttgagtgggcatatatgcagagctatgtctggactcccaaaccttcctaaaacctatgcggtggtgacacaaagggtaattgagaataggtgatgaagcagtaatgagcgatatgaaagaaatgtcatcagaaattattgtataactgcatccttttcgcttgcactgcactaatgtgcggctcaaacaaagtctgtgctaggtcaagtcgggaagtagcggccccactttgaccgataaccttggaaggtacatatcaagacgacaaaatggcgacctaggccgttcacagtacgaccaaaaaacgttgtcatcgcggtatacacctgtgtacatgaattcttataaagccccccatctctcacattctacttcttccctctttctctcttctctttcacacccttcgtaagttcaactaacaacaccccctctacctgcattggacaactactgacatttctttacatcaaacaggcccggtgtaatctacaggaaactgtgaattactgcgaggactacagcccggccgcttgttgggactttctatctaatcgaggcttggagcaatccaaccctcgattatgatcatccgattgcaacctttcccaaaacaatgcttcggcaatattgggtgcgggccaaaacatgtgggcctatacgttcttttggggttccatgatagcggcttggtgagtattgtagggctcgtgggcgtgggattacacatcactagaacccaacttgggagccagtatgtgtaaatggcctgtttgtacacgcttcagactcaatatctgtcgactttacgttatagcagagccgaagatcaattgcctagctaggtaagttctgtttctgcttgatggaggtggtttcaatattccttcggtcagtcatgttactggaatacatttctcaacattaatataatagatatattttagacttctgttctcagccaagcgtggccaccctttatctagatttgaatgaagacattatccctccactggctcaaccgtctttgccatcccaatcaatacttccagccattcagtctcctgtgttgtaaaggcctttgccgcagaatttgacaagcaacatagattgctctcctctagttgccacgccgcaggatctagattttcgctcggctcctccataaacatgtcaaatcttccaacccgtttactacccgcatatttattctcatacagccaaccattgaaccacacagggcgctgctcgcggtccaaatgaagaagctggggggcgcagatagtttggtctgactcgtggccaggcgccattttgcgtacttttttcactggaacaccctcaggccgttcattagtggcgttgacactgtcggggacttggactacgcccatgactccagatccgcccgggtggaaggcataggaagtatcaccagcgagctcccatccaatccaaaaagtttccttatcacctgtgcagctctaaggattagcaaataaaaaagggatttgagaaggtatgtagtgaggcgcaacgaaccgaagaccatatcataagtccctttaatgtccccgccattgccatccctatctggcccattcatcctgcatacaagcaacaatgcgacaaagtgcatccacttatccacaacaacgactcccgattcttgcatatgcccgctttcaccggtccacattctgctctgctgcacggattccgaaatcggcggcggcaagatcttctgcagccattccctcttgctctctggcatgatcttcctatctctgaagaaaagggcgcccgtgcgcaagtactccgggtcatcaaatagtaactcggggttaatgaagaatagcgagtcggcgtcaatgaacatgacttcgcggaaagacgagagaagcatagaaaagggcttcccggcccatccgttgagctgccaaccttcgtcattaaccattacagagaggtcacgcgttgtgacgcctgacagagcttcaagcttcgtgcggaaatcttcattcaaatccctgtcaccgaggtacattatctcgatggggagatcgcagcccaggaggcgaaaggaagggatggcagccagtaggtaaggcgcatggctattgcccgctgttgtcacgatgccgcggcctccatggcgcgacgagacgtgcaagctcatgtggtctgcaaagtacgggctcgtccacggaaacaacagtgtagcgaatttggtgacaaagtggcggtaagtttcgtatttttgcagcgcctcggggaatgttgactcgctgaacgtgtcgcgcatgtgggtgataatatcgtcccgcacgtaagtgtgatctctgttgttgacgaggtggacatcctcccaagcctcgaagaactttttatatgcgcgtgtgcgcaggccaagctcgtgcagcctcttctcccctgtgctggttactggctgtaggagctctcgtgtgtctgactcgctgggaatggttgacagaaggtagtcaagagcagcgctagagatgtcaagccctagattctctggatccgtctttttgtcggtgtgttcaacattatttgataatgattgcgttgagtcttggtctttccctgttgcggagtttacgttttcctgcgactctaatggaatttgtacagttgatttttcatccaacatgtcttgcgacgtcgaatcatgtacaggtgattccgcagtcctgataccagtaggccatagttgccaaagtctgcccgtgaccaagctagaagtcgatttcagactcttggggcttgaatctggctccctgaggagcagagatgatattatgaaccagccagcccctaccgcaaagatgaagcgaatgatccgaaaaagcatgcgttttggtcgtgtttttgctttgaacctcggatgtgacggaggaaagcggccttctttgggtggaattgcgtgctgtgggagcatgatgtggacaacagtggaagatgaggtatctattttcgctgattttacaaaaatatgaaaaggaaagacagaaataggtccgtggacaactctgaaacagaaaggacagcgcgttgcgttctatacccctttctagttagtgttgcccttacctccattactttgtaccaactttataaattctcgcccttctttgcatatgaataaatgcgaggctcttcactgggaattgtaagtacatatgtagtaacccctatcaaaaatggtttccctttgttgctgatgttcaaaggttgaatggtgtctcagtggacccttcgggtacaaaggaacctagaatgtgagacagtctcagcattcatagctaggtagtagctatagaggccatatgtcgcctcctgtaagtagtttattaactaactactaactaattactaactactatgtagttccggtatgtagtcctggtatgtagttctggtatgtagttatgtagggagcaatgtagggataatctccgtagtgtagttccgtcgaggtccttgattggtccgagacagatttccagtttgcaagccggcttcagttttgatctctcgttaggatattaggtggtggtgatattcggttatgctattcctcgctcttcgtataactaagtagaatcacgtgtggagccagttgtaacgagtccaacactttattctgaaacgcggacgaataaaggctcggaagtcattgactttcctgctaaatactacatctacctctagccctgcaggaggaagagcgatatctcgttcgctgctacttcgcttagattagcaatccgaagcggacctatacagaatttccgctcacctacgtggtattatagcacaccaaagacttgaaaaatctctttgagtgactcggctccagcgatacagttttgtccctaactctttatcaagtctactcctgttcaaactacaaaggatgataaaagaggcaaagaaaacgtgaagtctttatgactcgcattgtttcctctctgtcaatcttctttaaatttcactaatctggtttctatcgacggaaattgcataaatagactcgatcgcaccctcttctcgtcaagttcattcaaagcatcatcaaccgactaaccacagaatacagtcccctacctaggtttgtagacctattcagaatcatgccaatcttcacatggaacgccgagcatcagtttctgcacgtccgcgaccaatttatagctaaagtacagctcgagattgatgccattatgacccgcaatgagacttcgcccttccgcttagccctagcctatgacaacctcaccgaccttatttacgaggtacgtgttgttgaaaatgctagcgtcactatgtatagggagatgccacaatgccgtaccgtgcgcgatggacatggctattacgggtacaattccgagttcctgtggaagatccgccagcttcagggccatttagttgtacttaagaatagcctccacaatatatttgacgactggcattgtatttcgcgccaggtcggggctgtgggacagtgcttagacctttaggtatatgccaatttatttcatcgcaggagttttactcaaatgcgctagcgcttttcgtagtattgtagtcaatagtaactcgctcgtagactaagaagttgtttctggtgctcacagatatctcgagtcttcaagttctgctaaattcctaagctaaagactagtcatttattgctaaagctggttgccaatattctccacttagtcaaggggtgtgaataccaaaaataataatgctgtgttgaagccaacaatctgcactgcgctcttgacttcggtttgataacgactacccctagtatggaggagacccaaagtatttacagggtattgttttgagatacagtaacatatctattacgctaggctatttcaggttgtagttgcaatatcaaaagtctcttaaattcaaaactggacactaattaaacaatcactgattgtttttgattacgttgaatgtttccaagtacatcaatgaccaagagcatatcaggcaaatcgtccattggacgattcagcccactccgatcagagaggtaatggaagtttgttctatggctcttctgggtatatcgatttgaaagtatcttcttcaaaccctgtacccatgcaacataccaatagccctcttttccttgattaaatcaaaatcccactgcccacagcaaggagcccgaaggccaaacaaggatatcgcaaagcttgaagctccaacttgtttcttcgcttcttcgaaaaaaagcggggttgcatggccagttgcaagcggtatcacacagtttcctgcgtaatcccaaaaactccgctgaatgcactagacagaaataaccccaagttagtagcgaaaacaaacagactgaataaggggactcacctggagtttagccgacccgccagaactgggattgtgcactcccgtctgacttcaggtcttcccctaaaggttctgatgaaagaagagcgcaggtaagagatgatgacaaccacagactcgtaagactggtaagacttaccttggacttgtgtcccagatgccccgcaagacgaaatggcagcatgtatcactacgtgcataccgacttcgcctcaggcttccaaacccgtagggattgatggtactggcgaattatcccatctgcctccccaaggttcacagcacggatcctccaaaagagggtgccgacttggtccgggcgtttttgacaattattctaatggaaggagactgtggttagaaatggtaaaaggccactggctggagaactcacccgcacatcaccaaggctgacagaacaatcaatgagagtccaagctcaatgcaggtactttgctgccataacgaaggttctaagaaataacaagtcagtgaaacgaaaacgattgtcagtagtggaggaattcaccccacatcaccaaggctgacaggacaagagtccacgcttagtacaggtacattccgtcatccaacgaaggttctgagagataacaagtcagtgatggggaaaaaattgtcaccagcagagtagagggactcaccccacatcaccaaggctgataggacaagagtccacgcttagtacaggtacattccgtcatccaacgaaggttctaagaggtgataagtcagtgatggggaaaatattgtcacgggtggagaacatacaaccgctaccgaggcttggggccctggcttaggttttccgacgaaggcactaagaggcgcgagtcagttataaaaaaaagtatgtccaatctgcaagtgggacaacataccatgccggttcgatatttacaggagaccctgcagtgtcccccgtaaatctctaaaggctgttgaatgttagcagctcatcttgaccgaggaggaggtatgaggctcacctgtaccactcccatgaaagctgtgccagattgggtccgggaagcttgcaagggaggaggttgaaaggaggaagtttgaaagaccctggggggactttatatagcagacctgacctgtgcaacttgctctggcctacttaggaagtgatagccccactttttatgttcgcgaacaaagaacaaaggaaataagaaagtactactaagcctaattggggtgggaggtcgctaggtggctgggagtatgtaaaaaaaacatttaccaccttccatactatagcttgaactacagagtacaaaaaaaacatttcaatcaactaggactctaggggtcctagcagcttaccagaatgtaggtggatatcgtagggactgaaataatagctgttcgatcattaatgagacatgtctccttcaactctatgcaccactccttatgctgaccggtgaaaataacccaggctagtagagttactacgcctgtttatttctccatggtattcataatgtaatgccccaatacacgactctatcaatgtgaaaaatatccaaggtcgggacccgtcttcaccgcgtctctctgagcaggtccatagtgacgtacgatattttgcacttataatctggagcttcctcgccgtctggaccaagctgtcttttttcttacgaatacgatagttccttgagtgaacatgatccagaacggacaatatatatttgactgatgaaacctcaaatagggataaatattccacgaacaagtcagatatatgccctcttcacatgttaagtataactaagtgactggaacttgcggtctttacaaagcgagagcgatcgcgatcagataccctgatcggcacatctccatcattatccagggcggggggaacggatgccagagatgacatgtgccaagtggggctgtcaatcttttgtctactccgtacagatgtcttatatcagtaaccgtacgtccaaacccccagcgaaagctacatagagatccgagcgagttatctgggatcatctctccaaagattataatctacaaatccatcagcaaactccaaaccaaataaacagccaaccatggataaccccaccccgcaaccgaacccaaacccaaatccaaccgcagacccagaaaacccaacagccgaccaacaacaaaaagaagctctggcagcctttaccgcaacactccactcagtcggaacaaacctcgaagcgccactccgcgaccgcgcagcaaatatccaatcgaacgcggtggttctggaaagacaagaagccgagctagcagagaatacgcagcgactagcgcggcagaatcagcagtggattggattcgcggatgagacgcgcgacgggttaaaggagatcggggatgtgcagaactgggcagagatgattgagcgtgatttgctagccttggaggatatgatggatgttgttgagagcggccatggggaacatgggagtgaggatggcgatgaccggggggatagtgatacggaactggatgacaacgcaagtgaacagaatgggaatgttgatattgatgctaatgggaagaacgtggatcgacgaccgaaaggatggttgcgatggtggtgatggttgtctttgttcatttgatttgttgttcttatttcacatatatatcacgcgcagggtatcattatggattattctccgtcttcttctccatcctcttcggcttctccttccaagtattgtttccaggggtctagtccttcggtatcctggtattcattccattcatcccactggcccagactcatcaagtgtcgcatagtcggtcggccatgcgggcagttccatggtttatcaatagtacccatgttccgaacgactcgttccatctgccggctagtcaaagtctttccgatcatgatacttgagcgacaagcgcgcatagcaaacattttgcgcactttgcttggccgtggtactgacgatccatttggcgttgaaattgactctgacagcaacacgatcagttcctccagatcccgtacaccgaacaccacttccttgcttagcggtaacgagaccagctggcatcgacgaccgataggctcatcgccgctttcgtcgacagtcacgaggaacccgtttttctcaagggcggcgcgattctcaaggacaacctcttcttcaacggcagtgagatcgaggcgttggggacggacgagtcgctggttttgcaccacggtttcagcttgcaggcgctcgaagttaattttctcatcagaggcatgctgatcgatgatgaagagctcatcttggtcttctcctggacggactgcgatgataaagcccaagttgaactggccgattatgcgcatttgagcgaaatcgttcttgcttacaatcaacgaaagtttgtcctcggctgttttttcgccaagatcagtgacttcctctctcggtttcttggtaccgtctcgcatggtcttttgcaatgtgataagttgggattggagacgtgcaatagagccatctaccgtaccgataagctgtatagtcgcgtcgcgatgcgcagcgcccttgctcattttctttgcacggttcgcgctgttttcttcgggaagtacagcagtctcttcggcttcatgaatcagccgttgaactgtagcctcttcctgcgccttcttttgagcttcaccgatattatcatctacggcagtttccttgtcttttgcctcggtgttttcgggttctgattgagctgcactttggttgggaacgtaatcagcattctcgggcggaggagagccctcctcttcagactcttcttcagcgccttgtgtgtcctcaatttcacttgaagggttacttccatcttcctcaatctgatcatcttcactagcagatgcctcttcatcttcttcgtcaaccggctgcgacccaggtgcagcaaaagatttcatatgatcactgaagatattaggacgtgatggtgtgtgtatcagtctcttccgccggggctgcgctctgattaggggtggatcttctgcaactcgttttcgtggaagaccactaccgaccatggacgttacggttcggttgccaatagtgatggtagcaagttcggcaggttctcgtcgtgggcgcattcgatcgaaggcattctggacaatgctgggaatttcttctgggtctccacgagcacgagatggagtctcgtcaggagctgatggctgggatgatggttcatcggagataagggctggctcgggctcttcctgggcggcttctgggacgaaaagttcatcgtcggagatcgccgcggcaggcgtttctagctcacttggggctggcgtcgacatcgaagagcgatcagttgcagcacggggtgttctcattgatcgagccggagatggtgtgacttgcgtccttcccgtgcccgcctctgagctcgagaaacgctgcatcgcactctgttgactcgcccccgaagtctccactgagctttctttcgtccgatctcggcttggacttctaattccaccgttttcattcagctcccgagcagtgactaaccctggaagtgatgctagtggttgctgttttggcaaaggcttagatttaaccgatgactgcggcacagtttgttccgcatcaccaaagagttgagtaagagaaactttgagcgattcaatcatagcccctgcatcatgaagcaaaatttggcgcttatcaggcgagacgttgacatcgtaagcgtttgtatccatctgaaagtctgcgaagataaacgctgactgtgagacattgaacgacttgtaaacctcgttgaacgccttctgaatctgtggcaggccacatggccgcgagttgacaaagaacatctgacgatccggagtttgacggccctcgccaaatacaggacgtgagatatgccctcgcacctgaattttactcagttggtcatcgcctatccgtttcgtagccgtagaaggctcaaactccagctctagatcgagggatatcagggcagtcttcgcgccatacacattggcaatattttccttggtagtcttatttccatttgtcgaaaagaccaccacgttccgtgtcttaccaacagtgttcctgacactgaatcggactccagtgctgatgcatgcataggcatgtaagagattcagaaccttcccatattcccgcttgatgttcttctccaattcccgccgacgcactggaagccgcttgaagatgccttcgaccgacgcagtcgttcctttctgtccagccacgatctgtgtctttcggagtttcccagattgttcaaagtcgagtctattcgcgcgaggaacttgcttttcttgtgccgtgacgatgtgaaattcagccaatgcgcagagtgaggatatcgcctcgccccggaaaccgaaggtgtgcaggctcgagaggtcatcgtacgacgataatttggaggtatagtgtttcaatgctaagagaagagtacaagtcagcttgactgcaatgcaccctgagagaaatgataactcacccacgttctcatagttctccggcgagatcccgctgccgttatcttggacctcaattaggtccagtccattattcttgaatcggacctctaaaacccccaaatcatcagaaatatgtcacaaacaatatgccgagctgtttactcaccgattgtcgttgcgcccgcatccagactgttttcaacaagctctttggcgacggagcacaagtcaacgatgacttgacccgattggatttggtgtacctaattaatgcgctggtcagattgggacgtcgggaaagacatcagattgcatacagagcgggcctcaatggcttggattgttgccatgttcatcccatgatgtctacagaggagaagttggcacgcgtctcacttaacgcgtgggtttgccaagaccgcggtgagccagttgattatgacaagctcgatccatccatggattcgatgacgcccctgatgttttatttacgttgcaaggacataattgaatttgttcatttgcgaattggatagaaccgcaactatggatataaatcaaaatggtcaattaggagcaacaatatcgctcttaacgcgcacaatcaatatgaaaaaactaataaacaccgaagcgatctggcagcataacaggcgcaaccagagtccaaagatagatagcatagcagacccaggcgctgacgatcttcacccagctggcccagtatgtgcggcccaccggtgcgaaatctgtcgtggtctccagtgtcagtccctggactaacaaagtggctacccacgttgtggcgaggaagaagatgatgtggaagagcgagtagttgtattgtgttgaactacgctcgtcgtccttcgtggtttcatagtcatcttcgtcgtcactttcatccagggcactagcaggaagactgccgctctcaacagcagcccggagaacttcagcgcgcatctctcgacgggcatttggttgttgagtcaccaagccgtgctcgttgtcatccgtgcccagctggatgtagctgtggccgcccttcgatcccaaggcaattccttgggtagcagcgcgtgtggtggtgtatgcgatagtcagcatagtgacaatcgcaccgaggacgatagtggcagtcctagttccgcgggaccggatgagggggttgcagttcttgtcatccggttccattgaaacggcagacatggtcaggtaggtgcagtagacagtgaccattgcagcctgagccagtcctgcgcgagagttcgattcttgcactgctggttggacagaaacgaaagagatgatcaaaaacacaaccaggttaacctgtgacgagtcagttaggcgctaagattggtggtgtgggatacatacggtgatagcagcctggttcatagagcaaccgctcttcgcgaagaagatatacatcaggatggtcatgaccaaagacgccaagtacatgccgagggtcgaaccaataagcagaccgcgccacacgcgagagtcgctatcttcgatcttctgcaggcatagctccgcccacgagtgcgcaaggtccaccagaaggatcaaacccaaaagcaggaagagcatggcgcagaagaaggcgatgtagttgccatagacgaagaagaagggttcggggataaagaaagacatgacgataaaggccagccagaggatgaccttcggaccccaaaatccattttggagagcggcgcgagtatctttcgagcttttgacgccaagaagcaaaagggcgaggagtaaatggaagagaccgagggcaaagttaatacgatggaccgcgacccagccgtgacattccttcccgtcgcatcgaatctccatataatccagtgtcagatgttgcaatttcttcagggcccatggcgtgagcataatccaggagagtatagagttgatcaaaaggatgaaggcataagcgattctcgtcgccatactgtctttgttagtccgagatcctccgcactaggcagttgagatggtacctgttttgaaactttccgcaggcgctacagactgcagagcatgtcgctgctccacagcatgatgccgtgactgtcaggatctgttgaggaagagaatcaagttagcaactgtaacatggtgaactggagattgggcgacaacatacagaaccaacgctcggcacggccaacagcgggatggaaaggagggcacccatattgggagtgcgtgtataatatagcccactgtcttagttcgaatgtaaaaccttggaactgaaagtagatccagaatcgacaagagtgtggagagaggcaggtgattgaagatcgtatgaagccgccttcgtcatgaatgttacgtaatatatccaaatcgaaatacatcacgtgccaagtctcttttggcctgctattttaggattagcgccccgctatctagcatgaccctcggcatcatcatcaacattgcactagagggatccaaaaagtatgacattcgagctagttttcaattggtggaatgatgacctggaataaaagaaagggattccattcgttgagaacattgattatttcaaacaaaccttggaagctcggtaactacagagtactccgtatagatgagatagtatatcatgaaatgtatatatcgaggacatcccttattgttgtaaatacaatggacctatttagacaaagaaacaacagatcaataaatcaaccgctctctctctgctcggacttgattggacttgactacatgtatattcctggtgatataaaaccgttggaaatcaggcaacataaggctgtaaggcatccaatacaaatccttatcgcgcgtggagaaacgcacttggccgtgcactcgaactatgacgagtcccgattcgcgcaatttcggggaatctgacggattgctgtgttatcaacgcgggatgcaacgtagaacttagatgacatagtacatctcttactacatctctatttctctttttacccctcctcagattccttatagaaatcagtttattctcctatttgtgcatctgacgtggagcaaccttttcttggcacttgcttgacggctgttccgaccacgcggcctccgggatcatctccaagtccttacctaagtgtaagctcctgaaaactcccaagtggccttattccttcaattcctcctatataactccattcgctcttttcacccttcttgtccttcattccggggatgtttctcccagtgtgggcctcacatctgtttacctagggcctagagcgcttgtatcgcacaagatatcaaccaaaacgaaccgtagaggaacgacatcatgtccggctctctacaccgaactgcccggattatttctgtcattgcggggacgctggtcgccctctcatgcggaaccaatgtgcgtgatatctccggtctcatccccattcaggaccattaaggttaacccatcttagtatgcatactccgcgtgggcgccgcaattcgcgcagcggatgaagctctcatccaccgagagcaactttattgtgagtaatgccatgtccggtgccgggaaacgggttttaacagtgtctagggtgtcgcgggaaacctggggatgtatgctatgggaattccaatgggattattgacagatgcccgcggtccccgacttgtcgccctgatcggctctgttggcctaggcctgggttacttcccaatttatatgggtatgtgttgaggttaccttgtcggaattgagcagctctaatgtctgtagcatatgataatggccaaggatcgatgccggttgtgttcctatgccttttcgctttccttactggcatgggcggttgctctgcctttggcggtgccatcaaaacaggtatgttacactaagtaatttgcttaatagagttaacctaatgattccagcggcatcgaacttccccgaccaccgcggcacggcaaccgctttcccgatggccgccttcggactaagcgcgctattctggtccaacctgtcgactctcattttcaaggacgataccggccgcttccttctgcttctagccctcggaacctcgattctgtcctttgcctcaatcccattccttcgaatcctccccagcgagccgtactcatccatcccacatggcggacacgagtctagcgaccttgataccgtgctagaggactccgatctacatggctctaccgcttttgatcatgaacaataccccgtgcatgcgcggtcgcactctgttgcatcgaactcccaaggcagggcattcagccatgccgatgagactgccaacttggtatccaagcacgaccgcccgcgtccctctttcgatacacttgacgatgacttcttggatgaagtggccattgaggcgcaccaaactgatatccgaggtctcgccatgctccgcaaagtcgagttctggcagctcttcttgaccatggcactcttgtccggtatcggcttgatgaccatcaacaacatcggcaatagcgtgaaggccctgtggctgtactacgacgacagcgcaacagacctgttcatccaacaccgccaggtcatgcacgtctcaattctctccttcggcaatttcctcggccgtctgtttagcggcatcggctctgacctactagtcaagaagctcggcatgtcccgcatctggtgtttattcttgtcagcggtagtctttaccctgacccagctcgccggcaccaccatttccaacccgaacagcctcgtcgttgtctccgccttcactggaatcgcttacgggttcttgtttggcgtcttcccttccctaaccgcacacactttcggcattggtggcctgtcccagaattggggcgtcatgacactagccccagtgttcagtggtaatgtcttcaatttgttgtacggtaatatctacgacgcgcactctgttgtcggccacgatggcgaccgcgagtgtcccgatggattgggctgctaccgctcagcctatttcatgactttcgtttccggcttatttggtatcgctgtttgtctgtggaccatcatccgggagaggaacattgataacatcatgaataagaagatggaccgactcgcctgagttggataatctaggcgcaatagtacctgcatggcaggcatgtgctcatgaattgctttcttgcttgcatatctatctcgatctgtttgcagtttgttatgacttctcacagagtacatttcatggatattatttgggtcctcatttctaccgtttctctataaacttgatactttctttgcctgtctttatttgagttaccctaccttatacgccagaacctggccaatttcattattgtacatttggagaatatgcgctgctgttcaaccccaagtagttactaggctcgtccatgttctactcaacccagctcttagaaccactacgagcaaagattctgcatgacactttcattcccgtcctaacatacatatagaatatcgcagcgcagaaagcgagaatgttgcctcaaataaatcaaaaacagaaatcccggcgctcagacacaaaaagctgacctaacaatcaaaaactgttgcattgcattgctctattaaagcagcaaactaaaataatgatcattggaagcgccaactagcacatggagggaaacatcccgggcaaaacacccagacgacgagacatctcccagtttgatcaccgattcgatcttccagacgcttgagttccgcaagaagagaaggatagggaccaagtattgtattagaagcatagtggaagagttcgtacagcgcaccgcaaggaaagcaaattaacaagatgtttggagaaacatccagacataacaaaagtaagggaaaatcgagaccgttcaatagtagctttttttgggtaaagttccagccagtgatgacgaaggagccatgaagggtatcaagaatatcagaggttggatgagaccagcaaacgtaatgtagcttataagcttgtactacccgtggaccgatgatgaggagaataagcaggtggaaaagggctggaaatagcaagatgccgcaagatctaaacgctcttgggagacttgacaagtacatcctcgccagattccacaacatccgacaggcggatcttttttgcgagcggctcgccggactcggcgtcaccagcgccgctagaaccgagctggcgctcgagatcgctaatacgacgcttgagatcctcctcgcggcgctgagcatcctccagagaccgtctcagacgaacctcggagtctcgtacaatcatctccgaccgacgcgcgctggcgtcactctgctcgagttccgtcacgcgaccgcggaagagctcattgacgaactcaagttcactgacgcgtgtcttcagggatgtgtttagagccagaagactttcataggtgtggggggaatcgagttggcggtcgactgccgagggagagggctggcgcatctggcgggaggggaggccgctggaggagttcatgctatcgcctagggtgacgctgtcgaacatgtgctgcggtgcgatattcgagttgtgcgcgtgcatcgagccaaagccaggtgtctcggtccgggaaacgggggagttggaacgatccgaatgacccgaggacatcttgcgcgacgcgcgacggtatccatgcgagccgaggggaggaggagttcccgcctcagatcgcggcggaatgccattggtatcgacagggccgcctgactatagaatcacagtcctgattagcgcatgttcttatctaagataggtgggattggattgggcgtaggggacggggagaaaatttttttgatcgcgaactcaccttgcgcttagggccctgaccagtcttcacgcgattgcgacttttaatcacatccgttttcaagcttatcggacgaggtcgaccatgcagtttcaggaacagtccacatgcgttgcagaggactgaaccgagttcgtccctacgccacaggggcgtggtagaggtgccgcaattttggcaaacaggctgtaattgaggtcgcttgtcgtcagtcaatgtggtcgccattatgagggtatagaagtgaggaagaggaagaggatgataagattgtagagatttgagtcgataaggaaagggaaaaagcgggtgcacggatcgagtggcgccaagactttcgataactcctcagagataagacccagcgcgccgataacacatatttcacacttacaggtccactcccttgtcctcctgtcgtagccgctggtgacgacgtagcgtaggtcatatttgccatacccatactcgtatcactggatgagctaaaaatgggaggggaaatatatggattagccaattgattcgaattcttatgaggggccagattactgctctccaggtgcccgagtgaagattacgcaataagataggtcgcccaaaggtccacgggtggcttccattgaggactggtatggggtatcaacgcaccgaagattagaggttggtgccgaagcgaccgaagccagtgctgcaagtccaggaagcgaggtgctaacagaagagcctgggtatccgtcgctctcgcctgagccgaatttggtcacgctcttgatatccggcagtgtcgtggaaaactgtgtcgatccgttggacgcgtgacgggtcgaagaattgtcggcggacaagtcgtaagggaactcacgctcctgcgaagaacgggatttgatagccgggtcgatgggcgacgcccgatagagggtggaagccaccgtggagggggaaagtgggtgttgattgaaatccggcctcaaaccgaattgaaagagaaagggtaggtgtcgaacgaatcgcgcgacgggatgcgaatgcgattgggaacaacggactcggaacaggactctaggtcaatgggtctatatcaagacaattccttcagtgatcaattcgatatgaagttccgagcagtaatgatcgataccggaaaggagcgagaggcttaggcccgacaattcttgtgcctgaagaagtaaataagaccaaagaacagaacgaagacttaaattaacgacatgatggccgaggattgggggtaggggttgggaagaagatgcagaattgagatggacgataagacgcgataataacaatcgggataacgattgccccagtatcgactattatttgatacggcatgtcaggggcgtcacgtttgatgttttgtctcacaaagaatgtatacaattcaattaatcagctcttcattctacgccacccagcctcttgatatctggaagcgcaaaaaatgaatccattccgcattatctggttcgcctacaggtgatcaacgggttttatgcgtataatttcctgcacgagcggatattgccagcgtggcggatttagatttaccaacattgatcgtatgtattgaattgacgtcccctgaatatcccaattcgtcatagaggggtcccatatggagatcacggtgctagccaagcttcaagggctttagagcacagaataagtcgatgcatccatccatctaagaccccttgcgattagggggtggagaccgagtgtggcggtgcgtaatggtataacggttattaactaggtggacctgcccatcccacgtaatttaccgcgttctgccgttaattacgacaccgcctgcgtaaattaactgtaacaatgttttcgggacgcccccttgggcgtccggacataggtgaccacttatttcaaccgccttgactctatcaactctttattctatccaccagcggtcttttccttcttctgttctctgtgatggattaaaaattgtttggtgtgctttcgttcttttgccggccttcctctctttttcatacgggttattttccccgttttcatcttccatagatccaaccaccctcaataacaatgccgaagactcgtcctgccacttcgggatacgcccggctcgcccaggccgaagaggaaagaggctacctccacgatgagtccgaagacgaggatgtcggtgctttctcaacagcgtccacctccgctccccgatacgcccccgtctcctctagagcccagatgcaggcgtccggtctccacacccccccagcccatcgacgcagacacagtggttatactcaaggccgtcggaactccggagtggatatcaaggccatcaatgcgcggctcgaaaaatgggcggacgagattgcctccaaattcaagatcaaccgtgtcaaagggaagagctatgaggaagagaaactggagatttaccattcagtattccaggcacctcccggagttatccccgtgaccgccgaagctctcgaatcggatgagtttgagggtcagcaacggcgagcccgcgccgagtacgaggagataattgaaagtgtgcgtcttgcaattgaaatggacatacatcctcggatgatctcgcaaggaagctcgggcagctactttgctcgaaaccctgaaggtaaagtagtgggtgtgttcaagccaaaggacgaagagccgtacgcctcgcgaaaccctaaatggacaaaatggctccaccgtaacttgttcccctgctttttcggtcgcgcgtgtcttattcccaatctctcctacgtctccgaagctgccgcatacgttctcgatgcccgcctgcgcacgaacctcgtcccttacaccggtattgtacgactatcctcgagatcgttcttctacgatttctgggatcggagaaaggcatggaaaggcaagaaagttctgcctcccaaggctggcagtttccaagtcttccttaagggattcaaggacgccaacattttcctccgagaacatccctggcctgaccaggtgaatactggattccgcacctcggatgctccgaagcgcaagaagcggccgtggaacgaggcctgtcgtccatcgggggcacagtccgacgatgaggatgacgacccgggctatgtgccctcgcccgacggttcgcgtgatgaaagtgctgagcgccggttctactggaccgagaatctcaagcaatccttccgcgaagagttggagaagcttgtgattctggattatatcatgcgaaataccgatcgaggtctggacaactggatggtcaaaattgactgggggacagagcaggtttctatcgtggcagagcccccaaaacagactagcccacagcctaagcacgatgaagacgagcttatgcccccagctcgtcctgtttccgtgaattcaaatggcacttccaatccctccttccacccttacaggcgacatgaaacaatgatggctatcagtcgcacgggaactccattagcctcatcggaacagtcagcttctgtccagcttggtgccatcgacaacagtctttcctggccatggaaacatccagatgccgtaagttttcgaatacgcgggtagttacttccaacactaacaacttgtagtggcgcagtttccccttcggttggcttttcctaccagtttccttgattggacagcccttctcgcagagaacccgcgaccatttccttccattgttgacatccacggcctggtggagcggtacccagatggctttgcgtggtgtcttttcgcaagatgatgatttcaaagagagcatgttcgctcggcaaattgctgtcatgaaaggccaagcctggaatgtggtagaaacactaaagcaaccggatcatggcccgcttgagctgactcgacgaacccgcgtctgtgtatgggatgacttagttgacgtccccgttgctatcccgatgcgcgcgccttccacggacaagcaaaggaaccaacatataaggaaccaacatatgaattacgaccctgatgaagaagagatggatattggtgcatccgcatcttcccaaccaatccccgaacacgatttattagggttgaattcgtcgctaagcgacctccccaacccaaaccggttcgaacttacccgtggtcgaactgacgctgacagcgaacgtgctgatggttctatcggtagccctgcaactataaatgacttcggcggccgaaacactagaggttctctagacggatggccttcacactcccgccagcacaagaatcgcaaaaacggcggtgccgtacctttccgtgttcctcatgtcaacacatttggcagcgatgatctcgagggtgaccttggctatgcagttgcagagggtatggaaggcaaccagcgcaaggtgattgtcgagcgcctggaagccgtcaagagcaaaaatcctgttttcacctggtgctaaggttagattatgtcgtactacccttttcgctcttcgctcttcacttttcacttctccacattcctacattacttctctttttcatttaatgtgcagctattttctgcgacgttgtcttctcggggtatttgtcgggtccccgtccttcgggaaatggttcccacttcctcttcatgattcgaccgtgccttttttttcctgcgacatttcacacgagtcctttgctggacatgctcatgatttgggagatttccttgttgtatatagacattctttggctgttggggttaccttaggctatggcgcattgattgggcgatctgcctcatgtagcatattgatgagacctaattacatgatacctttatcgtctattctttgagtcaactataataaccggttagctagtactagcatgtgactgcagcatgtagctaggctggggtagacgacgatgttagtcactacaccatattggatattagatgaaggaattcacccaaatgcctacataaaccaaagtaacagtaagtggtttgtggacttactccaacacatatcttacaagattgatacttcgttctgttatatattgtgctgtgacacagagacgttggtttacacgtttgaaaggtatcatgtcgtgttgggaccatctgcgaggacctcttgaaactgctatattggattcagaagaatctatcgccttaaggtgagatctctgaatggatgcattaatatctccctagagatgtctactttatatccaggcacacacagcttattactctagcctaggtaaacaactcaaagccacgcgtcttcggctacggagatttacacccctcatgtattccgtgggacttgtcaagtggcaatgagagccacgacttcaggaacgtccacgagaaagcccagtttgttgtttgatgcagacctacatggacctcatacatatggtaatgttatggtccctgtggtaggtgaagccgcatgtgctacggcaccctctgcctacactgtctcgtgggggctacggcgagatggtggtcagagggatgggcagaggagaagaaaaagagaagagaatttgggggggaagggacccttttatacccccaacccacgtgccttcccaaagtgcgataccctccatcgcaccttcctggaatcacaaatgtcacatcggccatgatcatctttcttttccatatgacctactcatcggacctggtccagctcactgttctatttagggtcaaaccgacctgccctccttcgcatggccggcttagagctgagagtcaacctctgcgtaaatgggcgcagtggttctatgacctgaatctggctactcagtctgcctagtgtgtaaagggtttaagaattcgttcattcgatatcgacccataagagctaatattccacgacctaagcaaatactatctatgcaacaacattcgaaaatattgacatcttcaaacaactcccacgtgtgtatgtagcatgaagtaccttataactatgcttgcaatacattaggctagaaatcgacacacctcttccaccacgagaccgagatcgaagttctgcgggtgcatgagctggttataggctaagatttcaaatagctaaacctctgggtcaacgaaatgaataggtatatcaccatctctcgagggctcgctcatgccgaagatcttatcctctaatttattccccacagacttccagtaatctccctgttgatcttgatcctttagggctttgtgggtcttttcgacatcaaacatgtccgtgatcagtccgtgttgggccagatgttcgatctaatgtctaatttgttgcatttgaccggtttgccacgcaaaatcgtggatatcactttgtctttgagatcgggaggcccacggccttcgagaaccaactggaaagcagttaccatggcattcttgccaatggctgccgaggtcctttagataatcggcaattacagtagctttcatgtcgccggtggcatcgacgtggaagctactatttcaacggtcaagagttgtgctcaaaaactgcatttggatgggcctaggctgcccaggtgcgctcaggcgcagtcatccagcttacatgatgaccaggtgatgattaactaactagttcagcaccacataaacatacagtagtagagcattaattcatttatggattaaaatatcatagtcaggcaagtcaaagcagttcatttaaatcagaagtatacaaattccaatcttggaagaaagggtggctgctcaattttactcagtggcagaaagcggcaagggctaagcactaaaacggaaaatgaacgccaagaagcacgcaggtaagcgcgcgaggactgataagatcttatcggcgggtttctccgaggcacagacttcagtggaagaaggacttcgtcatttcgagttcctaacaacgcgaccgagcttgcgactgacttgagcaaagaagttgcgcgaaccaaaagacctacagccagaacgactcgaggtccaagacacttccctcgaccggtacaagagccacccacgattccttcgacgaggcaaacgacaaggcgccgactcgatcgcgatcaggaaaacgacgtgatttcccctgggaaacatacgtcggtgactgaggcaacagcgcaactagtgttgcccgtgtttctcttccttatctctcactttcaatgacgccggagatttcgcgaccctcgcgtctggaagacgcacctttcgttggccacaccgtttgcttaatcactgcgctgcgacgttagtatttgacacatgatatcaaggctcaagggtcttgaacttgattgatatcccctcacaagcaaaccctatgacaggtcaggcaattaatcaatcccaaatcgcaaccgcctatctctcatcctaaatcactcgacaccgctgcgaatacttctcacatttgagcctggacgtaaagcttgccagtctggcagaacttggtcctatatttccaaccacggcaagtgaaacaaatacccagccttgttgcctctctcatcaactgactttcatcagttttctttcacagcatcgcccaaccctgaatccgaccaaagcctatcccgggtttttcgactaccattacaaacatcatcatggcatctcatgctgcgatgctcttgaaccccaagggcgctaaaagacaagctcaaagcaatggtaagcctccctttgcttcttccccagcgagtgatttgtctcccgtgggtgccgtcgctatgtcccgtgaatttacctcggacaacactaggcccgtgacttattcttctgcgctttcttctcctgctttccctgatgcttcttcccatgtttctacacctactcatgtgaacacaatggatacttcggccatgcctagagtccttcttgacatacctgaggcatctgtccatcttgacacccagatagacactcgacccacgtctgcggatatgatgcattcggctgaatttcgtctccctactgctcctcagatggatactccggttatgcatacaaagtctctttggccaaccgactctgtttccccttgcgctctcaattcgcttgatccaccttcaagtctttcttcccacaattcatcttctcttgtcacttcttctccgacagaccccatgcatctcgaccccacggattcccagggcttacttttggaatgtacaggaaaacaccacggaaatagttcatctcctggctctcccatggctaccgcgggcactgcagccgatacacgctttcaccaatccactagtcgcacatctccaagtgtgccatcgatctcgaccccggttgtgaagccagactccaatctgacagtgcagttcaccaccacccatgatgaggacatggaaagcgacacgaaaagaagtcaccgcgagatgagtgaggatgaagacatgacctatcgacccaatttgattgaaaatgtctatggagttgaaaaacggaagaaccaaccgacgaagaaggtcaaaaccgagcatgagaaaccgaatatggcgaacggaccggtctcaatctctggaaatagcgggcttgggaaatggatgaaagaggatgatgcgaaatcaacaccaattcccactacactcaacgtggtggatttgacagcgggtatgagctgctttatttctgcggattgtgttgaaccaatctaatgtttttctagaccttgcgaacacacctaaggaagatgacgaagtcctatgcactggttcaacagatctcagcgcccagcgtgtctgcttcggcaagattgaaaacgcaatgatcatggcccatacagtccctagacccggtccctctgtttttaccgactggtcgcacgcttggccgtctatcaaactagacctgcgacgccagcccgtgaaaggcaattttcagatcgacgtcgcggacccccacggcaaagttttcggtacaattgatcctaaaacggcacaaggactgtgtccgctcctggattccgaaacagattttatcgaggtgacagccttattggatatccgaagaacctcgccgaatgaagaaatttgggctcctacctccgggctgtggcgtgcaaccctcaatatctacggccaacgaaagcacgcagaggctgtcggcaattttctctctcaccgcaacatctggctgggtcctccgaattctgtggacaaaggaactactgtgttcaacccacatgcagagagccgacgccaacttgccgccgcaagcgctgccgccaacaactccgcgcggtcacgcccagggccagttgtccgatatgaagcgcgaactgctgaagaggctaatgatgcagtcatgaagatgttcgaccagcttgccaacgcgaacattccgacgatggagccgtctaatcacatcaccacaccgatgcttcatcatcaaaagcaagccctttggtttatgacagagaaagaaaagccgcgcaaatttggccgaaaagaagaagacaataattccttgtggcgaatggaacttgcgcccaacgggaggacccaataccgcgagatcattactggtatgatttcagggcaaaagcccgaggaggccctaggtgggttgttggctgatatgatgggcctgggtaagactctgagtattctttcgttgatcacctcatcgcttgggttagctcaagaatggaccgatatggctcctgatcccgttcttgttcgccgagctccgggaattcgcaacacacgaacaacactattagttgtcccgttgagtgcagtgagcaactgggttacacagatcaaagaccatctgaagccaaactccatcagctactatgtcttccacggcccatcgcgcatcactgatttcaaggcgctttccgaatttgatattattatcacgacatacagtaccattctcagcgagatctcggggcgtggtgccaaaagtggaaaactcagtcctttaacaaaaatgaacatgttccgaatcgttcttgacgaagctcatatcatcagagaacaaaatgcggcacagaccaaggcgatccttgggctccactctgagcgtcggtggtcggttaccggaaccccaatccaaaaccgcatggaagatctcctgtccgtgaccaagtttttacggattgctccttacgaccaacgaagccaattttcccaacatgtatccaacccggtcaaaaatggtgatcccaatgtacttgcgaggctgcgagttctggtagattcattcaccttgcgcagagtcaaggacaaaatcaatctaccacccagggaagacaatatcatcacactagatttcagtgagcaagaacagcaattgcatgagttcttccgcgcggaatcaaatgtgatgatgagtgtcattgctggtcaggacaaacgcaagataggtggccggatgtatcaccatgttttgaaggccatgatgattctccgccaagtcagtgcacacgggaaagagcttcttgatattacagaccgggagagagtcaagggattatctgttaacgatgcaattgacttggaggagaacaaaccggaggacaccccggcagccatagacaagaaggcatatgagatgttcgcgctaatgcagcaagcttcggtcccccgatgtggcaattgtaatcgagaactcgatgaacctttgaatccaatgggagctgtcgaccgtgacgctccgatggctattgtcctaccatgtttcgatatcttctgccccggttgcttctctggctggaaacaaacctacgattcgcatcccgagactgagacgcgttgcccgaggtgcgaaggctggatcaacttgaaatactcgaccatcacgcctgctggctttgaagaatacgaggcccaaaaggaaagtgagcggcaaacccggaagctgggcaagaatttgggtgaatacgaaggcccgcacaccaaaaccactgcattggtcaactatctcaagcaaagtgttgaagacagcaagaagcttgaaggcgagtcacctatcaagagtgttgtgttttccggatggacctcgcacctggatctcattgagattgccttgcaaaacaacgggcttgacgggtttacccgacttgatggtactatgactcttgcagcacgcacaaaggccctcgaggaatttgccaacaatgacaatatcaaagttcttttgacaaccattggtgccggcggtgtcgccctcaatttgacttctgcctcgcgcatcttcatcatggagccgcagtacaacccagctgccgttgctcaagcgattgaccgtgttcatcgccttggccaaactcgccccgtgcaaaccttccaattcgtgatgaggggcagcattgaggagaagataatggagcttgctaaaaagaagcaggagatggctgacacgagcttgaaccgcgtcaagcgggacaagcgcgagacccaagaggctcgcatgcgtgaataccgcaatcttttcaagtaaattctcctatcttttgttttcttgccttagctcgcattcttttcatgttcttcggttctccatttacgtctgcggtttctttttctgcttccatttgatctttttgtgatcttttttgattttcatttctgccctaatgctagtggctcgctggtttcgttttgtgatacccggaaaaggagaaggcgttaacattcattattacatctttgattctccttatgatcatacaccgggcgttttctttctatgtttttctttttacaacatccaagcacgtttatacacgggtttgttgttttaaccatagaaatcattttcttttctgcatatgccatttattggcttcagcatattcacatgcattagattctgcatactttgaatttgacttccaagggggtgtaggactcggatatgatttctgaatagagtgggatcgcgtatactcttcttcgtacggcgagatatgaatagaagaatttcccgtctagacctcagaatagtgcaatgttacgaacgagacttttttatcctactagggcatattcaggcataaaccctgtaaaatcaggaaccttcgccctccttttttttcaatcgcagcggacacatcgacaggcatgctgttttcgaaactcgcgtgcaagacttctccgttgaatttacctagaagtacttgagaaagatgtatacctcttcctcccgttcatactcatggtttctcccagctcttgtgctcgatttggtacctcccatttctttcagcaacataagaaaagtaaaaaatcacacttcccaatgacgcctacttggccaagatacataatcagcatcttgaggccattcagggagtatgtgttcatgattttgaccaaaccatcacttttcccccacttctcaccattgtatcaagatcttcccggagtttgttcaaagcaaaatcatcattctcaaactccgcggtgcagataccttcaggcaatgcggctcgcttttcagggagtaaatttccctgaacggcacacgaatcgaagtcgataatcactagcctatcatggtctcggtacctaaacataacgttacgtaggtgaggatcgttatggacaagaccaagggcatgaagatgatagatgccggccttgacgtattggagacaaatttcctggttgaccgagcgtccgtccctaaggcagccatcaagaatctcctcatacttctagaagcaaagcccagtaatccggccggcctttaccacgcagccaagatagcgggcgacgttctcatgtggaattttcatcaaaacctcacagattcgtgcttgttggagtaggtctaggccgagtgatgctgagtcgtcgtagccagtgagccggggctgcttgatgtagacgtccggcttggcaaagtcgaggcattgtgtgagaccatcttctcgaggcgggattgatcgataatggagagtagatcctctgggcgcccgactatatcggacacatgtatccaaaactagtcgtcgccatcctggaatatgacaacgatatatagaaattcagggtggccatcgaatgcccagcgctctgccatagaatgataatgcatcttaatgagacgagacagtgttgacagttctttctattaagagaaaagaggagagaaaacctggaaggtgtgtgctgtgaagaaagatcatgggcacggcgcttatttaagtacttttttggactaagaaatcttaggtgataaagcatcaagcgatgaacagtattcagggggtctattttaatatgggctaagagggtggcagcaggtgctgttacctggtggattgccaggcccaatccctacaaaatgacttgtatataacattgaaatggtactatcatgtggtattcgtgagttattcatgtgtctgtgcaatcggtaaaagacccccccccctcacatagcgccgagaatatagcaaaaataatgaaaccccacgccagtcctatctgtctcgtataactcccaaagtgcacataaaccatatatcctaagaacacatgatcaattctgagagtacccatctccatggatacccaccgcgacagcaccgagaacatcctccagccgagtccgcaactttctcaactcccgcactttcgcagcgcgctctttctcaacgtctctgagctctgtctccagttcccggattctgctctcttgctcggcctcggaagcgccaattccaggaagcacagagataaggtactcgatctgctgttccttgataatcagatcgcgcgcaagttcccgctgccgactcgcaaatgtgctgggtgagtccggcgcgggaggaaggttgggatctccaccttctggtgctgtccccggtgcagctccgggttgttgagggggtgcaagcgggggtgatgcatttccagcaacgacggctgcaccccccactttgtttgcgacggctgctgggaccggtggcgaggacgagttcttggccatcttggctaaggctggtgctgcgtcggggacattaggcggtggtgttgtaggggcattgtcgtggtatgttgtgagatagccaagcgttgcgtagaattgtgttgcgagctattttgtatagtgagcaagggtttaaatgtacgttctgctcgattcattttacctgatccaggcaagtctggagctgcgtgagaatgtcagccatggtagcgactcgaaaagaaaatgaaacaagcttgaagtagcttgagaaagatcggcagaatgcctgaaagaagcggagcaaatgcggagagaagctctaatgcggtgaggcgggcttgtctttctcacatcactcaatgcgcctgttgcgactgcaccatggccttgctgccggatattctcccttgagagtcagacaagatgcccgtcgttgcttttccagctccagagtctataatgagctgacaccgttcacccgccggctctttaaactcccctcggccccatctccgccctcgcaacaccacaatgatttgacgacatttctctcttacgccgagcatatttctcttccggtggcgagttcggtacatgtcggcacacactacgagtataccgttctcaaaaccctacgtcgttatgcgctaagcctcgaccgcatcggcggtcgtgacgatgccggcatcgatctcgttggcacttggcacctcccggagcgggaacgagaacgtgcactccgtgtactggtacaatgcaaatcactgaaggccaaagtgggccctaatgtcgtccgcgagctagaaggaaccttccgccaggcacctgtcgggtggcgcacgggcgagacggttggcgtgctggtgagcccgcgcgaggcaaccaagggtgttcgtgatacattagctaggagcacgtatccgttgttctggatgacgattgaacgggacggaaccttgaagcaggcactttggaatgcccgtgcagaggaacttgggattggccctctgggtgtggaaacacgatatggaaccacagaagacgccgagtctggctcgattacaaaagagatgatattgacctgggatggatgtgatatccccgatatggaccgcgtggagcaaaacctcgtcgagttcgccgagcaatgggtcgcattctggggtatggacttgtcggaaatccagaagggggagcttctggatgctgcagaaagagttctcccctatgatgtctcttctcaactgcttaataggaccgtatcggatgcagaccggaagaaggtcattcaagctttacaagagcgcctacaacagcagccggcatcggagtgaacactctactacccgacaatatgctatgtccaggcagccatagagctgaaatatataagaagaattgtatcactcatgacagaaaataatccaagggtatagaaacaccaacagcgatagaaaaacacgacttccagcctccaaagaaaaaaaaaaaaaaacgccagagagcacagacacccacaaaccatcgatcggcatgatcatccttgcatcgttgaccagaagtagtttgcgtagaagaagcgggagaacttcgggtcgatattaacgacatgaacatcgcccttgcggctattgcgaatgaccgctctgttgaaattacccgcctcatcgggctcgatatcaacaccaagcgaacggaatatcttgaggcgcagactagatagatattagcaagagtatcaatccaagaccgagacacaggcacaaacattgtcgcatcatcagcctcacgctcgcgccgagttgtttcgtcgccctcgagaccctgagactctaggtcgaccagtctttccttaagcatctccagctcgctctccaggcgctcgctttcaatttctagctccgatgcagctttggcaatgcgaaacttcttggtgtccaactctacaatctccgccgcgtgtttgcccgagtcgtgtacggccacggcttcttcatgctgcgtagatagagaattcaagtgacgtgaaagctttcgcattgccgactcggcctcgcgaatgcgcagatcgcgcgattgctggagggttgagagcgagtcattgatgcgtgtgatggcttgtttatcggggtggatgttgaagttgccgatcgtgtggtggatgagctgaaggcgtcagtgaatttcttaggcctaaatcatgagagcaaatagattagcacatacagttcctgggtcctcgtcgagcaacatggtgtcggtggttacaatatacagatgtcgggatagtcggttgttttgggtttgttgcggcagcaacagccacagcacagccacatatgttgctcctccgcaaagtgacgttgagcctgtgatttctccgtcctcgcttttgccttcacgcccaacgtgaccacgactcttactttcgacaaactacaatcaaattgttgaaactttcgttctaatcaatattcttccgtcctaaccaccaactgcatatctcgccatgtccaatcttccatgtaggtggttccgactgattgcctgatgcctgatgtttgaagactgacttgctgacttgttatgtcactccagacgctgctgatgcggaaaggtttgttttccgcggaaactccgaaagaaaatatcggaatcgtccgaactgacttgactatcaccgacacagtcccttgaaacccgcggagctacaggtcctgagagcccaatacgagaaagaaggcgactatgtcgggatccagacaaagttcaactacgcatgggtatcgtttatccagtcctgatcaggtgtgcccgcgctaaccggtgttccccgcctatgcggggttggcattgactatagggtctgatcaaatccaacatccgttccgaacagcaagaaggcgttcgcttgctttcagagatcttccgtggagctccggagcgacgacgcgaatgcctctattatctagccctcggcaacttcaagctagggaactacggcgaagcccgccgatacaacgatttgctcctggagaaggagcccgcaaacctccaggctgccagccttgggtcgctcatcgatgataaagtcgccaaggagggtctggtaggcgtcgcgattgttagtggcttggctctcgtcgcgggtatcgttggtagtctggtgatcaagggagccagaagacgataaacacctgttgaggattggcaggccacgacagcctaaagggtgtccgtctagagtataaccactttgtatatttttcgtgtgggatctgattccttggccattggcgatctttttattgtcggagcatccgagggcgttatatctttttctctactctttgtctctctctctctctctttctctttttaagccataagtatagttgtggtatgctacatacttgccaaaattgtacatgacccaggattcatctcatacatgcatagccctaggttcggtctagtagcacaggaatttggtcacatttatagattgctgctagtatatatctcagcatcgaaggtcacaagatgtcgattgtgtcaatcactaattctctttaacccgaacaatctttccagtctcaacttcatacacatagcctgtgataggaacatccaagacaagaggactatccttcaatatcttaatgtcatcccgaacactctgctcgacatccttgaaagccaaaaacgcaatatgatcggcgttctggtgtagatccgcacggatcttatctttgagttcctcgtcggtaaaagtgagcattccacagtttgtctaaaggtaatcagcaattggtccaaaagttgacaagatgcaagccagggtctaggcttagtcttggtttgtaggggttgcgtacatgatgcacgataacgatctcgcgggtgccaagcagctgctgcgagatgatgacgctgcgcagtgcatctgtggctctgccgccggcattgcggattacatggacatcgccttcttcaagaccgagggcgcgagcgggatctttaggatacttaggtgtgagtatcatccatcagaagtcagaagtactgcggagtatacggaccgaggcgcgcatccatgcaagccaccacggctgtctttctgaaatacagtcagatgtgtcttttgcaggggaccggggtaaaagttggagttagaatgagcgtcatcgacgtaccgctgtgggggtagctgcaggtcgcccttggtgaaggatgcggcgtatttggcattggctgcttcgaattcctttgcgacagacatgatggtttcagtatacttcaaatagattaatttagaggaccttggggtttgagaattgatatttaaagaacccggagaccccgcaaaggtgtgatatggcgaaagaaaggcaacatattctaccaatgcttggatggcgcaataatcttcagtccctgttttctgtcctaatttggtctgaagaatctttagttcactcgacatttgccctgtctgaacttgtaaggctagccctaaaaaggactactcctacacctgttgtaggcagtatcgccaccctagatttgacctaattatgactgctggctgcaatataagcgtggttatgaacgtctctagtgattgttgcaattgttgcaacttaatcaatgctaaatatagacaatatcaagccttgaactccttcttcgcaacccgttcagaaagctcacgcaagacaaccccaacagattcaaaatcacttgtctccaagtaagtctggccactcagacgagtccatagccaagggccatggtggaagactggcaggaaagtgttgtgttcgtccgtcaactgcgtctggatccaagcagctgccttaggagcttcttcctcagacaacacaaccaaagcggttttgtcggaggattcctcatttccggcagaagcaacagcaataggcaaccggactgtagtcatggcacactggcgcatacggctctcctgtccaggcttcagatcaggttcttgcaagacatcggtaccgagagcggcagcaacagcgtctgcgccttcatttgcgacacgttgggtgtaggcaataatagcatcctcgcctccgcagacttcagcgcggaatttcaacgctgctgcgacgcaaatgtacgcggagtcatcagtggtggcgacgaactcgaagagttgctcaaaggcagtctttgtcacgggagcgttcgggtcctgcagcaccgaggcgttaatcgcgggagaagccggggctgggataaatccccaagatgttggcaaggtggtgcgcataagatgctggttacgtcgtggaacgtagaggactgcacagctgcggggtgtgtagagccatctttatgaagccgagtcaatatttgtaattttgctgaagttattggaaaggatagaatactggggatagttcatacttgtgacaatttgataccaggtatattgaaggcttctattggtcaattgacattatcaatcacgatggacccactttcctctccttaattcatactacaacatacaacagtctacttttttacatgttagatatttacaacgtatcgataggaagatataacaactctaataatcacgttggggctagatattggcatgtcggagtataggatactcaatctcgaatcaagttcgaaagaaagcggcgactcgtgagaaagaccctccttgttagatgcgccctgcagacgaagtccatattatcactcatgtatctagtaaattggaagatatttcgatgactggagatatattagggcagtcagaattagtaaatcatttagcttgtcacgatcatcaattgcgatatattctaggtcttgactcacacaaacgagatattttagggaaagcattgcccaggtggggtgctcgacatatgtcagtctaacagattaaaagaagtgacaaagaagaaagttatagatggctaatattatctaggctctctgaaaaaccgtaccgctgcacttcttacccatcgcacccaccatacacttgacctctccatccatgttagacctatcagaaagcaaactaggtcaaattgcgctatactgtccagttgaactcaagcgaaagtactgtacaatctctcgcaaacacgatacaacaattgttgagagaatgtagatataagaggctgcattagcttccttactcctcacccatatcctcgctgtatgcatattcgctagtaatatccccgtcatccccgttttcgtcatccgcatcattgccaaggatgtactcgttgtagatagactcgctgtaggtgtactcgctggaggtatccgcgctgtatgtgtgctcactgtgggtaagcccactgtagggggactctgaggtcgcttcctccgtatccatattctcgtgattcgaatcctcctcatccgaatcctcacccgaattctcatccgtgtcctcctctgtgtcctcctctgtgtcctccccatccgaataatcactaaataaatcctcatcctcatccacctccgacagggccatgattttctcaaactcgatagattccaagtttggcaacttttcagatagagcctcaaagcccgcaatataaataatggttggtatctcaactcgaagattcaacaaccttgggaaaagcttctagacgtacacaagcagcggttagttatatcctacagcagaaggatagctattgaaacaaaccggaatccgaccagtaagatagtcccagtggtgaggaaatagttggatgggcgcattccaacgttcgatataaagtgtccggagatttggcatatttaaagctggggcacggatactctcttcggtgctccagccgcgaaagactagagcaaggtacaaagtgtgtaaattcgggaagaccaaattttctagagctggttgtaccactgcttcagtcttctggctgtatgttttcacagttgcaaccttcataaggtcggcatacatctggcgtcggtccggggagacttttaccatgacctcgtcgaggtgcatcccacctgatatttccatggagccccataatatacgtatcgcttcatggaaccacgtcttattcaccaaggcgcaattcaaaacccaacgtgggccattcgatgtgtatttgatccaaacgaggatttcacttactatctctggaagagctaaagctcgatggccactgaaagtcacaattttatggctcatgttggaaaggagtcagaactgatattgcgaaggaagaagtagaaaggaatgatatagtcacaaatgaaactaaagtgatgatgttgtaaaggatagatctctcatcaggaatttcctccaatctcacagatggctccgtgaaagaaccatggatcacatttgtctccggttcctgttctgatacgtagggagtaagtcttctcttactccgtatctctttttgtttctttgatttccgtgagaccctggtccatgcctaatgtttgtttgaaatgcttacagttgtctatctcatgatggagattatttgtattttacttttctgtttcaacccctcatcgtgatgatcctatgaagatagagtgtactccgtaccaaactcaaagccccgttgctattttgggacagaaatctcagactatgcctattgtaccagcaagatcctgttatagacgtaagttgcgtctttatcctttttgaaatcgtacatataatgattcccacataggtgagaattttaactgtttgtatatatggagcaatagggcgtgttaacaaaaggactagttataggtagtccaagaagctatgaatgtatgtagagcacgcgtgtctcatcaatcgggtactcccattttggcatctatgaatggtaaagtaaagtgtaaacaagaaaagaggctgcctctaaccaccccaatgctgcggctgtttcgttagccgttgaagtcatggctcatgtgtcatgtccaataaaaatataaaccaacgccgggtccaatgaagtcatcaataataatacaaacgctgaagcgttcaacccaataaaataacacactcaaaagagcgcacaagatccctgcatatcaggagctggtgtggtcccgaaatctcaacgccaaagcgggaaaaggcaaccgaataaaaaggcaatgctgctgacataaagcggaaggtagactgtgggggaaagattcgatattaacggacgaatctaatcagaaaggattcgggggattgctcactcattgagtctccacctggtggcttgttttgaccggaaccagactcccagtcatactgggatcctgtcgacgaggccgaaggagagtcgctcgctacccagggccaaacatttggggttacccagcttgtggtttctttgtgggttccactccagggaactgggacgctgtcgacggtcgcagtaattaaaggtgcggactcggtcgacgtgggctcagcggctttgttgccattgactttgcctccttctgcaacaattgactcccatgagccacttgtgtcaccatatttgtacgaagttccggtggagtaatccgtcacggtcattgacttcaggtacattttgaaggggccttgggtatagtctgtttcaccaccagcccagtctgcacaaacacaagctgttagcaagcacgatccaagtaattttcaggacagccccactcaccaattgtgccctgggcattgtttgaatcaccgccagcccacacaccgaccttgatcatcatcgggctctgtggatactggttggtgtctgccgtctcgggtgtgagaacacggacagtcttgccatcaatcgcccacacaatctgggtgctggtccagtcgatggagaaagtgtgaaattcatcatggtttccggcattatcgtggtaggcgccacggctatatgaagtggtgtctcctttgccgaagtaattggtttgcacttgagcgttgtttccgcccagccactcccagtcaatttcgtctaaatcgtcggactgcagaactgcactgctcacgattcccgtgcctgctgctgccttgatagtgcattccacgcggccgaacatgatgtaccagccggactgaatcagcgggccatcaccctgcttcgaaatagtgaaggtggcaccattcgttgagtcatatgtgacggatccagtggacttgaaagcatccgatgcaccacttgtgaaatcgaacgtcttgtcagattggccaaaggcaggatcagcgggacatgctactagctgttagtgacctgctgacacaacggaaattatgagcctcacttttcttggtcggattgcaatccgtataagtctgggccacgaccagcgtggaagagatcaggcctaaagccgcaccaagaaagaaccgcatggtgggccaagtcgagtataaactataagtaatcgttgactattatgcaataatgaagatgagttgttggagttgatacgagatgggtgacagaggaaggaagaagggcgaaaaggagatttccaagtgaagggagtaccccgacggtcttaagacaatctgagcaggtgccagcctcctctgtttccgtgccttccctttcggtcgatatgtgggtcccggctgtcattgggccaatcacatccatccccggatcgagattgtaccagctaccgagagcttcgccacgttgtctccatggagtttacatggagtcattctatgtagtcccccgtacattcgacgggtgtgcagctcagatgccaatgtgcaacagttctagtgtgcactgcatgtacaatgactatttgtgtgacaaacatattcgattgggtatttcgatcgagaatacgtacggggtacggtccgcactccatacttataacatatatatccattcgatgagaatagtctcctgaaagagcggcaaggcccaagcaaaacaacaggcggtaggggacacacgtatattaggacccacaatcccagcctctcgaatttactcttgcctattattagagatgtgatctcatgttgaagattttctctgcatgacagtgattcataatccgcctccatacggagcccttgtctcctatccgaaacaaatatgtgctaatactaatcaatagtcgtgattccaatgttcgggccagggctacctaccattgggcagccatctttcattagttctagcggcctgatgaatgatatgacttgaacgaccaacctgtaactttgacttaatgggcactctttgctgacctagatcttggtcgacataaagccaccgatctcagtggcgatcgatgcaagggcgatccgttgggcacgggaaaaacatagaccaatgagtcctattatgtttcgctaatgacttttttctttggctaagtatgaaaaccggaagaagaaggaaaaatcttcacaaaagcgaaagactactggtacataagaccgtgggccataagagatgccgtttgaacttactgtaatcaggatggtcggagtatagggctatctttaggacgcaaacttcttgcggtgagagttgttgatgagctttctaggtttttttacgcaatcaattctatgctttcagctactcgcaacgttgctgaatagatttcaatattctcatccgaaattctaacaatgtttgacctaattgccggcttttctgtgggcacagtcctgtcgaaaagactatgactactactcttcaaaccgacatgaaatcaacaccaattccacaaccgaggctcgtgcaaatatcgagttaggtctagctatatcttaggttctagatcaggtgtggtgttaacatataaagttccgagtgattcgacgcgggtttgtaacactgtcagttaaccatttcgactttgaataagcgacaatgggcacggaaaaatcatgctgctccactcgtcttgatctgcaggtgccgtggaatagcggtctccagcggattgctagacccaccttttagtgtgttgaatcatgaaactgttaggaagctaggctatcctacttaaattacattgctagactcttacattcataccgagtatgagctcgaagattatgctaaggtagtgtcatgaccgcatggacacactttcgacattccgctgttactagaatagcaagatgtagatgaatggtcttgtctaggaactggcttagagcgtagagagcacacccaggagatataatgtatgtctagggctatcgtttacgactagcaatataccctaagagcgtatttgatatctagatatttccaagggaaaaaaagcgtgcttcatcttcattcgttgcgcgatcgaggttacccgaactggttttgatctagcctacctgtatctcagggctgttctaagggcagggctattatttatactactgaagctctgtgtaccataatatcataatcgatgggttttgtttcgtaaaattatcctatccaaagtactccatatcttatagctggaatggatatatcacaggccggatagattgcaacgaagggaaaatgagccgtgcaacggttgcaatgcacttcttggcaatccaagctatcaccttctagtgaggccaagataaaatgaaaatatgagtaaaaccgtggaaatgctacaaggattgtttgttacagcctcgataacctcgagagtggaatcaccccggggcggggatgacggtctaatgactcgactataccccgtagaggcctatgcaatgaaagtatgccacacttgtatgctttccagagattttggttactttgtacaagctatttgcgagaaaatgcgaaaaaatagaacagaagactgtaaaagtcaagcagaataaagacgggggagctccacagcctagcacggacagcatcacggaccatacccaatgagaaaggttatatagtatctataaaaaagacctcaaagagaagaggtgaacaagggaagaaataaagaaatggaagggaatacaaagaatagtttcaactacatgcacctagtcttcaagtaatctagttactagtttagggtgaagatgttcccaaggtattctctcaagcgaagttgttggcgctaagagcctcatgacttccgacggcccagtacccgaagctcacacagggttattcttccatctctcccttattacatgaatctcatgtcgagcttcggtcctttttgatttttttaatagggatcttggctttgctctcgatcgtcattacgttgatccgcctttgtcacgagtcacgactatccccactctccttcttccccccccaattaaccctggacctcaataatcaccccgtacgccttgccagtatgcgcccgggttgcccttaatcgcaatcacctcctaagacctcatgaaataacgcctcattttgacactcgcgcccgacgctagtcttacggcctcggtctgcctcagcttttcatacgccgtcctccgctttcctcacgcccccgctagctctcccaactcctcgcgcccttggtgccacctcactgattttcctcgtccgcaattcaaattggatgtcctacggagtgtattccagctattatactctctaccgcgtcgccgggtcggcctccacaacgtggcgctagcacccgagacagcagaattgacaaccacacgttgcagctcccccggtcacccacaccatccgataaccatcggtttttttaatgctgggcagttctgaaatattaccatatcccaaggtaaagctggctgcaagttgaacagggttgccgtcgtggcattcggccgagtctgagcgcagccatgccggcgcgggaccccaaccaaccggacaaccgtcagggttcggacagctctgcaaatagttggaggtcgcaggataccgtgcgacactctgagagctactctcgagatggagatgaagcctttacgggaggccacaatgccgacacgtttcccagttccttgaacatggaccccaagtaagcttctgttctccaaatgacctgctgactctctacgcggtcatggcgcgttggatccaagctcaaaaagaagaggcgctaagaattctttattttttttgccaggcccgactcctcaaaacctccgaggattgattggggaagttccatgtggtcatggaattcccccgatatttctcccaccgagcaacgcaaacccgctggctttagcaatcaccgcgaggctttgataattccaaacaaccgagataacccgtctcaatcatctgtctcgagtccccgacctccgccccttcgctcatctcgcgccgactccgacgagatcgagtcaattgccccgtggtccacagtccccagcagtagtcagcccgatgctagcggtactttctatcatgattactctgaacatgaagcttcgcctgcgtcaaccacatttcgtcctgcgaccggacgcacaattgcgagcgaacccgctgagtttgaatcccatggggaacatcgccggccatctgctgcaagtgcaaccacggtcagtagccagggctctagatctagtattagtcaaaaattccgaaagaagcatttgaaaggcttacttggagatgactatcatgcgcctggggaggatgacgatggctcccagaacccaccaagcaggcgtgggggaccagtcgaccagttgaaggcgcgagagagggcgaactcagatggctcacgcaatacacccgaggggtccaacgcctcgcaacgttcccaaaagtcacgggcaaataacccgttgccctccagtgacatcactccatgggattatcagagctttaatgacatcccgcagtatggggaggcaccagtgcgccatgtacccatcggccccggtggtcagcgtcttccaacctcggaaagcggtccttcggggcagagggacccaagcagacggggacctggcaggcatcgttcctcacgaagcaaagaagagaaccccacccttgctggcgatctagcatggtcccaaccccgacctgctactggcagagacgacgttggaccgcggccgtttaatgaaaactacctgcattcagcgactgacatgaacgactccactgcgtttgggggcaggtcggcaagtccaacacccagtgtgcgtagcgcataccgagaccccgatcagaactcacagcatcccagactcggcgggttcatcaaaaagatcctcgggaagtcgcatgacaaatcaaggaactcttctcccccacgacgtgataggcaaggaagcctcgaaggaagtacttcctctcgatacgcagagtcagtagattcggatcgaaagaaagataccgggaagggtttgatggtgggaagaaagcttggtaatcgtcgtgtgttcactcaccaaggtggtggtggtgacctttataaccccaacaaggacgagaaaactcaagaggagaacaagcatttcttccaccttgatgtcgatatggaaaatctgaaagggattgtccgtccaccctcgcccgggcaaacgaagcgtggaagggatggggcaatcacgcccggcgacgaatctaaattcgaaaagccgtggaatgcgcctgaaagttggcaggtcagggggcccattgaccctaccttggaagatcctacctcggaagaacccacccgcgtcggtcctcgtgatcgtgagacttcgtactttattcgaatcttccgaattgattctacctttgccacgctatcggctggtccgaatgctacggtgtccgaaatcctcttgatgcttggtcgaaagtctttcttgcaagatcatctcaacaattatgaaattgttttgcgaaaacatgatctttcgcggcaacttgaccacaatgagcgacctattcaaatgcaaaagcggctgctagaacaagtcggctatacgcaaaaggaccgcatcggagacattggccgcgaggatcacagttatctctgtcggttcatcttcttgccgacaaagcttagcggttacagcagtctcgatagtgaaccaggtttcaacaaagtccaaaaattcagccatgtggatctccaaggccgcagtcttgtcactattccaatcacgctctacgcaaaatcctccgagatcatctcactgaacttgtcgcggaatttgtcattagacgttcccagagactttattcaaagctgtatcaatctgcgagagatcaagttcatcgggaatgaggctgcgttcctcccacacagctttggattagccagccgattgacctatctagatgtgtcaaacaactgcctcgaagacttggatcatgcgggtctcgagcgactgactggtcttgttagcatcaaaatggcgaacaatcagttaaccaagcttcccagctctttcggcaatttccaaaacctacgaagcctgaacatgtcgtcaaatagtttcaaggtcttccctgaattcctttgcaacctcaagagtctggttgatctggatatcagcttcaatggaatagaagaacttcccaatattggccgcttgacctctctcgaacgcctttggatgacaaacaacaacttgagcgggcctctcgatgattccttcggggaattagtgaacctcaaggagtttgatggacgcttcaatgctatcaccaatattgatgctctctctagccttccacgactagagcagatattctttggtcacaatcttgtatcgcgtttcaaaggttccttcccgaggttgcgaagtctatatctggatcactgccctatgacgcaatttgatgttgacgcccctatgccaaccttgacctctctaaacctcgcctctggcaagctctcccaattcagagatacaattttcgagaattgtccgaatataacgaagctcgtcctcgacaaaaatcatatttcctcggtttcgcctcagatcggcaagttgcgtcgactcgaacgcttcagcatgatcaagaaccccctatcatctttgcctccgactatgggttgccttgcagagctcaagcatctcaatctgagggagtgcaatttgaattctctaccagccgaaatttggcattgtgccaagctggaaatactcaacatctcctccaacattctgtcgtcctttccaaaatgcggtgctccgtaccctcaaattcccggtgaacctgcaagcacacctgggactacaccaggcatcgctgaaaaccccagctatgaagatgtaggtccactggatgaacaaaatctacgtcgacccagtcaaacgtccaatggtggtctgaatcttgtgtcaccgaacgggcatcggaatccttcaactgcccaatccactaggaaggtatcgagggcatcaccatcatacaccgaccccaactcggggcatcggaaggactcaaacttctctcagcaaatggcaatgacgtttgcggcgtcccttcgaacactttcacttgccgacaacagacttgaagatgatgttttccgggaactatccttgctcccagagctgcgtattgtcaacctttcctacaatgacctgacggaactaccgcaaggaattctcaaaaggtggccattgatttcagagctgtacctgtccggtaacgagttgacctccctcccatccgatgacctagaagagggaagcaacctcaaggttcttcatatcaacgcaaaccggttccaagtcctgcctgcagagctttgcaaagtcagcaagctttctactctggatgtggggagcaatggactcaaatacaacgtgtcaaactggccttatgattggaattggaactggaaccgtaatctcaagtatctgaatttctcaggcaacaagcgtctagaaatcaagccaaatatcgcctccctgggtcctccggccgccaatggtgccgacctgactgatttcaactccctgactcacctccgtgttttgggactaatggatgtcacactcaccattcccacaatcccagaggagactgaagatcgccgtgtgcgtacatctgcctcattggctggcactctcgcctacggtatggccgactctcttggcaagaccgagcatctatctattattgatatgattgtcccacggttgaagcaggataatgtggaaacactcctgggaatgtttgacggacagacactttccagtggtggttctcgcgtcgcaaagtacttgcacgaaaatttcacatctactttctcgtatgagcttaagaagctgcagcgagatcacggcgaaacaccagtagatgctctccgacgagcattcttggcattgaacaagaatatggcaggctctgcctacagatccattgatgaccgtgagatccggcagtaccatcgaggatcgactgcggccaaactgctcaatcaggacgacattcagtcctggggtgtcgctactgtcttgtatctgaacaacatggacttgtacgccgctaatgtcggtgatgctcaggctattttgatccgttcagatggttcaatgctttccttgacgcaaaaccatgatcccgcggaacctaacgagcgtgcacgcattcgtgcagcgggaggtttcgtgtctcgcaccggaaagctgaatgacgtactcaccgtatcgaggtgcttcggccacttccctatgatgcctgctgtcattgccgcccctgccacaatgcatgtcaccttgacggaacaagatgagatgatcgtgttggcatcaaaggaactctgggattatgtcactccggaagtggtgattgacattactaggagagaacagccagatttgatgtttgcagctcaaaagttacgtgatttggccatctcattcggtgccaccaacaagctgatggtaatgattcttggcgttggggaaattcaaaggcgacgcccaaagcctcgtccttctcttagcactgcctcgtccacgtttgctgaggagcagatcatcccaactgccaagcgtcccaagaagcgcgatggtcctggagattcgcgactcgcgcgcttcgaacatgtgaatgctcccgagggtgaattgactatcatgttcactgatatcaagaaatctacgggtctatgggaagtttgtccggatgcgatgcgctctgctattcaaatccacaatgacatcctgcgccggcaacttgcgatcttcggtggctacgaggtcaagactgaaggcgatgctttcatggtggcattctcaaccacgacggctgccttgctgtggtgcttcaactgtcaaaaccagcttcttgaggctgagtggcctacagagattctcgatcagccccagtgccgagttgtggtcgacatggacaataatgttattttccgtggcctgtctgtccgcatgggtggccattggggcgagcctgtgtgcgcgaaagatccggtcaccagtcgaatggactacttcggtccaatggtgaatcgtgcttcgcgaatctctggcgtcgcggatggaggacaaattttcgtttcctccgatttcatgaccgacatccaccgcagcctcgagattttcgcggatgctgagcgttctgcatccactagctcgaccgacagtaatcaacggggcgatagtctcggccacaacattcgtcgtgaactgcaacagctcaacagtcaaggtttcgttatcaaagatcaaggtgaaagaaagctgaagggtctggaaaatccggaacccctctaccttgtttacccctcctcgctttctggtcgcatgatcacttcggaagaatcacaggatcgtgatagcgccgttgcaactatcagcccagataaccaacttgacatccagacaaacgtcatttggcgtctctgggaagtcacactccgtctcgaacgcctttgcggtgctatggagcatccaagtgaaccaagcttcagagagccgaacgtcgctctgttcaacatgatcaagaggcacggaggtgagctgaacgactcgaccgttctcagtttggtcgaccaacaagtcacccgcatcgaggttagtatcacacaggctcccctttcgttctacttccaatcctgacaaattccaggtatgcatcaatacactctccatacgccatatgatgcgtcccttcaagccaggcgataccctcagcgatcacgccgtacccattagcgaggtactacagcaattacaaacacaacttgctgaattccaagctctcaaggagcagatggccgttggtgctgcaggcaacatcggcggtccaccatctcgtgatatgatgggtcattcagggagtatcgacagtggtattacctccgcgtcgtcatcttccctcaatctcaacagtgatctcaatcgctcttttgattctgggcgcggctaccattgatttctgccacctgctctatagcactaatttcaatcccactttggttggctttcacttccttcttagcttttcttctccttgattgtatctctttggctttattttggcgggcggcgtcccactggcgggagggtggtctgcagattgttttgtataaagcattatggcatggagccaaggtgattgttttgaaaaactgcttccgttattggctttgatctactttcagtttttgggctgtaattggctctgacagtggatatatattacagtctatgtgatactttcatgggcttttttcatatcattttgtttgatcttcacaaaaatagtcggctgcttattcggtatctgcccttgaaaatgcaggcctatagatctgcttcatttggctaataagggatgttgaatgtgacaacatactgacgttttttttgatgtctttttagatgtttatgggggagtgttctatgtataaccagggactatgtctggaattttcctcccatggacacctattaggttcgaggtatatgactttatcgcaaggactttgcgatatattattacaaagcctttttttacgatcacgatgaatccagaatataggtcgactttgactggactcgagcgcagtctttgatcttaattccttgctttgtggtttagtacacgcatattcattatattcattataatagcgctcgaagccctactgacgattctttgatatcaaatgccaagatcacagttgctggcctgaggcgccaacgtcatttttgaaaggtcacgtgccactgtttatgcgtgcgtcatcgacgctgttttctttatttcttggtctgctcacctcttcgtctggtaaacccactgcaaagcaaaaaaaagaagtgacatatgtttcttgagcttcttaactacccacatttacatcttcgaagtcgttagccacaaggtcggcttttcctgccccgcctgttgccctggctacgaactgaacgaataatctggcgtaattaacggcccaacacaaaaacaacacctctcctaccccagtaaaaattcgaaaaagggagcgatcgctggaagctcacttgcatattgcaatctcgcctagctacgcaccgtgctgcaagtttggtatccatcttacgaaaggcccctacgccatctcggtcggcgtcttctaatcaggccgcaacgtcgcacattgcacgccacacgaaatggcggatgaactggaatatctccatccagatttcgatctgaactctctcaccgtgcctcgtctccgctcgatccttgtcaaccacgatgttccctaccctgcctctgcaaagaaggctcaactgatcggcatcctcgaagatgaagttcttccgcaagccagaaaactcttgcgtgaccgcgacagggttcgacggaccagtgcaggtattacagatatgggcagtcggtctacatcggtggcaagcgacgtgaacgacagagagtcgatgcctcctccacccacaccctcaacagtcggatccacaagcagaagcatgcgaggcacatcgcgtcgcagcacccgtcactcaacggtagatacagatgatggtctggaacctgccacacctataaggaacacaaaacgcacgagcgtcgctcgctcggtgggtaaacacgctcgcacatctgacacggaaaccggcgacgacacactcgcgactccaatcgctgctacccgtcctacgcctcgcaagtctacagctagaaaaatcggacggagcgagatcctcccttcgacagaactggatgaacacactcgtattaagtcagaaccacgcaacgagagcatgtttacggatgataatccctttcaaagtggaagccctgaggcccctaaaagcgcaaggatgagttatgatggcaagcggaagagcgtttcgcgcttatctacagacagtccagctcggggtcgcggactcaggtcgcggaaatcagcaaccccgtccaacgttcagcaagacgatggcttccagccaccgaagcgggattcgtttgatttcgcctcccggctgatgcctccacaggaggaacctgaggaggaatcggatgaatccgaggatgatgaagggagcgaaattggcgcaggtgaagaattcacacctgaggaacagctcgctatgtctatggaggatgaccagtactcgccacaaattcaggctagacgacggccccaaaagcaaagcactctcagccgcttggcaccttgggtagtcatcctgtcactggtcggtagttttggtacctggtggcgcaaagaaaaactcgagattggatattgcggcctaggaaagcccacctggtctttggcagacactaaagttcctgaatgggcgaatgtgctggagccccggtgcgagccgtgcccaagccacgccttctgctacccagactttgtagtccgctgcgaaaatgatttcctgttgaagccgcatcctctcgccctcggaggcctagtgccgttgccgccaacatgtgaacctgatagtgaaaaggaacgccgcgtgaaggccgttgctgataaagctgttgaggagcttcgtgagcgccgggcaaagtgggaatgcggtcagctaaaggaagacgggaagggcgccagatctccagacatcagcgagccagagttgagggaagaggtggctaagaaacgccgcaagggcatgagtgacacggaatttgatgagctgtggaagggcgccattggggagatccttgaaaaagatgaagttattagcaagaccaagcagtaagtttcctttgccctaggatggattctcgtgtctccttggctatgctcgaggctctggatttcgacatccagccgcatttcttataaagatctggtctgaccttgtgtaccggaactgacagaggcgcgttcgcaatcacagaaattccgccatcctcatcctctcctccacctccattgcacggctcccactcgcatgcgccgtccgccgctacttccgactcactctcctcgcgtatcgactccctatttcacttttaatcatgaccatcggtcttcttgtgtacgctcgtgcgcgtgtcctcgcacgtcggtctgacattgctcgcgtgcccgaattggtagctacaaccctcgaccgactatccacgcaggctgcactatacgcccgcggtgatgccaaagaacctcatattgccatcgggcagctccgcgatgacgttctccgctttgaactccagggcaagcgtcgcgaggagctctggcgacgggtccgcagctttgtcgaaggcaacgccaacgtccgcgcttctgtgcgtgaaggacgtagcggtgatgtttctcgggtctgggagtggatcggtgggattaacgctgtcggcgagccggaacatattggccgccgtgagagtgcacgattctccgtcccttctccatccggtaatattgtgacaagccctcagacgcctgcgagtgaaagccagcccgagcctatttctagcccaagagagtctcgccgctgggacgagagccgtccgatctattgattcttgtcctgatgtctagaggatgatttggacacgcagctccactgtgctattctttttgatatcccaccgttttttcttttctcatatgagatatggcttttgtttcccgggttttcttgtcctgattacaaattttattcccaacttccttcacctgctttatcagaacatattcttttcctgtccatacgaatttcattatcaattccaatcagaactttaattttctcagagacagtcttcgtcctagcgctattgcatgatattaaaacaacggctgcaattcctacggatttggcggtgttagcgtcaagtcgaaccctccattgcatatcagcagcacaactatataactgctatcacaccgatgaaacccaagggcgtaatctagggaaacctacagagtacatattcctaccaatgagtatagtactccgtatcattaaaagacctatgtatcagctgttccagcccaaccgcgaacaataagacccacattatattgctatactatactacccccatgcggggggtcgacggacaccacggcctaacggaaactcttgcttagtgtcaatcttaaagatagatctatatgtaggcggacgtgggtttcttttccgtgttcgcgcattaaattactcaaattagcgcgatcttcttctaattttatgcttagtagagagtaatttatagattactctgaatcatagtttacttacaataccatcttctgtatctggggtttttttagacgtgttcatgggtagaagaatggaggggtacaagattgacatctagaatttccgttaggccggtaacctgcaggggttggggttggcaaccttggaaggaccgggtagtgttcatgtacaatgtcgatcagttaacaagccaagtgaacagaacagaacaggccctggtatgtaaactcgttctatggggtatcgtgtgaccagtacgaatgagtgcctagacgcactctacggcgtatgcagataagaatatttaatgtactattttacccttggcattcttatgacccagccaggcacatctatagttagccccccatgtgcatgttcgacgtgaatctggatttcggtaaaaagggtaaagcgtgttcgctctcgctcttgaccgtctccatccttgatgcccaacgtatcgagctgatcaatcaatatccctgctagtttggtatttgctggcgtcaacgttctgcgtcagttctgcgttaacgtcctgacccagattgagtgaggggaaattggatcgtgtgtggggtttgtgttgagaatgttctgtgctttcattcgtttttgggtctataagagtgctggtattggtagaaagtagggccatcaaggcggggtcgtttggcctcagcatccaatgagatgcaggagtgacgttcgaggctattgcaagccgcgcgagtcgcgtatatcaaaagtgccggaatttggaataggaccagggaaaccaatctaggggagttgatatattagctgcttcgcttactagtggctactaccgcaggacttcaaaggattcatctgcaggtggctgatactcgcttcaaacatcgcttggcagatagctattgcattgcagcaaacaccaggtaatcaggaagagaggagctagtgatacgtgcatgcataggtggtactgtaaaaggagttccttcctacccgcccagccaaccagctctcatgtttgctcgggagaaaagggttctgtacagtagtgagacgagggatgccttttgtgtgcctggtgtacacactaccgtttggaagagaatatagccctacataagaggactcttgtggcgaataatcccagggttgaccgcttcttgagggtcatccaagggaagcatcctatcaagaagggctgggggtaatgaggtggatacgggcattatccgtacggagaacaccttgctccgttgtcttgaattttccttttttttttcctttttcacgaaattgcgatttcatctcgggccccgctctcctttaaaaccgagatacagtaactatagtaagtacgtatggtgtggacgactgcttcctccagggcaactcgggaagctcgggaggctttattctttatatggccgtaggtaatatggagtaagcaggattacatatagcatattcgaatggtttggacttgtaccggataggggccacgtagcgttgtggcaagatggatgaacggacataagaactgtgcgtataagcacagggctcggatagtggagatattggttaatagaggatggagaatagtatgtaactatgtattgatatggggtaagatttcagatattgcggatatgcggctagcagacggagtagttccggtgttcacctcgcttaagttatattgagtaagccccccgagtatatgcgagattggatggctagggataaggattgcgatggtttagcttgccgacgcagactcttcactcagtatgtgagccatggttgaatttggcaaaagcaagagttgcgaatgccttcttcttagaagctttcaaggtttttcttcggtaaaagcaaacgaatcatgtctggtacggaagtattctccccggggaattatcggatgtgaagggaacagccatgcctaggtctacgggggacggattttggtttcattttgtcttttacctttttttctccaaaaaaaaaaaaaccaaaaaaaagaacaaaagatgttaaagttcaaagaccacgtcgtagtgaaaatcgatgtgaagtctacatagtcaggaacaagatgatgatatcgaaatcgcccctccccatgatgaaccatgggactcgttggttccagacaagattgtggacctgtcaaacttataccagaaggctatgcatggtccgtattggacttgccttgtcccatttcattttgatatatccacaggttttaacatccatggatatagatacagcatacaatcggcagggtacgatttaccgtgcatatactccatatttgggacaaatttgaaccatgtgaatgggataagcaagggacatgtaactacataactagaatctgctaatataagtgccgtaggagcctcccagagcccagagcccagagcccagagcacggagaccagagcacagagccccgtcgtgaataccccacatatatatagtgttattcgtttcgtcagccgagggtccaatatcgagctactttgtatcgagggtgatcccgaaagatgttcccgttctcgttgattgatagtctacctaggccgacgaggtaattccggaatgggataacaaggaggacagaaagctagaaatcaagtgactttccagagtaaaagatcactggttcagcaactcgtctgtctttggttcacatgtggcaaaacacccgtggtggaggggttgacaacgtttcgcttggtggggtttacacatcgtctactgcatacagtatgtaactaacgtacgtgggcccgtgttgggtggaatttctcgtcgaatgggaatgtttcaagagatttagtatctgcatcccccgtatggatatgtatacacactagatcggcgtgcagaggagactggggcatttctcggagccttgcgcatgacactgcacatgagcataattagattagtgagagaaagagaatttctggtaaaagaaaaccagcatcagactctagatcttccgatcgacaaagtaaaccgagaaggtcagggatcgactgaacggcatagacccgctttttccaatcgacatagaaaggggaacctgggaaaagacgagtagaggaaccgaacggatgtcacgttaataataacgttgttacagaaactcacctgggtgatagggtcatgatttcatattgggagagtcgggttggttgagcctatcatttaccccggaaaataactccggggtcgagaaattagggttatggataggagcagtcggatataagcatatgaaggaactcaacgtaaaagatattgtcagaaagggtacaaggtgcattgtataatatccacgttgtatagacacgatatacggactcattcgtctgttgtttcgtacttcgtacctggctaataactccggtaattagcttcattctcaccattgacagcgagtagaaacggtactgagctgttggtataatttgtatttgactcttgacctttgatatccttcgatcaaccagtattttcttccttggaggctctccagctcccatcacttgcttattgtctggatatgcctggaggcccacatccgccaccgtcgaatctctcccttttccctgtttttttttcgtgatttttttctaattttgcgcatttctggacctgtttacctgttatttacatgttattttccgaatttcctattatttcccatttttccctccttaatatctcccatttcccccccacttcgctctcatctaggcaccgcacagtgcagaattcaactgcataggtctagcgcggccccagggcccctcctctctttctccattctataactctctctatgatctgtccgttttccccacgtgatttgctcgattatcatgctttgaaatgagtggttggaagacagagagttgggcttttgatttgctatttctccctttgcttttgtttgcgggcagacttgatgaatgaacagacactccgaggctataggcctcttgcgcctcgcaccaggctactcggtggatccggaggggacggcggagagggagggagtccttctggcgggggtgcaccagaagagaaacgcatgagacgagcctcgacggcttgtacagagtgccagaagcgccgaactagggtacacatctcactgcgcttcctattttccctatctctccccttgctcgcacctaatcagtactccaaatcaatctgacatgttcttgttgctatttttgttagtgtaccggtcctcccaattgcaccgaatgctcaacccacgcccgcgaatgtgtcttcgatgaagccgccgacaggcgtcgcaaggcctccgccaagcgaattcaggatcaattggaccatttccggtcattcgtggacgatctcatcgggctcatccgcgatagtgacggtccgtcggtacaattaatcgtcaataccatacgatcgggtgcaacccctggagagatccgagatatcctcacccgtctgttggacgacgataaccaatccgattcccgaaattcaggcatgcgcgactcggacgtgaacctgaactttaccaacaatcacatgggcaattacttccacccgccacgctgaattaccctaatcttctcctccggcaacatacgaacctttccaatatgcgccagacttaccgccgcctcctccccgaattctttacgccaaatcttctcgatcccaaatcctcaaacgaccaaacgaacctggttgtttcatagcgtttccttcatagctgttgttcgtatcgggtttgagatggagcaggtcattcaaaaaactgtcacattcataattcaggctgtgtgaccagctccatctctatggttgctatatctcgagacagattgagatctcgcaaaaaaaaaccagactgttcctgttctctcacccgagccctagcattacatttttctttttgttgcaaatattctttgcgcatcccagaatcaggggctttagaagcttgcaagattgcggagggtcttttgacagaagtgaatatacccagagatacccagttctagcttgtcacgttcggactttgttgttggagttacacgtcggggtgttatggggttcggagcaagtgtgattttcctttttatattgagcccctggcggatattcttccaacagcaaccatactgcaatgaatatctttcctagcctagggctttatccgcgtttctttgagagatgtgacccaagttcattttggtcactgaaatcatattatgtacccctcccctttgggtttgcgcaccagttgtcctctcgcgcagatcgaggctgctctctgttcatgttagcaaattgcactccaagatgatattggattcccgtaatcacacttggagggtccatgggtgatatgggcagctgatcacactattatattgttgaacatgttctgaagactcctatcaaccccacggacatgatgccagtcttctccaaccagcggacatggtacatgaaccctacggtaaaactgcttaccaagggctcatatagaagtattactctaacttagctacagggagcagagcacccacttcgtaagacgatatctatacgattttgacaagtgaacagccccttacctgaaagcccgatcagatatgatcttccttaatctttcttaataaccgtacctcacgtagattaacccatatccacacctatacttcaaatgcctcataggtacatagtaaaaatccggggaggtggaggcatccccgcgccgaccggagacttgccgagatcctgtgcttttcccaaactcccaatttccccctctccggatatttctcctttctcactacctcgaagtcatctccatctgacattcctcgggacttaatcccctggctcggcctgtgccgatctcgatatggaaaccactagcgttgccttgcacgaatctcctcggcccgcagtcaaacccaatgaaataacttcaacattgcccgcgtctaagaggaaagcatctgacacattaaaggatggtgttgcacagcgccagaaaatcaccagagcctgtgactggtgcaaagtaaagaaaacccgatgtactggtactctgccatgcacaagatgtacacgactgtcaatggaatgcaaatacaacgccgcatattctcggggactaccaccagaccctcttcctgtgtcaccgggtccaatttcgactcccactagaaatccggcatttgaagctgtggatgggcgcatatccagcttcaatttacagggcactggccgggacccggctttgaccaacaatctactttcaaaccaaagccaaagccagcgccagcatgtgatctcaccgcggcattcaccagaaccaggttcaacggattttgagggtaattacctcggtccttcatccggtgtgtcgtttttaaatcgcgtatggagccgtctgcatcaagatgaaaccgcgaacttcccagataaactccaaattgagtcctcgcggaatacagccgtctttatgtttggtgataagccttactccaaccctcaagacgcggaatttaccctcccgactctggaaaaggccctggagttggtgggaatatacttcgattactctatggtgacttatcgattcgtgcatagaggtaatgtagaagaatggactagacaggtttatcaaaataacatcggcctctcgaatctgccggtgggaaatatggttgctcggactgctatcgttctgatgatcattgctgtgagtactttgtacatggaaatgaggcccggggaaatgcctggggggccaggtgaaagattagaaaggtcagtaatctcttgatatcagaaaaggagcccagctgagaaattgcagtgagcgctggtacgcagcatcgaaatatatgtcttctctcgagtcagggccgccgcgactggaaaccatccaggcccggctaggccaatgcctatacctgctgtcatcgtcacgggctaacgaatgctggtactcattcggaacgacaatgcagattgtgactgcactcggattacacaggagggggccagccaaagtctcgaataacgggtgctcgtatctagaattggagcttcgcaagcgcatcttctggagtgtatacactctagataaatatctaagcattatgttcggaaggcctcgactgctccacgatgaggacatcgaccaagaactaccgaacgagacgaacgacatagacttactggaagaagacccaacgcgaagaacaggatctacggacagcatgatgattgcctctgttcttcattaccggtgagtccctcacctagcctgtacgtatacctgagcactaacatcgaacacagacttggtcgtatcctgggcgacatatctcgccaactatacagcataaacaccctctctcgcgactccccactcgagacagcaatccgcctaacctcagaactcgaaaaatggaaagaaacagtcccaccattgttcaacagcgtccacccgaccagtttaattccacccctctgccgccaaagccaagtcctccaactcgcctactcgcacgccatgatccacgtcacccgctcatttctcttaaacgatttcacagacctcagccgcagaccgaaagtcccgcacccgatggtcagctcgcacgtccataaatgcatccaggctgccgaggacatcatgacaatagtcgatggtcttgcgcaccagggtgtactgatccagtccttctggttcacacactacgtgtgtttctgtgctgttctggtcatttacatccataccatccaacagcaccgtaagtcaatgggcggatctagctcagcctctgtctcttcggtcggaagtccccgtgacccagataaattacgccagctcttttctctcgctgaatcttgtcagcaacatcttgccgaggccacgcgcaagaactgtccgagccgtcgctacgggattatcctggaggagttgagacaggaggttcatcggcagatatctaatgggctctcggttgaaactcaggctcattctggtgcaaatgttactctctatgtttcgggagagggttcacagaatacggatgtaaaatcggtactctttgatactcagggggttgatttcatgatgcaaccacccgatttgggaacgaatccgggtgatgatgcaggcttccttgagagccttgagggatcaatctggtgggctcaacttgactcatgggtatgtattatgcttttcttgacgatacgagtacggaatatcactcgcctatacacatcttgtttaactttgttctaggccttgtccaatctccctaatgatccctcgacatttagcttttaagcactggatcctacgagtcacaaagcaaaatcgcgttcaatttcagatatcctgctacagttcgtatcacattctggacattattccgtcaagacgctatccggtgtggcgctcaatactgcatgagaccaccgcggtgaatgttctccaagtagtcatcgaatttcgccgacacctcaatcacattcttgaggtgatcatacgtgagaacttcccttttccacttcgcgtactgacgagcagtggtgacggcattccgaatttgccgaccattcaacttctccttctgaagcacatccaagctccccataagattttcaacatcaacggcatcgttatcgaactcatcaaggcgcttgatgaaagtattccaaatgatccgtctctgttcctcacccagggggggatagtgcagtgccagctggatgcgcgacttgaatgcctcgtcaaaggtacctacccggttggtggtcaagatcaggattccatcgaaatactccaccacgcgcaggaatgccgacacgagcgcattccggttcagatcttccagaccgcgttgctcgagaaacacgtctgcttcatcgagcaagactacgcagttccaggtcttgcccaggtgtagcacggactcgaggtacttctccacctcctctggcttgatgccgacatcgccgcatgtgactcgatacagaggccgctcggctatttcggccacactctccgcagtcagggttttgcctgtacctgggccaccgtgcagaagcaaaataagcccgtttccttttccagcgatcagatcggcggagtattcaggctcgacgtggttggtcaccaatgcttcgataaggtctctcgatttggaatcgatggctagactctcgaaggcgtttttattccactcgacaggtgagatgcggtcgactgagagctcgaaccatttcttgcgccggagattgaagccagttatcctcggaggcatcatcatgctgaacggctcttgcgggggttgctccctggccatgactcggtcatcaagtgtctttctaggtgagctgttattcaaatacccggtcgaggctgggtgcagtctgttgtatgtcttcatatctatgatgtatcggtcatcggtctagtagcaatatttagctcggctcattattgcaggttaaacaataaacacataccatggtctggaagttctcttcctcggtcgcctgatatgacacgtacttctgcgtgcggaatgtccagaagatctccccacggcgctgaagcttccggacgatataatcaggcgcatacctgattgggaataccgcaagatccgtgatagcacactctttttctgagtcactgtggtgtagtggaaggctataatcacgcaacaaatcacccacttcaggcgacgatggcatctgcgtggcgtgctgtggctttgggatttcaaaactgagcttagtctgagttttatagaagtcgccatcgaagtcccaggtctggacactgatccaccaacaaggattgctgccatggatgtctgggcttctagagggccatccattggctacataacctatgtgctccttgtttttgtgcgaaaccaggacttcattgggcttgaatagatattgaacgtactccgggcggattttgcccttcttcaaaagcaaatccactgcagtgtattcattgccgtaagcctcttggacatagtccatgaagaggtcaaattgtctctgtgcctcagagctcagccctcgtttgatttccgattgtccagtaccccggttatggtagacgaagagataaggcgacctgacctcacccgtgtgttggtagtcgttgtacatggctcgaaactcttcgcccccgaggaagtctgcgatcacgtctttgagaccttcggaaactggaagaatggtctcgctgaatggctctggcttgccgtactttgtgttgggtgactgcggctcggctcttcttttgtagttgcggaagacaacaaaagatatctctctattgagcgcgaggtaaagctcgaaattgaccagagggtcattgcagcgcagatatggcgcacccatgtttcggtggatgagttcaggaggatcggtataaatccccatccatggagacgcgggtgtagacccgcgcggcctgtgtctggggctgaattcatcgtcactatcgtccatgctctgattgtcactcggataggtgccgtctttctctatccgataaaggatctgatactttgaggctgtgggcagggcaggctttccttccagctctcggactttgtttcgaagcgcttcgatttgagccttgaggtcattcgcctctgacagagagacgcttccttggctgggaggagtgtatgtttctgagcgaacggtgtttgagtactgcgggttcgtatcatacgaattcacagactgtggactcagaatctgttgccttgcaggagggtaaagggcgttggtatggtgaaccgggacttgagggtattgataaggcataggacccggtggaaaatggccttgcattttttgattgttgactacctgcccgaaaggatggacaggattattatgctcgactggccaatggcggaacgtagtcgcgttgtttcgtcgtgcgacgttctcccgttctaacagcatcagtttgaatgagtaatcttggttgtttttattttcttgcatcgttctgggattcggaatataagatgtaccatcaaggaaaggaggagctcttcctccgagggaaacatggaccgattgctcttgtgaggcgtctttaccagtcaaatcttgggagatggtgctttccatgtacagctcatcaagaggccgagctagaaatgattgagagtacattgcccagagatgacaaggatcgtttcaggacaaatcaaatggactgtttcactgtccagagggagtgggaaacagacaataaataggtgaaattggggggatacgaggagattttgatcccaaccgccccgcgtcttgagcctctggactgtcatgtgctgtggctgtgtatatgtgcatgttcttgttgttgggctggtatattttcatgtacaggtacctaactcttggatgttagtgtcttgtatatctccatgtttgtttcatcaagacgttgggtggcgcttaccctctttcgtagttgccagccctaataacatgggttcctactacagacaccggagctttatgcttcacattccatgattgatgcttcatacatctgattcaatatattgttaaagcctacgcatgtttcattcaacgctcattggctctggaaggcaaatatgacagcctccagtgagaaagatccagcccgacgaagtcttttcaatctcttgatcccaactaaagttgtcgtctctggaaagccagatacatctccaaccgattctgcggcaacggaaagcccagcatcggagccaattatcccaagggggggaaaagatcggctaagggctcgtttgactcgcagtggctccaagattctactgttgctaggcttacgtggttcatcccaaagtgagtgatggtgtctttcttgttatagcagaccattcactgactctccgcaggcaacaaagggtctagcgtcgacactgattgctgtgattcggtgcaggccgacgaaagcacaggtctctcgaacccatcctccccatgtggtaatggcgataatcgcccggcatatctgactgcagctgagtctgtacaaagtgaactattacctgccactcttttgcgcagcacccccacccagggggtggaaactttgtctaagccacttcccgacctacggccacccgagagtcagggtgagtcggctgttgtcgacgacgtgcagcaacataactcaagtggggaacccctgtcaactagtgtcactgaacagccgagtccaacaaattctaaattcgtcgatcgcttctcgcacaagatctcgctagcgtttggtcagcccactgtcatccgccgtgtgcatcttcggtcacgaccgagtgttcttcccgccaattctccggtattagacggtctgtgtaagcagagtgatggcgctaatgatagctccagcccatcaaccagccctagtagtggtgggtctcctgccggcgggcagtcaacttcactgactccgctcacgtccgtggggccgtctccttcctcagataaaggcaagctgcctgacggacacgaaactgcagtgatacattggccctctcttatcgagatcaatgaagctgccaacgcttcagacacaaatgtaatcacaatatcgccgtcgatcaaaactgtggaagcgacatcagtggcaaaagtttacttggaactatacttcaactccatttttcaaaacaaagatccccgtcagcaacgtcagctcgagttggagcagcatatctatgcgtttgagctcacacccgaggagcggctgatgacaagacacaactgggtcttacgagagaacgattatcttcgacaatgccgtgtgctcaaatcaaaccgatactgcactcaaaccgaagacgccatctccatcgcaggttacaaagctataaaggtattggggaaaggaagctttggtgttgtgcgtcttgttcgacggaatagctgtgattcaaggagttcccaggaagatgaccctcttactctcaaagacaacaatgtccacgctagatcaaatccttttggagctctgatgtctgccatggaaggtgccagacaaacccgtcgaaggtacatgaccggcgaaaagaaggaggtatatgccatgaaagtcatcaaaaaggccgagatgatccgcaactcccaggaaggccatattcgcgcggaaagagatttccttgttgcctctgagaactctcgctgggttgttactttaatcgctagctttcaagatgccaacaatctatatcttgtgatggattacatggtgggtggagactttttggggctactgatccgcaaagatacactccgcgaggactggacacgattttatatcgcggaaatgatattgtgcattgaggaggcacatcgactttgctggattcatcgcgatgtcaagcctgataactttctcatctctgcgtccggccatttgaaaatttccgactttggtctcgctttcaatgggcattggtcgcatgaccaagcttattataacagccaccgctactcgttgctggagaagcttggcatcgatgtcaagggcgattccgaggaccaagaggcgtctgctgaagcgaaagaactcgctcctgatataaagttgcacattgtggatgaccatgctcttcatcagccatcctcagcaagtttgttggattggagaaacaacaaggggcgacgcagattcgcaagaagtgttgttggaactagtcaatacatggcacccgagctcattcgcggtgaaatgtatgatggacgatgcgattggtggagcttgggtattattctatacgaggtaggtctctcgatattctctttttgtgtgtatgaaagtctcatagctctcccagtgtctatatggtttcacacccttcgcttgtgaaaatcgccatgatacaaagatcaagatccttgtgagtaccttcttttcccttgctccagtgaacatttcattctaagacttctcagcaacactcgagaactctacgatttccgcgggagaaattcacagacaagttagtctcacaagatgccatggatctgattatcaggatactccaagagcgcgaatatcgcctgtgctctccaaagtaccaagccaatgatatactgaatggacgtcctgtctcgacccaattgctctactccatggacgcgcggtacagaaacatcgcgagttactacgtatatcccaacgatgcagcagacatcaagattcatccattcttccgaggtatccgatggcaagatctccacatgtgtcaaccaccaatgatccctagggtcaggaactgggaggacactagatattttgacgactggaagttggccagcaatggtgtcgaggaagctgttaatagtgactcggaggatccagaccaagaacctcacgcgattactcccgaaaatcaagaaataagaccagcagaggacgctatcgagccgccagctgctaaaactaccccaggtgtagcaaaggaggcaaaagacaccgagaagaaaaaggagaagaaacggccccgcgataaaatcctccgagacaaacagataagcaagacggtcttggacattcggaaaaagggcgcttttctggggtacacataccgacgaccgaacgatgttgcgttggccttcagcacagagcgagggcgtcaaccgtatgccagaggccaattggccgacctgtatgcatcatgactatacaaggcaaatacgtggaattgggagttgaggaccaaacatgtcggccattgcattcccattcacacgacccaccaccgtccttttacagggccgaacatatccatataaccttcttttcatcttgtatagcgcctcattccctcataggtgcctgttcggaattacaggacttcactctccctcttatgtatccttaggaataaatatataattacggaaagatgttagcctactacacactagaagtattgtcatcagagtacattctatttcctatgatacttcatggtagataaatgaagtaaaacacccaaaagaaaaagaaaaaacgctgggaaattcgtacacacagcaaggagaaagcggctatgtacggtctcaaatcacatctggtggatagaaaaccggggtatcggagagtaagttcgggacagagaggctttcaaggggtatcaagttcagagtagatggaaatgaagaggggaaatgagtaaggaaatagacgcagaagaggaaaagccaaaacgaaccgagtttacagaaccggcgcgctcatggagaaagccgaatccgtgacacgatcctcgggcttcatagtaccattgagcaatggacagagtttcttgtttgttttgatgtgcccgacctggccgcagttggcacacttgcgctgagtaccagcaggcttgccgtccgggtcaccggaacgagggatgcccttttgcttctcgcgggcgaaacgacgctccttgttgcggttgagacggccgagctcggcctcgatcaacttccggttacgggcgtcgagttctgtatcgcccgtgggttcgagagattccagctttatgtgcatggcttcgtgttggtgacggtattggatatagtgcctgatcactcgaggatcgaaaacatgttgttcctgatgaagaatttcgccgttttcctgtctgatctggcgggtgatacgcagcactttgccgcgctggctgttgaaactcagtttgctgaactgacttgttgtctcatcgtcgcgacgatatggtccaggtgtctgcgcttcggatcgaggtgttggtttgttgaattgatcctggtattcgtcttcttgatccacgtcgctttcctggtcggaatgctcgatggtggaggacagactgcttttttgagcatcccaaatccgacgaatggatgtttcgtatgatttttgctggcgggcaacattgtagctgtgacctccaagctccttaagtcgctgcgcgtccagcttatcctcaacactttcaccgatagccttgaaaccacccttcatgcttgttttgatgaagttataaccctcaccacggccagtaggatctccttcgccatgaagtttcagcatcgccttgccttgagaggccaataaaaagttgcgagttgccttccacggagccatctgctgctcgaagctctcgaattcttcatcttcttcgttatcgccgccggtctcggcatcgttgccataaccagtgtcgtggagatgttgctgtccaatctgcatggattccagaagacaaacatcttcgggctggacccatgagcggattgtgtcttggtcggggagaattggatccagtggtttccaatacttagtgtccttgtcgtgttgaaggaaatccttgaccttctgtcggttctgcatatccgtggtgtttggtatgtgagctgtaacatcgctgattgcaagtcgctcatccgggctcttcttcaacaaacgatataccagcatcttcatgcgattcttggcgacagttgtcaccttgcgcgaatgcggtccaggaatgtctacagatgggaattgctgtccggcaacgtagaaattttcgatgttacgcaggtaatagctagagccatcgaatccagtggtactgcggaccacgaggaagtccgtagatttggtctggtgcgggaatagcggtgctcggtacatggagtttgaaattgccggggaaatttcgccggggtcgacatggccaaagattgagtaggggctcttgtcttgaggtaagagaacaaccgtttccccgatatctgcccttgggcgagtgggatcatcaatattctttcgccggtaataattgatgaaacggttgcacattccaaagttggctagtgtcatgggcagctcctcggagtactccactagcaagacattggagttgtctgacatggacaatgcctttgtggaattatagatagttttcgcatctttgccacgtaagtgcttgcgtcgcacctgggtagggttcttgacccaagacgtttgcccaggtcggaaggccaaagcaggtcggtggaaagatctagcttcagccttggccaactcagtcttgtagtagggccactgcaaacgcagggctggcagaccgtgctcaagtgtcacattgccaagagtactgcggatcttgttctgatgattctgtttgagcatgtcgtatgcttgatcattcgaaatgttgtagcgctgggtgagacggcgcgtcagattcaggtctacttcatccctggtgcgaggagctgcgtgtttcggcttgtttgcgacggcatccgctcttaattcgtccacaagaatgttcggatcattgagatcaattgtcactcgctttgcgattttcattgtcgcttgttctgggtcatccaatagtggaatatcgatatgtgatagagcaatgacatccatcggcgtcgggccggtctttcgtttcttgttcggaacctcggtttccatcagccaatccgcttcatcctcatcaaatgtatcatcttttctttgtgccaatggctgctcttccgggtcaatgctggagacgtcatccttaacatcccagtccacacaaatcgttcgaaggtcctgcatggtgaagccacccggaagtacctcatctccatccagatcatccaggtcaatgtcttccttcgtatcctcatccccctctgctccctcctcttcacggtccgattgtgtaatcatcaccaagccatgagtttcatgatcgaggccacgcttgaggagttgcccggttctgaatgcacgctcatgatcagccgccagctcaatattcactttggtgggcaagacgggcttaggaggcttggccggctgttttccaatgaagatagccttcttgtggggaatcaactcgagccaacgtggaagagtgttccggtcgaacgagggaaacaaggaatgcaaaagctcttcgtggttctcgggtggtgcaggtgggttttcaacccctgacatggcgaacaactgctgctgtagtttccatgcgcggagttcgacgggattcatgtcttccgacatgatactgtcatcatccgggaattcatcttcctccatgataggtggctccggctgcaattccggggccgacgggatgggtggtagttcaacgggcgcatctgtcaagggcatatcttcgtcttcgaagaggccgcgggtaggatcatcctgtccagcaggaggcggcgaaaaagaaccttcgccaaagagatcatcgagattgtcatcctgggtctgagccccctctcccgggtcgccgaagagatcgtcgccgtttccgaaaagagcagcatcgtctgagcccaagttcgcgaaaggatcttgattatcatccactgcaggcagggctggagctgggcgtgtcgtctcttcttcctccggaagttcatcgtcgtcgaagtcctcgtagtcgattgcatcttcggctttttcaccaacttccagatcacgcgacaagaaatctagagaggggccagtatcttcgtagttgttcagttgtcgcatcacatcgtcgaaatcggtatcatcctcgcccccgggggcctttggtgttgcgtgaggcatgatgggcgagtaggcgtgtgtttaagatgagagaagtgttgtaaatgaaaaaagcgttagattcggcaaggttggtgagagaaatcgtaggttaagaatgtaggcgcgagccggacaaggcgacaacgcgatttaaaatatgcacatctgggtattatgcgagtctgcagtttggatgtcggtgttgccgtggctcagactgcgcaggagagagaagaggaggggcgtgtcggacaggtggtcgtagagggaaaacggcgggtttccaggatactgcgcaagggaccgggtcacgctaacccgataaggcaatcagctcgatgcctgaagtccaatacttgagggctcaatagcatcttttcaacgacaatgaagaacaataggaataaaaattttaatcggagttagaaatacatttgaatttattgtcatgaatagcaaccataagtcatgtcacattgaaatccccatagaaaatacacaacgccttgcttgcaccctccatgcaatagtgcattactgtagccttgttaccgtcaggaaccagttttgcaatttgtgccagatcagaggtccttggaatgtaaaggaccatgtgcttgctgaatgctgagtattcatcatacaatcgttggagggaatatggctccatggttttcaagttgaatacctgatctgaacgatatcccgggcctgctacaatcagttcatgtcgcagaagtaacgattcggtgacacttacctccccagggagggctggcgaagacgagactgtacggcgccagttctttgagttgattcttgagaatctcgaaacaatcgccttcgaaccaagtgatcttgtcctccaccccatagattttcgcattatgctttgcgcacttcagcacagcggggtttttttcgatcgcgtagattcgtttccattttccggtcaaagcaaatgcaatggtgttacctcctgcgccagcgaaggcgtccacgagaatactgcgcccagcaggcgctgattcggcaatctgcgaagctatagtgctaaacaaatattagcagaaattctggcataatcgaaaagagtcacaaacttggcgactggttctggtgtgacaccaaaccaagcatcatcggtcaaccatacgccatcatcgtacttggaaaagatccgatagcgttgcgcccagtagctgataattaggttagcattggtattttttaatgatgatgacacttacttctggatgtcccagggcacttcatgcaagctgctgtagtgatgcacctctggaggcgcgtcttcatctgccatgatacaatgcagcgataaagcgaaatgatccatcgattctcgataactgataatgggtggtgtttgcatggtttgcacctgcctatctggccagctcgcacgaggtaaacacaccggctacagcttccctattcagcctcattcgatcccctctcacactcttaattctagcaaataattatgttcggcgcattaaatcgcttcatcggccggctagatggggagcctggccaacagcctcgcagcggccccagtgacaacgcattcggtttccaggtcctccgcaacaaagaccgggatctgcctttagagccatggtttgactttatagttggtatcaacgggcatacaattgtaagcatatgggatcattcaactcccggcattatagcttcgctcacactgacaaacaggaagatccggacccaaacctctttgcgacagaatgccgaaattgcgctgggggaagcttgacacttgaagtgtggagtgcgaaggtagggatactaagatgatacttctagattccagctgaatttatatcctaccagggtcaacgaacacacacaatcactcatcctataccgccaacgaacccctcgctcggcctcgcgctacagcttgcccctctctcttccacgcaaaacatctggcatgttattgcaatcccatcgcctctcagtcccgcataccgagccggattgcttccttactcagactatattattggcactcccagcgggacgttaagaggggagtctgcactcggggagttggttgaagaccatttaaaccgcacgctggttctgtgggtttacaacagcgaatttgatgttgttcgtgaggtcgagctcgttcctaccaggggctggggtggcgaaggcgcccttggtgcagagttgggatacggtgctcttcaccgactacccattgggctcggagaagcagttgagggaccgggagaggttgtattcgagacacgcgaggacgccactacttctccagatacatcagctccttcgggtaacttcatagtcccagcaaacatggcagcgccgccgcctctagccttcgctcaagcaagagttgcgtcgccattacagagcagatcgcccgccgggcgtcgtgcagggaaatcacggtccatggcatcgcccaatagagcctttgatgattactttgctgagggtgaagagaaaagtcgggagcaagactatgcgccgtcacggcatggaactcctctacctccgccgccgaaggcaggagtctcaccctctcactcggggagccctgcgccggaaggaggaccaggacctacagaggaagaatgaatgatggcttaagaatccgaaaccaatttaatatggagtatgatgaaatcaaattatgtcgatcgtcgtgaatgcaaatgggttttgcaacattctatatcttaacaggtcagcgagtttgtactttaactttcctataacagatctagccatgatcaatctaagaagcgagtgaagcagaggttcataggtaagctagccgacttagttgaagctgaaatctcaataaccaagggatgcatggtattgatatgcttcttatttggcctggatattgccaacccacaaacacaacactagagaccatcggcggagtactaacgatgtctggagaatgacaacgaccacgcaagataactagactgtattgaccttggacgagccgctctcaacttcaatcttgcagaaccatggatgggataagatttcgacaggtgaaggtcttttcgcgggatcatattgcaaaatccatcgaaggagcgccttcacttcgtgagcttcctcctcatcaagatccgggcatgcccgatcgaatgactcttctatggatggctcctctaaaataagcggttcctttcccggacggacccctccaagctcctcattgaagagcttcctctcaggcgtgaagtagagcgacgatcttgtctaacggctaaagagctcgtctgggagatcgccgagtagtgatgtgatatagtgagttcctttaactagagcgactttagcgatgtggtgtaagattcttagctcggttgtcgatcccgagatttgagacataaggatctttagggcgatatatctactatttcttagaggggatgagtaacgataatctatagtatcgggggtaaagatacacagaatgaacttacttcatgttataggcgagctaaaccgttgagtaggagccctcgctcagcttccggatgaccttgtactgttggttgaagacgtcgccaagaacgactggatgataactacctgggtggtaatcctccacccactcatagggtgatgtaatatctttgaatctccgttcgtcatctattgggccacttgatggcggagtgggaggagaagaggtactcatggctgcgatgtagaatggagaagaccaaactcgagagaaactgagaagacgttcccaaagagcgttggccaaagcctccgtggtacgtttatgctcgtctacatgaacgagtttcggaacttatgaccacacaattcaaacaaaggaatcaatccggttatgtcttcggatctaggagtttctaagcgtacatatgcaacaaataaatccatctatagccccaaacagtcgggctatatttagtggcccttgctcaccagctcttccaacttcttgcgggtgttaccaatcttttcctccatcatctggcgcgccattccgctgtgcgcaattccggtgtaccagatgtgctccgcgcgctcacgagcagccaagtgcttgtccgcaagcgcagggaccttcttctcgtactcccaaaccaaatctccgacattccgcatggtcacgggcaggaggctgtaggcggcagcagtaccgaaagcgagcggcgacgcagtgcgcaggaagatgccacggttacgcgagacgattgagccggccatggcggccacgacgacgtagacaccgccgggcaaaagacgctcgccggactcggcagaaggcgcgagcgaggcaacggtgttggtgaagcagttttcgatgttgagggcccgagacaggaagttgttgaagccctgctctgcggcgagagagtgtgagtagaggaaaaggcgagcttgtcggacctgagcggtcaggatgtctgtcggggtgggcgaagagggagcttgttgcgcagccggcgcagagatcgacttcggggtagcaggcgcagcaggctgcggaagcttggaggtttcaggaatgtcggcgggcaagtcatcgtagatgggtttccgctatattaggaaagcagtcgtgtgtcagaccaagccttttcagacattcaatagagctaggaacagatctggtcatacatagtctcggggctcttctgcgaaagcggtattcttaggatacagagccatacctcccgcgaggagagtggctgcgatcggagccacagcccgctgggaacaagtcagcataggaacggcacattggggatcaattgaatccaacttgaaagaaggcagttatacaagggcatacctgttgcaacatcggccggaatgacatcctgagggtgtggggaagaggagaaggggggcgagctggtagtgaggatgaagcaaagtcgtgttggagcaggacgggaattcttcggctcggcggaacctccagaaaactccgtcattgtccgttctccttgactctagatttctttcggcaggggatttgtgaatctgcaatttccgatggttttcatctgcttttaatacagtctctacaatgcttcgccctttgcgacgaacatggacatgtcgcaaatgcctactgcggccccaatatcgagccttcgagagcgccgcatcttccccgtcaacgtcgttcgagtatattccagtggataacagttcaccaagaaagaagaccgacgaccatactctacgtcgagtttttgattcccaaccgttttggaatgaattctcccagcagcgcacgacctccgtcccaaagcgagctggattggtccaaaatcaatacctgacaagtcccgagggctttaggacattcgctaatgtctcgctacaaagatgccaggctattgtagccaaggtgcttgcggcctcgacggttgaagaatacagggcccttgcacgcgaccttgaccagctgagcgatctcctgtgtcgtgtcatcgacttgtccgacttcattcgaaccattcaccccgatccgaggatacaggaagcagccacgcaggcgtgggctcttatgtttgaatatatgaacgttttgaacacaaccacggggcttcatgaccaactcaataaggccttgaacaaccccgacgtgacatcatattggaccgaggcagaacggatcgtggcacagatcctcaacaaggatttctcgaactctgcaattcacatgccgcccaatgtgaggcagcggtttgtaaatctctcaaatgatgtgagccagttgggttccgattttatgaatggggcggagcctgcaagatcccaggtggtctttggtgccaatagcctccaaggcttggatcctatggttgtctccaagctcaagcgatggaataagaaagcgccagttccgactacaggtattgtccctcgactcgttctgcgctcggtacatgatgaagaagttcgcaaagagatgtatatcgcgactcgaacatccagcaagcgccaaattcaaagactggaggaactcttggtgaagagggcagagttggcacaacttacaggctataatagcttcgcgcacatgactctcggcgacaaaatggccaagacgcccgaagcagtatcaaactttttgacttcgcttgtgtcaagcaaccaaggtctagtccgggaagaactatctaagctgcaggccttgaagggagactccgcccttcaaccctgggaccacgcatactacgttcacaagcgcgttttggattattccctagctcgtcgctctcgtcacatgggtgttgtcaacgagttcttttctttggggacagtgatgcaaggtctctctcgactgtttgaccgtttgtatggtgtacgtctagttccccatgaagcatctcccggcgagacttggcatcccgacgtccgtcgattggatgtggtggatgaatcggagaatcacattgcagtcgtctactgcgacctatttacacggccaagcaaacacccgaacccggctcactttactctgcgctgctcgcgcgaaatctctccagaggagatcgccgagtgtgcgtctatgaacgaatctgcgcatccgaacgatggcatggccactggtgtagatccgctgactaacactctgcgccaacttccaaccatcgccctcgtgtgtgatttccaggaacctcaggccaatggcagcggccagccaactctcttgagtgagcagagtgttcgcactttgttccacgagatgggccacgctgtccactccatcctgggccaaacgcctctacagtccatctccggtactcggtgcgccacggacttcgccgaacttccttccgtattgatggagagctttgcgactgcgccagaggtgctgcgcctctacgcgcgacactggaagaccgacgagcctttgtctgagagcatgatgcagagcatggagctagaccgcactgcgcacgggtccatctacggtgccgttgagaatgaagcacagatcctcatggctctcgtcgatcaggcatatcattcgatcccagccgaagtcagctccgctggcattgattccaccgatatctaccatcgagtcttttccgagtattccagtctacccgagccgaacaatattccgcgcacttcttggcagggcttcttcggccacttgtatggttacggtgccacctactatagctatatttttgatcgcgcgatcgcaaacaaactctggcaggacgtcttcctgtctggtcatgcggcaactgaccgtgccgccggtgagcgatacaagaacgaagtcctccgttggggtggtggccgcaatggctggcagtgtgtggccggtgtcctaggagacaagaacccctccaatgccaacggacggttagctgaaggtggcgacgaggccatgcgtgaggttggccgctggggcctcgggcgtgaaggcgtgtccggataatgtgacacgaatgtacttttattgcctttgacacataccttggagggttttgtaaataaacatattttcacgatttgatttgatcttctgaccgcaattaaactagcatgcattggatgtaatgtccgagactagcccacagctaagccgcgccaccagtgttggcgttgtcggcgttgtcggttatggcggggacggtgattggaatgtctcactgtcccccctttgtttggtctatcacgaaacactctcggtactccagggctggattgcaagctccagatgtcgtttattatgcttgagaagtcttccaagtaggcaaaggaactggaaatgataatttttcagtatacgaggcaactggacttcccagacaagccttatcgcacgttttgccctctgacgtctttcacttgcactatgcatggtggcttgtttagcggctgctatgcgatgataacaggtagcgtcgaactggttgtttatattgaggttatctcctaggcagagcacatgctagatctcagggaaatagattaacagacggtctgttcacctgatcctcttaatcttataaaataccaggcctgatcgtctagaccttatcttctttgttctgcaatttgcaataaatacggaggacctacgttcacttcgtggtaattgaccgctgtctctgactcgttgtatcggatattgcggtttcagcctctgtccctgctcaatcaaactgatatttggcgagaaattatttattcccttggccttcgatcttcctctcgcaaatcaccattcattcaagttcagtctacgcattcaaaatgcctgatatccttattgtcaatgacaatgcttcattcgcttctagcgataccttctctacccaagattcgatagagcaaccacggaccccactccgtcgaagaaatacagttgcaacgctcacacgaaaggtttctcagaggataacaaataaaatcctcaggggcggcgtccaagaacatgcactcagcgaaaaaaatctcaaatatctcaatgacgcgacagatgttgacccaccagatcatgcgatccacgaggtccaaatatacgaccggatttacgaagccattgaagaggaatgccctgttttcgacgtagaagcagcgagggagatgcgtctgcatcagtcatactctgccttctgtcaaaacttcacgctatcggggacaacacggacgaccaggaaattcgacttgtcaatgggaccagagtgggccggggaacatccggagtttccccttgacgaaaccctcgaaaccaatgacacgcttcaattcccgggttctcattcctatcccgaacacataacggtgcatccaaagccccgagcaagcacagtcgaattcccaatatcacacccatccacagatctcgacgcatcacacccagtgacgactgtcgagaggtcaccttcggaatggcccgtcacagacacgccaaatatcgaggaagacttcgaccggatcagttcaagctttgagataacgcccaactccaactccaactacctccaaccaccgcctcatatcatcaccccaactgtctggatggacatgcagcgcatcgagcgggaacgaaaggcagctcgacggcagagactcctcaatccgttccggtcgtggtttatggcaagccaacccctcgtgggggcggaacgatgaagtcgtcgactaacgggttcgactaacgggttcgactaacgggttcgactaacgggttcgactaacgggttcgaataacgggttctgctgtcagacaaagcacggctgggctgagacatcggtttggtttcaaatttgctggttggattttcaatggatttccatcttaattaaacaatcatatttgctttttgctttgaatcatatttatcacggtgcatagcgacctcgggatcactagggactttggttctattggcttctatttcaagcagaaatttgccatttccaaattattatagcgtagcatcattgactatgttctcgattttaggtattaccaagattcgcccataagctgacgctaccccagccccgcggttcggctttcgcctcggaacgtgccatcggaacgtgtctgaactgggggatctacagaaactgggggaactgattccgcacacttcaattccaggctcagagtcgtcttcttaaataaacccagaaatggccttcttctttgtttgcttcgacttttctactcagtatctcgcttctgttgtatcacacaagttcaaaatataaccacatcatggctatccaccgcataataaccgatccagctgcccttctaattgtcggaacccttctcttccttgtctacctgatatatcaacgattcttgcatccgttggcaaaataccccgggccgtttcttgctgccttcacggacttcaacaagttctcgctgttcttgtctctgcgcattgaccaaagaatcttttctttgcatcaaaaatacggacctattgtgcgaatagctccaaacgagctcagcttctggaatcccgaggccgtcgccccaatctacaagtccggaaaggcaatggtcaaaagtccatttttcgatggattcaaaacattcaatccaagtctgtttgggaaccgagatgaaaaagtaagattcagacaaaacaaatgtgttctccgcaatgttctcacaaagaaaccaggttcacgccctgagacggcgacagatggcccatagtttctcgacgagctctttgactgatatggagtcgatttttgatcgacatgtcgaaaacttgcgtcggaagctagacaaatacgcggtatcgggagaccagtttgatctcaaggatctcattgccttttatggctatgatgtaattggggaactggccttcaatctcgatttccactcgcaggaaaaggacgaccccgagaatcttccccctataaatgaccatatccttctcggatgcttgtatggctctcttcccgggatcctgccttggtcaatgaatttgagcaagtatctgccgttttcatggctccgcaagttgctcgggagccggcaaaagattcgcagcacggtggcacaatgcgtggaggacaagacgagtgaatcttctggaaaaacacttctcacaaacctccagaaggcaaaagacccagaaacgggcgaggaattgtcaaatatcgaaatcaactccgaagcgtttggattccttgttgctggttcgcacactacatcagggaccttgactttattttttcaccatcttcttcacaaccccgacgttcggcgccggttggaggaggagatttgtcaaaagctgccgatcattgagcacggcgcctatccgtttcctgggctggagaaaatgttgccgtttatgacggcatgtatccgtgagaatttccgtcactcgccagtctttactatgccattgacacggactgtgatggatcatgcggggatgattatcgatggagaacggatccctcggggagtgagtgattttactattgatgtggaagactttgctaatttgtgtcaggtcaatgtgtccatctcgaactactcattgcaccacaatccgtccatttggggacctgaccatgacgaattcaaccctgatcgttggttggcttccgacggcacggcacaggataaattacagtatctaatgcatttcggagtgggtcataggatgtgcattggacgcaacattgcgacaataagtattgtcaagattatcacgactctatttcgatcctatgattttgacgtgatggataaggatgagcgccttgatgtcatgactgttggcattggtgagaaggaaggtccattgtggtgtcgtgtgagctggagagagtaacatgccaaggatgtgtgatcttcaaatgctcttggtgatggagcgtgttgtagtatcatatagcaatgttgcaaaaagtgaattttccgtctcatttttctggggcataagttcaaggcctaacatattcggttcattgaggctttttaatcagatagtagactaagcctgagttatgaattgccatagtttgaaagctcactacataaaatagatgctaaacttgccactaaaacgaaaatacaaacctccaatcccttcctaagctggggttgtaaactaatcggagccctttgaccatatggcttttccgagcgacaatgataggtttctactatatgtagtagttccatgagtgatacagagtagtattcaagttttaattcaaggcaaagctgaaacgaaagacggaaagtgcacacggaacttgacaatgcgtaacgggaagtgacgaacagtgcgggacagaaacgccgtcaataagccgacagcatatgtatcctataaactcttcatattggaaatacctagaagtaccagatccatttgaacaagaactttttcacacccattatgtctgccgaaattgacgtgcccagcaccgtaagtctagaattcgcatcaaattaaaccagacattgaagccaacatttctagctggatgcacaagctatacgtgttatcatcgttggagcaggactgggagggctggcctgtgccattgcgtgtcgtcgaggtgaacacccgctcgatgtaaccattctcgaacgatctgaagagctcttgcccgtcggcgcagggattcaattaccaccaaatgcaacaagagttatggcccatttcggccttatagaaaagctgaaaagggccggcgctatcactacggaggggtatacgctgagaagatatcgggatggacatacagttgctcaaaagccgttgtagtgacttatggtgctgaatagatgtctgtgccaagtaatcgagttagcttgcttgggatatgctaacgatattcggaaagggtcatacatagggctgactaccaagccttgcttcttgaagaagcaactaacgcaggtgcacatctagtcaaaaatgccgaagtggtcagcatcgagtcgtgtccagccgttgacatggttgtgctaaaggacggcagacgtttccatcccgacatgattattggtgcagacggtaagcatttcttggttcgaaagtgtccataaatcacagttggctaacactggcatcaggactttggtctacaatgcgggagttcattatggatgggccatctccacctctggaaacaggtgatttggcgtatcgtggcatgttttcgctccaagagctcactgtgttaaacgacccagatgtcgagaagcttgttgcagcatctgatgttcaggtctggatggggccggagaaacatgttgcgttttaccccatcagaaataaaacagaattcaatttggtattactgcaagtcacttcaccgcagataatgccaaagccctcagttgacagagtccagttgtccagatgacctacccaaaggatcacgaacgtcagagggcgatttgaaagagatgcgaagtcattttgacggatgggacccggcgtatgattaatacaagcccattgcacgatatgaactaatgcattgacagacttcggaccatgatctcttgtctccgcagagctttgaagtggaagctctgccaccacgaggagctccagagatggacaaaggcgagttattgatcgaatagtattatgttccttgaatctagtctgaccgtgaatagggtactgtgaccttgttaggcgacgcctgtcatcccactttgccataccaagcgcaaggggcggcaatggcagtcgaggatggtgctgtcttaggacagctcttgacgacggcacaaagtcgggcacttccaaattctgcgacggaatttcgtgcgatgattactgacattttaagtctctatgaaaggctgcggaaggagcgaaccgaaacaaacgtccttggggccgtacagagtcgtgatttctatcgcctttgcgatggaagcgagcaaatggaacgcgatcagatcttatccagactccctgattcacaatggacgggggattgcaaatggaactggggagatgctaaatatcaacagagccttcttgggttcgatgtattgggcgacgccgcacgcgagttcaatggcctcgggttttagggctcgggaagaagtgagaagacctttttggggttgatactcgcaccccacttacctgttatgctatgttccactagaatgtaacaatcaaagcctacaaatacacgtttacgccgatcaaaagctatttataacaagtccaaagtacattctgctgcggaaacagtccgcctcttacgtaatatatctcgtgtcgatccacggctggacatatatatattctgccgggatgccttcagagctccgaccatacttacatcatcgtaatcatcccatctcaatgtgaattccagagttgttgtgagatcatgaataatgccacatccaagcggcgttctcgactcaaacccgactgtgagcgaaaacgaccaaagtatgtcttcaaagcgtgtgcatcatgcaaacgcagaaaagttcgctgtaacggcaaaactccttgcgagttctgtgagcgacgttcgatcaagtgttgctattcaaatgagtttgaatcatccacggatcatgcccaccatttgaatgatcgggagttaccgttggaggaaaagaacgttggccgatcggatattgtgtaagagctgtatgattcacatggcgatcgatcgctaattgcgcttcaaggccattgcagcagctgtctcaccttgtggcaactttgcaggataaggtcgagttattacatcacgaaatccaagatgttccgaaagagcgtttgtctagcgtcaagggtgatactgatactcagaaccacccgaagctgaaagatcttcgatctacctcaccatcactgcctgattatactggcccaaccagttctctcttcagcctcggcgttgcgaagatgattctagagcatggcaggccttccagcccagagaagctagatccggagatcgctggatcggtgataacgacaaacgagcaagacatgacgcaaatggaggcttgttcatcaactaaaacgggtagtagtgacctgggcctgctgagtgagattaacttgaacgaagctttccgcctcattcatctgtatgatgatatcgtaggcacgttgcttccgatagttgatatcgaaacaatcaaaatgcaagctgaaatgctgtgggcgaacatcatttacgaactgaatccgaatgatagttctggtggcctccgtgaatgcgatgccacccctttgaaaatggttatcgctattgctctgcttgctgagggtggtggctatagccgcgtggcgattgatctgcacgacagcctgctaccaaatgtattgccccatgccgtcttgagaaaattctccttacggggccagcagataatcctactgaatgtacgtgccgctacgcagtatcatattcgactctaatcgaacttgacaacaggccttgttttatatgttccaggatgactacagactcgcgtctcgaatgattactattggctcgcgcactattattgagtccggattacatcggaaaaaagttctttcgcattatttcccacgtccagaggagcagaaggaaatcaccaccctgctctacacttctttcgttctcgatcggcaaatcaacttcgcagctgggttgccgttcactttccgcgacaacgatatcgacattcctgaggtggttcgttttttctaatagctcgatgttaaatgaaaagggtcagcagactaataatagggactacaggaagacgttccatatctgaaagccatgagatcatatgtgcagtttggagcccaaatttggtattccatcacagatgaacacgggaaattcaagcgacggttgaaggaagaaacctttgactttttgagctacaaagtcaaatcatggcaagaaagtctccccaaagctctacagtcgtcccaagacgagctgggatctgtggagagcattcctttcgaggaccgaaaggcctatctcatcagatctatcctgttcctacgagcgaaccagatcaggattttggtcctacgtcctctactttactcataccaaacagcgaaagcgaatcccggccatgcagacacccttgtccaacttgcaacaaacacgatcaataaggttctcgagatggatcgtcaatccaatctatatcgcacacaaataccaattttgaatcatttcctttcatctgcgttgtgttccttgttccttgttcttgctcattattcgcgcctttccaccacggagttcactacgagtgaaagtgccgccgtggtcgatgctattgccaatggcctaagcttactgcgaacttacctattctccctgtcttcacagcggttgctgcgaaagtttactgggccacagggcctgatatctcatcttgggcttctgaaaaactgcaatcactttgacaaattactcttggagaagcttgatattgacaaatttacgggtctagacaatgtcgcgctagatcgaaatccagtgatggagggtaatgatcatcctctgcatgattactccaatccgacaggaagtgagtggcctcttgaattatcattgccatccccagtcacgcccggagatataagccagctatttgctagctatgaattggacttcatgggattcaatctcttatgatcaatgcaacttgtgttttgtgactgtttccaagcagcttgcgcttgatactcttgtttttccgcaacactaaaaatcgacttccctctgaatcacaaaaattctaactcaggtgctgagttatgtttctatgtccgtaaatatacttttagacaaaaaacaaaaaaaaatggactcgcggggaatcgaaccccggaccactcccatgctaagggagtattataccactaaaccacaagcccagttcgatggaagaggccagcatttaatgctatatgaagtgaacttaatctacagcatgtctacggaagggttacgatgttccatactccctaagcatcaatgatatacagtaacatgtgtgtccggtagactaaatcccaagtccaatcattacatggcacctatggatcgtaaacaatcaatgtgatgcaaggaaaagctgatgaacatgctgtaggtatgtaaaaatcataacctgttacttcttactatgtatatatgcaccggttgatccgaaggcaaaatgacaatgtgtaaaatgtgtatgtacatgggacagaggaaggagcagcttcacaaacaaactctcgtaaaagaccagacatggtttaattccctgtcgcacggagtgaatatcactcaaagggggtatggagaaatagaagaattgcataggaaagaaaaagtagtggaaccagccgaatcgctaaaactgacagatgaagcatgggtcgaagcacataccgaaaaacaaggggaaaaggcccgttgtatgcaaataaaaattgatatggcgattctactcatgcgctgcttccaaatcggttcgtaagccaaccggcgagtcccccaacaccctcaccccggctagaccgacggtttctggattcccctccctctggtgtaggggacccgggtggtgacattcgagtggaaagccgactctgcaatgaagaagataatgaggatcgaccgctgcgcacagtgcgagcagaactgcgacgcggttgggatctcggctgctcaggactatcccggatcactaccggattctcaggggtgccttctccgcctctgtgagatataccgtcaactgagagtcgtcgttcatggatacgactcacatacttacgttgtatttgaattgatgctgcgccggcaatgcggacaagtgtcatgctgggtcagccatgcatggatgcagttgtaatgaaaccagtgagcgcatggtaacacagtgacttccaagccgagttcaacgttatccatgcaaatcgaacacactgcttttccttcagatcccatcatctcttcagtgatcttcttcttcggcaaagcttggacggcagcatcagatgctggcggtgccgcagtgctagtccctccaggattatcaaccagttgtgtgatgactcggtcgagctcctcctgcgaatagactgcatccccgcttcgactcatgttgagaagggcagacaatatcgaaagagcatgtgggcttgccgggttacgacctccacgtgagcgtcgtgtagtttgtactccaatgtcagcacgaatggcgtccatgattctagatttgattagtctggtgataatgcaacatagtagccaagtacatactcatttatgtctgtcgggttgcggttgacaggttgaggcgcatctgcattgcggggagagaggcctgggtgatggccagtaaggtggtcgtcctcgagccagtcgggagcggtagaggattgaggatggaaggggtcctctccaaagcctctgtaaccacgggcatttggctccattaaattttgaaaaattgtgtcaaagccgtgcatcatcatcggaaccacagggttcgggccattgttgcgctgaccagaaggccttccggtctcaagtgtcgcgctgctgaatgagaagcgaccgtccggcgatctgtatgtgcgcaaggaggaaaatggaggagtagcccttccgaaaaacccggggccttgctgttcttgcgtgtcgtgttcccacggattgtggtctaaccatgggctaacgcgcgaaggcgatacggagtccgcacggcgtgagggggagccttcgggagatatttctggggggatttcaatctagaggaagcgaaagtgtcagaattaaataaaccaagagagaaagtattcgctgtactatttctgtgaactccgattgacaatgtgggcacgtcaaaaaatcaccatccttagtccaaaccccgccacaggcatggcataacatgcggtcgccagtgtccatgtcgcaatacagactgataatcacctagagattatgagatgttgtacaacgtagatgttatgattgaagctgatagaatcgataagcgccagaacagtcacgagtgccttatctgcggggagctggtcacagtcggttagatggccatatttatcggatgaggaagaacagaaagaacagaaagaacaggaagaacaggaagagacggggggttaatatttcacagatggtggtgagccaacgtgcaaggacaaaggatgattagagtgattaatcgagtgagcctccaaccggcggctggaaggaggcaatgacgttgatcagcaaatcgccgccatagcctgaacaaggcaaagggaaccgtcaaccatggacttgtatgaaacaaagaacactctaggtttcatacaaaattagaaaaccatgtgtttggcagccttgtctcctattgttgctcttgtttcaacgcctggtttcatatcggggaatctgtcgcgacgcaagggccaggaggcgaggtatacagctcatattactcaaaaagttaagcctccttttacaccggagagattaagactcaatcatatgatcaattcgtaaagaaactagtacaaagtgtataataaacagcaaaaaatggtcactttttccatgcagggatacaaattcctcgcgatcatctcatccctgccaaatgcactaggagagtgaactgaaaaaagagacagcaatggatatcacagatgcaattcaatcggtaacctcaaaacaccccgaaaacggatgacaacgtcgagcactttacttgatctcgaggagcttaacgtcgaagataagcttggagttggcgggaatgccggggagggccttcttgccgtatgcaagagaaggagggatggagatacgacgctcaccaccgacagccatgccggcgacaccgatgtcccaacccttgatgacctcgccctttccgagcttgaaggtgaaaggcttgcccttcttgttggagtcgaagaccttgccgtcctcgagcttgccgatgtagcgcatagcgacagtgttgccactcttggcagcaacaccctttccgagcttcttgtcgtccatcttgactccacggatctccttaacgccgagagtgccggtgggcttgtcgccggagggggtagggccctgctcgaggttcttggcgaactggaccttcttgtcggtcttggcctccttcttggcatccttcttgggctcaacagcggcggcatcgccgttgttcttcttgagcttcttctgctgggccttggtcaaggcgggctcctcagccttggtagacttggccttgttggccttagccatcagatcgtcgaggctgacctcatcctcagcagcgcgcttgttcttgcccttcttggactcaacaagcttaggagcctcgtcctcgctctcaacctcggtgattctagggtcctcaatgtcatcaaggtcatcgctctcatcaccatcctgcatggccaagagatcttccatgtcaagctcatcctcatcgggagacagatcgtagtcatcctcctcctcatcgtggtcatggtcatggttgtgttcatcaagaccaatgacgtagttaccggttaggaagacagtgtggttaccggtgaccttgaagaacacgggctcaccctcgcagacggtgatgtccaggggctgttggtagttctacagaggtattaaacgtcaatattcaaccgattgtgaaactcaagagggtgttcgccttacctggctggggctgagggtgcagataacgctctcatcgagctccaggccctcctcagactcagagtcctcatcgtcaagggcaggacccttacccttgatgagcttggagatggcagcctttaggtcgaagtcctcctcatcgtcctcctcctcatcatcttcctccatggcgtcctcgaggtccttgagggcggcagctgccttgagcttgcgggccttctccttgtcgctaggaccaccgttggactcctcctcgtcatcggagtcctcttcatcctcatcactgtagtcctcatcatcctcgtcatcctcatcgagaagaccaggaggaccgcgaacaatcttcaaagtggaacgggaaggcttgctcgagtcctggtcatcctcgtactctggggcctcatcggggtcgatagcggccatgctgatgcggaactatatttaatgtcagcacaagctgttagccaattgatgattacagtaagactgaccgaagcagcagcgttggggactgcttggaccatcgcaccgggaggaacccggagcgcatagactgcgacaggctgaacagcagacattgtgagtaaaataaagtgacgaaggtgaagaagatcaagttcaaaaatagaatgaaccacgtggaaaaggatgtggatggaaaggaaagaaaagagaaaagaaaagatgctcccaagcaacagatacggcaaaaaaattggagaaaaaaatattgatcaatgagatcaactaaccgttcaccgctggtgtattgccgtgagtgaccgcttccttgaagcttggatccacgtgatggttgccaagcttcgcgcgaaagggcaacatccttttctttacactctcttcttagtcatgatggtagttgtagcccaaaatgggctcccgtcatgagatcaactctagtgcagtgcgcaaacgcattgaaaatcgtacgtttagtctaaatatcaatttccacttttatctgaccatgtctagatgaatttgacgatgaaagaggagaggagtatgaggcctccagcttcggcgggtttggggactacatgcgccggaaaaagatgaagttgcagaatcttgacgcagaaattcgagcatcagctggtgattgcccgccaatattccgtggtgtggttgcccatatcaatgggtacactcaaccttccctgcaagagctgcaccgtttgattgtcagccatgggggtggcttccttcaatatctggatggcaagacagcagctactcatatcattgccactgctctgacccccaagaagcgtgaagagttccgccgctaccgcatagtgaaacctacgtgggtgacagacagtatcaaagcaggacgtctgctgccatgggatgaatttagaatagtagacgagggtgaagcgcaaagagtgctcaagtttgataatggccggtttatcagccagacgaatagccctcgcgcacgttacaatgaccaatcgagggctagcaggtatagctttcagctcagagatatgagcacaacagaagaagggatcggctcttcatcgaagtccgtgacttcatctattcggtcgaaagcctcacatatgatcacaccaaccatgccgagccagccatctcagtcggactatggcgacttccctagcttcactatggagaacgaggaggaatatcatgaccctgagcacgaacaagctctaaccagtgatatagcacaatctataataccacatcaaactcccaattcagatcaagtgcccacttcaccagatccactggttgacctcgaatcaacaacctcgcctctcgaccaaacaagtccaacaaaacccgctttaacttctgaagaatacaatgcgcagctcctgtccgacccaaggatgcagaagtcatctgttgtcaatccagaattcctgcagcagtattatagggagtctcgcctgcatcatctgtcaacctggaaggcggagctgaaagcccaactgcaggccgcaacgcaggaaaatgcacagtctcagagattgaaaaagaaacctgtgcctggatcaagacggtacattctacacgtggacttcgactcattctttgcagctgtctcagttctaaatcatcccgagctccggggaaagcctgttgctatcgcccatggctctggatcaggctccgagattgctagttgtaattatcctgcacgtgctcgcggcgtcaagaatgggatgtggatgaaagctgctttgcaatcatgccccgatctcaaagtcctaccttatgatttccctgcctatgaagaggcgagtcgcaagttctacacctcgatacttgccatcgatggtatcgtgcaaagtgtcagtatcgacgaggctttgatcgatgtcacaaatttatgcgtggaagcaggcggctcagacggaaaggctatatcagaaggatcaacctatcgcgagcaagccaaagcggatgaaattgcgcaaaatttacgcgattcaatcagagagaagaccggatgtgaagtctctgtcggaattggcaacaatattcttctcgcaaaagtgtctcttagaaaagccaagcctgctggacagttccaattaaagccagatgctgttttggacttcattggagatctcactgttcgtgatcttcccggagtgggtaatagcatggcaattaaactggaagaactgaacgtgaagtttgtcaaagacatccgagatctcccgagagagagactaatatctggtctgggacccaaaactggaatgaaattgtgggaatacgcccgaggaatcgacagaacagaagttggcgatcaaaccacgaggaaatctgtttcggccgaggtcaactgggggattcgatttgtcaatcaggaccaagcagaggactttgtgcgttctctgtgcgaggagctgaatcggagattgacggaaaatctagtgaaggggaaacagctcactttaaaggtcatgcgtcgatcgctagacgctccactagaacccgtcaagcatctcggccatggaaagtgtgatacattcaacaagagcgtcgctcttggtgtcgcgaccaatgttccagaagtcattgggaaagaagcaatatcgatgttgagaagtttcaatttttcacctggagacttgagaggtctgggtgtgcaaatgaccaaacttgaatcaatcaaatctggcccttcaggccccgagagcagccagcgacaactcaacttccagaagtctccgcctcgccagaaagtcattccagatgcggaccctgacgagctagagagtccgcaaaaagataactctgttcgtattcaatcagatccaatactcagcgatagtgcccacaagccactcaatatctcggggacccaatttattatgcccacccaagcggatcccaaagtcgttgccgagttgcctagggatatcagatcaaggcttgttgcacaagcaaagccgcgccaggattctcgctcagggtctccatgtcctcttccccgtgaagcacgacaacctgcccaagcagacctcccccctcagtctcagctggacccagatgcattggcggcattgcctgaagatgtccgccaagaagtattgggttattataaccacccagctatcaacgctgcgtcaccgctcgtgccggtagtaccagagtcgcgcccatcaacatctggttctctcaagtcgagaaggccagtctcaccacccaagaaaagacgtggccgcccgccgaagtcggcaacgattgcgaacaagcctaagcctaagcctctaaaccaatttagctttgggttcgttcttccacgcccagcagctgtatctgctagtctggacgaagaggctttgtctagacaagcgtcaccaaatgtcgaagagccaacccaaccttcggctgaattccttgctgctttacctgaagatatcagacaagagcttcttgaagaacaagaacgcacccgcatgcaacagcgctcgcgagctactgaaaccacacaaagacctccatctagggatcaggaggctcctccttctgcgccaattgccgtagagaaacttctacctttaccacctctccccaagcgtcccgtctttacatcacaacgtctgtcccaattaccagatctacgagatgctgttggctcatggcatgaagtctttgcagctggcggtccgtacagcgaagacgttacttcactatgtacatacctgtccagcgtgacattgcaagagaaagatgtggataaggctgtttcagtggtgcgctggttgatgtggttggtcggtgagcattcgcagcagcaggggcctaaagagccacaggggtctcggcccgagggaactataagctgggaagaggctatagagaccatgcagaatagtgtccaggtggctctggaacaaagagagcttcccccggtggacttttcgtaaatgatacccaaatgtcagacaaaacatcgttgcctgtatatatctaaatgagtgcagaaaggtcaacaatatatgtaagatttgtaatatttgtacaaatacgctatatacagtacacaccaaagccgaaagatgtcacctctccggagaagggagaaaaatcgaagaaaatcgagggttgaagatgatagaagatgaggcagatcaaggtggagtcgtggtagcgtggcatgccccatacgcaggtgtattgccccacatctgtcacctccacctccgacttctaccccgtgtctttgacctttcagacaacaaacccgtcatgccgcctgtcaccgatggtcagttctccttcaatatcgacacattttatgtcaccgcgtcgggaggacagcttcaccgccgtgcagctccagctgagatcaaagccctttacgatactgcgactaccgacaagagcacaccagaccacccaggccattggtatgaagcacagctcctccactatggcctaccaccgtcaaaggtcaaggcgactgctaagatgaggctcttaaaggccgtgcaagacggcgccctgagcgttcccaaggaaagcctccaaatcgaaaagaatctgaagaaggaatggaagaagcaggattcggaggaaccagcaaagaccaacacgaagacgacaacgacgaagactgttaccaccaagactattacggtttctaagacggttgcgtccaaaaccaccgagagcaagactactgcgtccaaagccgcggccaagcctgcagccgtcaaaactgcggctcccaaggctgctacgtccaaagctgctatctccaagaaagatcccgcactcaaggccactgcctccaaagccactgcggccaaagctaccacgaccaaggctgctcctaaagccgcggccaaacctgctgctggcaaaactgcaactgccaagccagctacgcctaaggctgcctccaagaaggctacggcgcccaaggccgctgcccccaaagccacgacaaccaaaagtgctacctctcaatctgccccagccaagagaaagagggcctcgaatgccgaggagacagccgacaaaccacagaccgccaaacgccgcgtgtatggcaaaaagacccaagacaacacaaatatgcccacaaacagctaccccgggccgagtggatggtctgagcagcctgagcagcctgagcatcaggatgcgcctccctcgtacgaaatcgcctgcagaatggtaaatatattctccctcattcacaaacgcaatggatacttacctaacatgtctaattaggacggagaacatccctatgatgctttaggtgaccagatggacattgacggtccgaacgagtttggttatggccattatagcgagtctgaaacatgctcagagccaccatctccacctcgagccctgaaaaacaccctgggtcttctcaatggaacgtatgaagttcgttccccccgtatcgagtgcgagtggccggacgctgttcgcgggggaatcttcttatctcttcgccttaatgggaatgagatttgggggacatacgagctcggggcgtttaagggtgtactgtggatgccacaacgacccatgaggccctcctttgacagaattccgtttaagtggcgtgggcgggagaccggtgagggtgagatgagctttgcagatgaccaggatggttggattgagtttttgggtgatggtgatattgttgggatgatcagctgctatggtgatgtccatttccgagggcagcggattgatagttctgtccgcacagccagtgatctgcggaacgaatggaatcgctacaacgaagaggaatatgaccgagagtgtaggagtcgatggtgaatgatcctgaactgaatgaaggcatggggtccagcgaaaaccagtgctagctaatggatatcttgattaaatgatgcccaagtggtctatttgaccctagttcaaggtagtaagtcaaaatcctccctggatggccgagtgggtgagagacacgaagtcatctgattgctgggtgaaacattgatcacgggtgataccgcattgggaaacccagcaatggggaaactggtcagggtttcgatcctcgccaggagtagttggggcacggatttccttttttgttccttctccatgtcagcccttcactcttccttccacttatctcgtgatacagcggtgaaatagctctttctaacaggatattctgatatcatggaatgatcattgccttttgtttgtgttcaattgggcccgtctcagggaagtcacgatgttctcatgcacttggcactgggggttacaatcaacccactctgtcggtaccaatgtcttttgctatataaattgatgagcattatattcccaccaccgactaatgttttatatacagacccacacccaaatctagaccatttgcgagcctatcagcgaaagaattcgacagtctagcttgcgacagaacacttattccagagcatctacgcccgcagcctttaggcccaggcaccgacgatgctcatgcaaaaagcacccgaaaaaaccaggatgcaggcataaacccttctcttcccacggagaatacgccagctctcatcactgagaaagtcttccgacatcaactccaccagcgaggcaaatatcaaaagtccagctgacatggcattcataacaccgacaacgagcaaaccaacctccgagtcgggattataaagtgtatgggttgcgaggccaatagcttgcccgattggagtcctagtattttgtcagcaccattgggcccagagtgagtggggattaactcacgtgcatccgtacgcaagggacatgatccagggctggagttgcttttctgaccagggaagtgaggcaatgcgggatccaagcgccaggccttcaaatgtttctgtggttgatttagtcaaattcattgccccgatcaagcaggcgaatacagagaactcacgatgaaatacaattgcaatgagcagaatcacaaattcactgccaaccgacacactgagtgacatgccgataaacacgctgtggaaaagaatacccatttcaagaaggtagacctgcatggtctctttcttctgcttctgctccggggttaaggcgaaggtatcgtcgtgacgctccacgtctgtctggatagccccgttatctttctcgtggtgagttggaacatcaggcgcagatgaaactcgaactatatcttcagtcccttcgcccattctattgatcgctcggcttatgctcgcggaccttccaattagcggacccatatctcgcaaatgccggccttccattccaacggagtgcgagcgcggcactatagagtggtcgagatactcaggaacaccgagagttggaattggaggtgtccttgcatccgaagggcagggagctggcctttcggctgggacctggtttcctccacggcagatactctgggctggactgaataccatttcgatgactgtaacgagaaatatgccacccaaggcaatggcacccggcatggctgggtagtcctttgtccagaaattagagagacatgggtcgcccagcgaagtaaatgccgtcggaaggagatgtacaaatgccgtggcgacgaggacacccgttccaaaatgggtgacgaagaaaaggaacgcaggtggaatatgcattcgtggaaagcgagttgcaaggatagggaatgcacatgcaatgcttgaggtggccaggatgatgaagagggctgcaacgtgcaaaggtaggtcgtatgcaccgccgtcacctccctgagcacaacttgatcgtttggctggctctgtaaacggcattgcaacaggtgcttccagtgtgagagcttgctttggcgttaagtaccgtctcagattatcgaaggagatgactgccgagacaagaagcacggagaggagccacaacgcccaatccttgatactctgatatgatgggaaaacattggtatttgaatccaatccattgtgattgatttcgatattagtatttttgggagcgaggcgtcctgttcactggttagaaggttattactcaaaaaaacatgcttgcttttcatacctgacattgtcagggacgcctcgcaccccgcgccaaggtgattgcctgcatccttttcctccagcgtaggaattaccttgcaattggagcttccccgtaaagtacccggaccagactcatcgtctttcttctcgcgggtgtttgagatgccatcgaggtcttggcgggtagtcaggtcgggagaaaggaagcgcgggctctggttccacccatcgtgcagcaaagtgtcgtcagtccgagatgggcagttcatggtgctatttgaatgatttttctaacttcgctatctggattcagtgtaacaggtgaaaattatagccagcactgatcccgagggcttggcatggggtggactccgtcccgacttttcttggcagtcggctatgaaatcattgcggctcaggcaacctccggtattggccgaactacgattaccggagacaatatgtttgcgttgcaaggcctgaaaactccatgacgtgaaaccgaggtcactagaatgtgtcccagaacgataggtctagcgaggttccaagtttgatccaagactactaatcgactggcaggacctctagagaaacagccctggagggtcaatgtagggttgataggtgcctgcaaattgatacaggaactagttattacaggagcacaacagtgcacattgatattcgtgttctttttcttatggtcattttgcccagggagccttggtatgcacattggcacttccatcctgtgaagccgggggcctagactgagcagaaaagggtgctctgacgggtgacatgggacctggaggcatccttgaagtatctggaagagcagagggaactctggtcgtaccactgggaattccctctcttctcatcccagcccacggggctgctgtcgagcccatcgggggaacagcttgcgtgcctgtcccggacttagcccagggagcctgggtgccagctccgggcatagaacgggtagcggcaacagacgggtggccagaatccggcgcaatggggcgtgactgaggaccagatgtggcatgaaccgtggaggggggcacaggcgcatttggatcatggtcccaactgaacagagatccgaaagggaagtgctgtaccacggggaattttgaaagaacttccgcgttgtacatcttgatcattccctggtgcaacatgtcagcgtgaacatccccactgcttaaagattgcgaaccttattgatctttccccagccagctcgaatgccggaaatatcgaataacatggggctgtgctcccagaatgggcctctcttcacatcataaataaatccaatagcggagaaatatagattactttggcgttctctttcaacaatctttgcattggctaccccggctgggtcaggtgcattaagtagtgagccttcttcaggagttaggtcagtatcgttgattgcaggcgataattgtgcggatccaaagatataagggacaaaggaatgatcatcaagaccccagacgccgtgggagccagcaggctctaggttgtatgtcttgataagtagtctgataagctctaggtatctatatgacgacagtcagtaggggacgaagcatatctgacgtgttagattctgggtagacgcacggatggatcactccaaccacgatagctcgttcctccacacctggatcggccttgggaaatccattcagcttccatattccacctaggaaagctaggaagctgagttcatgaccggtaccatagtccaaccgctggccacttccccagctacccaagaaatatgatttcaactcggtctccgccgttgcgctctcacccgatgatcccctatccaagaggtcggccggtaggcattccctcagcaggtcggatgcgcgactttcgaccacctcagaccatctccggaagcttatatttccaaacctccgcggaccagtatctggtgggacctcctgtatgatatcttctagtttcaagagaagtccctgcaattgtcggaccggagcggagtattgtatcgcatcgctattgagagtccaagtttgtatagtgtcatcggcaagcttcagtggaaacatagatcggttgagttgtagtatccacgtcatgatatcagtataggctttggatgtcaggaaagccgatacatcttgcgagtcgtgaatttttttgttcggttcgataaatacgtgctctgcagagtccaaagtggccaaaacacgaatagcctgggcgtaagccatgtttgctgagaaaatccgaggtcggagtgggatgaggaaagaaagttggaggggaagcgggatgttatttgcggctccaccagagctcttccctcaccgcgtgttgtcattcttttgaattccccacgcgtttttgaagatggcgccaaaaagatccacacatcggcatcgatctaccgattacactcttggactcttgaataatatcaatgtcctccggcgcaattccacggatatacaggaccctaaaaggcgccgccgcaccaccgacacggatgtctatgatgttcctctctccccttctccgacaagaactcgaaagacccctcaaactgaaccgaaaaataccaaccggttgagtctgagaacccgtaaagtgcctaggccatcaccaccggtttcaccccccagcgtttctgaaaacaacgaagacaaagggcccagcaacgacgaatccgggtcaggcgatgacgagtcccaatcaattcaaaatggatccggcagcagtttaaaggaggaactggatgataaccgcgacgagcttcaacctgaggttgaacatgatccgttacccgaaccagtcgatctgttcccagccgcagacgaggatcgagctgatggtcaggttggttacgaagctagaagtgcacaacaagatgtatccggggatggatctggatctgaaggagaagaagagaaggacaaccagcctaaagagaaatctagagatgcacaagacaatccatctgaggacgaatccgaagatgaagatgatgaagagacggatgctcatgctggggaggaagtcatagacgcagaagacaatctatctgaaaaggacccggaatatgaagaagaagatgatgaggaagaagaagaagaagaagaagaagaggcagatgataattctcccgccgaagtccagaatcattcaataccgacccagcatattgcaaatgcagacacacccgacgtgcaaatccccgaaagtataccaagaaaccaaggaggtggcgcacatgtaagtcgcatgtcaaaaaatactcaaggattccagaatgcctcgtcacagcttttggaagtaccagagtcaccaacaatcgagccatcgcgcccaaatcaggaccatcgcagcgctcgctccgatatcttcacgtggctgaccgagaccacgaaagaatctggtttcaaggagacctgggacgaacttcgcaagataagaaaaattcttaaggcccaagctgctcccgctacaaaagagcatttcatgggcatcgtaaagctcattcagcggctacgaggtgtgtttgcaacaatgatcaatgatcctgcttcagcttcttccttgagaaaccagtgcaggctcatcgccaacagcatcttcaaagagaatcagtggatcatttacaccgaagccccagagaatgaagatgatggtgcccaactggtcaatcagctcgaagcccatattgttccccgactgattgacctggtcatacttggattcaagacctacaggacattacatgatcgggtggcgccacatttccgcattatcctggatttgctttggggttcctgtgataggatatcttctctcgtcgaggtgaattatgatattagtgcgggcgtggtggctcattctaaaagagcgatgcgacacgtgaaggctctaaaggatgcactgaaagatggccgactacgtgagacacctcatcgcatgccccaacgccatctaccatatcggccctttgagttggaagaggtcgatagccatatctcctgtggacggtggatccatgtagagacgaatgcactccgtgatggtttacaattatatgagggtaagactttccatttctcatgccatatgctattctgatggtgtcaacaggggaagatcgatatattgatatgaagtgtgacaacgcaatcggcggtcaactatccgagcgcatcctgcaacatatccatggccaagccgtcaaactcgggttggatgatccatgacctaattgagtattgggagagactagatcgggggtgatattagcggcattgtatagtaggctcgatttcaatacccttttgcgagactggagttcatagagaccaaaagtgtcgatgtatatatttggccgaggtattcatgtggggtcggcccgcgaaccacaaaccgcgaaccacaggcattgtcttgaacatccatggatgtcaaatatcatgtccacattgaatacagtatacccggaagctttattatccttcctacgagcgacaatatagatatttcggtaaaatttgcggataggtttaatatttgtgagctactcagggctggttttgcatcaggaggaatttcgtccttgggctcctgatcctgtgtcttagacatcttgggtacctacatgtacatagcctggtactttaaggagacttctaggacttagggagctattataatgcgtacatatgtaggtgcaaggctccaaagctacaagacaaatactatagagcaaaaatgaacacaattagtctgatcttggacccggtcaaagccagcctatattaactgtattctgatcatctagataaagacagagacaatatcagcagatcccccggatgcacgacccatgtagggggtctataaagaaaggctccaaagtatagagcagcggcgatccccccctcctaaattgacaccgctttctctttttcccgctttccccttttctcccccaaagcatcctgacaacatttgcttttgtcggtttaatttcctctttttttaaaaaaacaactgtgctggacttctctgggtctggagatcagtcttcaagtaattgtgaagatttccctttggaacggttgtgcggcgcgtgagtacattcttctcttttctgcatgtttgtttatagacgggagcttcggtcgagctggacaatgacccagttctgccatgggcatagctggaataccttgaacgactggggcaaaaagatttcatgcttatgcccagcgcgctataagcccctgacctggccattacagttgcatcgattcgagcgcttgaatctggggttgcgactccgagcataccagctggataattatgcgtttaggggtataacagctgacaacgcttttcgcagacagcttactggtacatgccaactgaaccttaccacgaagcttgccccctttaatacattaatcttgaacaatccaccgatatgtcgtcaaacgaaccggtcgtcgcccctgctcctgtggaggtcgatgagaatgagcccccagccaccccgatagattcgagcatcgtctctgaaagcgacgagttgcttaagcccagccccgaagtatccaaggaaagccgtgcgatctctccggccaaggctagccctgatacaccgagcaccgagaagcgtcctgtgtctggcgcatccaccaccaaacggcccacctcatcctccgcctcgaaacccacgacgggtaccacccgaccgacctccggcactctgaacaaacctcccactcgtcccccggccacgacaaccacccggaagcaactgagcacctcgactgtctcgtcccaccggtctcacaagtcagtcagcagctctgcagatgagaagcctcggtctgtggcgagctcaggagatgagaggcgcggaatctctggatctgcgaagcgcatgtctatggccggtacagcctcgacccgcgctcctctcaaacccacctcgtctttcgatcgtagatcgagcgttgcaggccccactgccgagaggaagcccgccaccacaagtgcgcgcaccgcgaccgcgacctcgacaagcaagcccgtgggcaggctgacttcgacgacgacacctgcaagccggactgctacttctacctccaccgctagacctgctactgttcggccaccctcgactacgagcaccgctaggcctgtcactgccaccgactccaagaagcgattgagtacgcttcctgggtcaattggccgtgctggtgattctgagaagctgcaggccctccagactaagctcgccgagagcgaggagaccgtcgctagtctgaagtctgaattggagactgtcaatgagaagctcagccagctttctgtctcggcccaagaacccctgggtgatactggtgccaccgaggccattcgcgcggatcacgccgcagagattgagaaattgacatcagcccatgccgacgagctccaggccctgcaagcgcgactagacgaagccgagtcccaacggaaagaactggagaagagctcgcaaaaggagttggaggaagccagacaatccgccgcggcgcaaggggatgacaggacagttgccctgcttgacgagctcaaggcaacacatcaaacccagcttgaggccatcgaaaaagagctggcagagcacaagtctgcagctactcacttcgaggagcagatcggtgctctgaagaaggaactcgagtttcaaaagcttgctctggaagaagaaaaagctctagagctcgaaaacttcaaccgagaactcaagggccgtgatcaggtgttagaaaatcttaacacggagattgctaagctgactacactcaaggagcaagaggtccgtgctgcggaagagtctgctaaggagagtgtttctggtcttcaagagcaagtagccgcactcgaggcgaagcttgctgcggctgagtctgctacccaggaaagctccgaggagaaccctttgatcgccgagaaggatcaagaaatcaccgagcttaagcaggcccttgagaaaattcaaagtgagctccaggaggcacgtgacgccgcggccactgaattgtcatcgaaggttgtggagttagagactgcccatgaggctgctatcgcaagcctcaaggccgaacatgaaagtgctatcagtgagatttcggcttcccacgcggaaaaactcactagtgccatagcggcggcggaatcgagcggggcagaacacaccacgcaaatccaggaactccgtgatgccctcgaggcgtccaaggccactgcccagaaaggacaagaagatgccgttgctgaactgaaggccgcacatgatgcagagctcaaatcactacaagaacagctggaggcttccgagaatgccctcggcgagtcccgccgtgcactggatgagggtaacgcctctgcacaagaagatgccgttgctgaaatgaaggccgcacatgatgcagaactcaaatcgctacaggaacagctggaggcttccgagaatgccctcagtgagtcccgccgtgcactgaatgagggtaatgcctccgcacaagatgttgccatccaagagattgacgctcttcgacaaaagtgtgagtcgctggaatcacaactgaccactggcactgggaaaatcaacgcgctgctcgaagaaatgcagctcaagcaagctgaagtcgaaaagatctcccgcactctacgggataatgaagatcactccaagcaagaaggtttacagaaggacaataagatgaaggctctggagcagaaggctgcagaagctgttgtgcttctcgaacaacacaccttgcaggctgcggatgtggctgagaagcacgcaaaggccctggaagagttgaaggctgaacatgctgctcagcttgcatccgaattagagcgggtcaaggaggcatcgggatctaatgaaagcgctctgagtgatcttcagatgaagcacacaaaggctctggaagaattgaaggctgaacatgctgctcagcttgcatccgaattagagcgggtcaaggaggcatcgggatccaatgaaagcgctctgagtgatcttcagacgaagcacgatgagttgcttgccacaaacaaggaattagagtctacccacgctacccggattcagtcgcttgaagctgatttgagggcggtactcgaaaaccacgctcttgagattgctacccacaccgagggtcgcgaaaaggagaccgccgaactccaaaatcaattcgaagaaacccaggcgaagttgcaagccgagatttccgctttgcagagttccagcaaagctgatgccgagcttcacaagcagcaaatcgccgaactgcaaaaaggctttgaagaggccaaaacccagctgcgggctgagatcgaggctgcccaaacctccaaggctgctgaaatcgatgctgagcacaacaaggcaattgccgaactgctgcagggatttgaaaagaccaaagctcagctgcaggttgagattgaggctgccaaggcctccagggccactgacctcgatgctgagcacaacaaggcaattgccgaactgctggagggcttcgaacagaccaaagccaagctgcaggttgagattgaggctgttcatacctccaaggctgctgaaatcgatgccgagcacggaaaggcgatcgagcagcttctaactatgagcgaggctaagctgtctggcctcagggaggagttcgaggcttctaataataccaagattgccgatctccagaaggcccacgatgcagcactagccagtgtcaacgagcagttgtctcaggccaaggccgctgcccaagacacctccgttctggatgacttaaaggccacagtcgccgatctgcaggccaagcttgctgattctgagaaggctcgccttgcggtacaggaatctgccaccacttcttccaaggaaattgagggttactcagctgagctcgccaagatccaggccgaccatgctgcacttggagagaaataccaagccgcggtcgcccaggtgggtgaactcgagagacttgccaaggactcagacagccagaagtcgcaccttgagtcgattatgaagcagctctctgaatcccgcgaccagctcctcaaggccaaggccgataacgccgccatctccgactcgctcgttgattgcaggaaccaaaacaagaccttgtccgagaagcttgaagctggcgaacgtgacctgaacgatcagatcgacaagaacatgggtctcctcaaccagcttggcgacgttgattccgctatctctgccagccgccgacgggtccgcgaactcgaaaccgagctcgcagttctgaaggcggacagtggcgagaagagcagctcttcgggcttggacgctagccggtgggcgacagctgatgagggtagcgacaacgctgaagatgggggtccagccacaacggaaggtgaggacctaggcccatccattgagggaacggtgggagatccccgattgaagaagtcttcctactcatcagatcttcccgcattccacccattcacatgattatgaagactattcagcgtatacagaggactaatacattccatagatggccagcctccaagaacagcttaggcacatccgaacagccagtgaggattggtacagcgagcaccacaggtcagtcaaatatgcgctcgtattgaaaatcatgctgatccctccagactcattgccgaacttgctcaactcccccggcaagcatcctccgactctcccagcccttcgaccacacccaattccgaagtcccaccagcccccgagccagaaccttctcgcacccgcgccgcaacagtctcatttttcgggagacgctaagtttcgcgtggatatggcacctttctgagctcttagtcgtgatgcagcacgacttaatcttgaatcctgtttcactctgctcttgtgattctactgtatgtaataactacgcaggataccctgtcttactatgtcggggtttcccactattcttgtttcaatatctttatcttacacatacaacttgtttgagttgaactttgtgtcatccgtcttgcgttactgcaatggtcagattggtacttactagcgagagatgcgtaagtggttcgatgcttggtccaagaatgcaggaatggataattcaagcgcaatgatcgaaagtctagaacaaagtgggtatctcaatataaaacaataaagttcaaagaacgcctttccccatgccccgaaatagtgcgcaaaggtgaattcaaaatcactccgagtcggaagggtagctgaccagcgctgatgtcggcgccacggcagaggaattgacttctgtgccactgtggtcttcacggagggatggagtcgaagaggtggcaactttcctcttcttgatgctaggctgccatgcattctgattatctgcatcattcaccaagaacggatcaatcatagcacgagtattcccaaccagctcacggtgtagagaagctttccgcgtcgcaaccaagtcatccttcttaagtcgcttcgaagaacgagatttcttctcttccggccgcgtctttggtgcaggcttttccgcccgctgctcaaacataggctgaagacgagtcatacgggcagcacgcacagccgggtcctcgccaaactccaccatgctcgctctctgccgatccccctcagtctcatccaaaagctcaatcccaagactcattttatccttgagggcctccgtcttcgccttagtcttctcaagccccttcctttgctgccgaaacgtcctccgcaaccgcatcgacttctcatacggatcctcccaatcgcgattctgccgttcctgaagctcaagaatacgagtcgcctccgtccgcgcacgaatcttatcctcaaccttaccctcaatcttcgaaaaaggatccttctccgagggatccatctctcgcgcgtacggcttgatagcaatctccccaggctgcagctccttatcctcgccagtatcacgtttccgcccaccttcggtaacgacatacgctgtgttctggggatcggtcttgatctcgatggtcccgccacatacggtgtgtttcatgcgaaagctgtatatcggcgtcgagtagtagttgcctacttttttcttctctgcgttgaagcgcacgccctggccgattattacggggtgcggtttgcacgttgtgcaccatactgcgaagggcatctcgaagcgcacgattagcgcgcctgttgcgtgcaggtggcgggcgcgcgcgccgagggcgtgcttccccnnnnnnnnnnnnnnnnnnnnnnnnnnnnnnnnnnnnnnnnnnnnnnnnnnnnnnnnnnnnnnnnnnnnnnnnnnnnnnnnnnnnnnnnnnnnnnnnnnnnnnnnnnnnnnnnnnnnnnnnnnnnnnnnnnnnnnnnnnnnnnnnnnnnnnnnnnnnnnnnnnnnnnnnnnnnnnnnnnnnnnnnnnnnnnnnnnnnnnnnnnnnnnnnnnnnnnnnnnnnnnnnnnnnnnnnnnnnnnnnnnnnnnnnnnnnnnnnnnnnnnnnngattagcccgcgtgttgggggcggggggggggcgcgcgcgccgagtgcgtgcttccccgcgagtttgtttccggttgttaggccttcttggtctggggggacatagctggtggaaatgtgagctgggggttatgtggatttggatgttttgctgaccgtcccatatctattgaggtggcatgttagttggttgtttcgtatgttctttggggtgggattaggacttactgaagccttgcatcttgggcgagttgggtaggtgttgccgtcggtgtaattgaagcttagagagtgtacaggttactggccgcgcgaagacagccagtccgagttgatagtgttgtagaagcgaagttgtcggcggaactgactttagtcggagatagcgggattaagacgggtgcggatgactcatcatttatttttgcatgtatacttgaagaagacatcaccagaaacaaaaaaaaccgaccattcaacaaagtagatcaaagaaagatttatcaggctaatcaaccataacgcttgatataatggtacactgaaatataccgacatacatcgacctcattcttacagcatgaacccatacttcgtcatacattcttatgaataactttttcgttacccaattttgctaaactatttagatagggtttctgggctgattcaagaatcagatttgcatttccttctctattcctcccttcttgcgaggcctccgtttttagtaacatccatcgcatccagtcgcccgaagccttctcggaaaatggaccaaggcacgcgcaaagagacagagcggctgatcttggagctgctattggaagacgtgaacagcaatatccataggctcggagaacagccattgccgaaggatacaactcacccgacctacagactagaagaactagagcctgacaggagggtggcacttcatatatggaaatccgaaatcgaaagacaaagggtcacattgagatattctcagatggctaaagctctatccccaggaagggaggtgaaggagacacaatttcccaagggaacgaagacattttccaaacatacctccaccgctattcagaagctggttcgctttttcaagaacctcatgcgatctatcaaagccctgattcccgcccacttctcactgccccaggtctgcagctcctgtagagaagtccacagcgaaatcttcaaaacacaatgctcccacttctattgcaagaattgcttgatccgcatggtcacaaaatctttagtagatgaatccttgttccctctacaatgctgccacaagaaaatcgaaggctcggaaatgaagaagatgatagggtccgcattggcccaagaacaaaggaagaggcaaaccgagctcagcgatccagaccgaacctattgttcggattgcacatgctctcgatatatctcgccagcgaataaatcttggccagatttgatctttaaaccggctttaacctgccagtgtggtgtacgcacgtgcagggtatgcaagaagagtgctcacgagggcaagtgtctacctcagctagactggttgatggagaaattgatgaacaagaagaattaagcgatgtactaaatgcagccgtgtgattgagcttaaagagggctgtcctcatatcatgtaagtggttctttggccctttatcgaccctctaagctattacggggacttttaatgacacctgacagttgtatttgcagagcccaatggtgctaccactgcgggaagaaatggaaaacttgcgactgtccgaaatagggatgggaatcaattcaaaaaattgatttttatcactccaaccgatttatcaagaccaaccatgtggataatacactggttattctgactgaacttggcccggagagtaaaatatatgacctgagtacgcttggcttggaggatcctgatgatatatgaaattgctcaactacttatatgtgagtaatgtggtgttgccttctttcgctcaaggtaagccaattgatacttccatattgctatacaagcgaaaatcgagacacgtacataatttcagagtcatgcgtagtatatccatattaggcactgtataagctccgatagttccttggaagctagattttagatactaaaagagcgtattatttgtgctgtatggaggccttgcttttcgggcattcgcatgggtatacgtagtatcaacctcaccaccaactctcttttgccaaaagagggttatttattttcataacacatctcttactctagaccccttcatcacgtgggctacgatacggatcaggatacgcagtctctaagtcttacagctattattggtggacagaacgaggagacgaacgaactaaagaaataataaacaagatagggagtcacgttcatgagatcccgaaagaatatgggcacggccatttcaatgggactagggttagagacagaagatcacttggccaagtataagaagaaaagaccctcttccaattcattctctgtcgagattcggcaaactggcgattccattgaaaatgccatcagcttgaccgacacccccaaagttgagatttggcgtgaatgtgtctcctgccgggacgatcatctccaagacaatatgctcaagacaaagtgctcgcacttctattgcaagggttgcttggttcgcctgttcaaaaatgctttgcgtgatgaatccttattccctcctcgatgctgccgcaatccaattacggcctcgaagacgattctcggatccgcattggttcaacagcacaaagacaaggtgattgagctcaatgaccccgacaggacatattgttctgatttgaagtgcgcccgatacctcccacgaaatggcacgcgagctaaggtttgcaaatgcgcgagctgtggagtacgcacatgcaggaaatgcaaaaaaagcgcccacgatggaccctgtctatacaagcttgatgcgcttttggaggaattggcggattgcaagcaatggcaacgatgctccaaatgcagccgtctggtcgagctcagaacaggctgtaatcacatcacgtaagggcgatttcatttatcattgattactctcttcgctgtcttccactgtgggagcgtttggactcacatctactaggtgcttttgcaagttcgaattctgttatctttgcgggaaaaggtggaaaacgtgtccctgtatcttcgcagacgaagataatctttacgaatgagattgaactagccgagtcaagggagtgctctaggtttgccttggggcgaacaggataaggtacacaaatgatctgggagatcgacattacccagccctagcgtcaatcgatctcatttattttcaaggattagcctaaattgagcattaagtagctatcttgtcgacaatgaggcatttactgacctgtggtttctaaacatggagaaaaaagacacatatgttagccatcataattgcatagtcttctcagttatatagacttttctgtaaatacgatacaaagtactataataaggagcatgtaagttctttatacccctcattatgacttcacttaaaaaggaatatttggtaaacacggtcaaagttctcgatgttctaagactattccacctcgttttgcaagggaatccacaattttgtcataaatcaactcaatcactctgatttggactcagatcacagtgactaccaaccgagctatgacacagttaggagaactcatgagtaagattcggggacgcatcttcacgaggggtgcagccctgtcactggataaagagcttgaacaaaaagcctcgtcaaatcctaaaatgcaagggaagatgtctgcggtgccaggtgagtatgttatctcggatgatagcgatgaagacttgcttgatgaaggcttggatgatcagtatgagtgtacatgttgtacggaaaagtatccgcagtcggatattattcaaaccgaatgtgctcacacttattgtcgggaatgtattgtgcgcctttttgagaatgcccttgcaaacgaagcctcatttcctcctcgatgctgccgcctgccaattgctgtctctatcaccgtcgaggatatgataggcattgagattatgaagagatacaaggaaagaaacaccgaggtcaacgactgtcatagaacttattgttcaaactcaccctgctctcgctatatcccgccacagaacatccgccgtggggtgggaatctgccagtcctgtgccgctcgaacgtgcgccgattgcaaaaggcagggacatagaggtaattgcaaccatcagaacaccgagaagtgtaagcgtgcttctaaggcaaagaagcgtaagcgtgtttctaaggtcaagaagcgcaagagagcttctaatgccaaggagcggaagagtgcttctaatgagaaggctaagcaagcttatgatgacgagatgaatgataatttgctggaacgcctggcaaataggaagaagtggaagcgatgttcaaattgctctagaatgatagagcatatcgatggctgcatgcacatatcgtaggccgaatgctgctcccgtgaatctcagaacccttgaaaactgaccacgtcgtctagctgcctatgtggatgggaattctgttatgtgtgtggcgaaaagtggcggaactgccgtcattggtgaatgttcttctcgtactcaatcaagactttacccaagactatgctacgctcagagagtggtctcacctaattaggccaggtatttttttggcactcaatttcaatacgtgtgagtgacatataccatagtccaggcctcgaaaatggtagctcaatacactaaagatcaagaaatctatcactattcatgaggcctgtacaatccatccatagtacatatggatgggcttgtagtaatgccaggctactattatacataagaaatagcatacttaacctctgcaattcatcaatggtatagcgtatgaaccagctaccataacgcgaaagtttatccagtagtgcctgtattgcagtacgcgaaccaagcctctcttcctgccagcgccgcttcaaattatccacgtctctttttgttatacaactcccctgatttataggatcggtaggattggtggctgttgtacgacgaaaatcgaggataaaacgatttggaaagaatcttttcgcggctggagcaccgaacagagtatccgtgccccagctttaaacatactaaatctccggacactttatatcgaacgttggcatgcacccatccacctatttccttaccattaggactatcttactggtcggattccggttcattttaatacctcccctctgctgcacgatataactgaccgctgcttgtgtacatctagaagcttttcccaaggttgttgaatcttcgagttcaaaacccttggagtggcctgtactattctaaactaaagtagctcaacatagtataggtctctactattcctccaccccttagcccacgtgacttctgtaatccagtttcaatgtcagctccgaagtcacaaaaaagtgcagatgatagtcatgccaccttcccttttggcacacgtattgaaagtggagtgccatgattgacctctcgtggcagacagctcgatctcaacttatttgctttgatattttgtattgacttggcgtgtgtcggatgagctccatggcagctttgatagccataatcacagtcaattaaacagaagataaagtcaccttggtctaactacctgggtccaaaacgtattgctgctccgacgtccaaattaaagttccttttggatcattgttcttccgccccagatcaatccgtggatcagtctacgcggaagcttcgaatcaacagtggcctgcctgtcttccaatcgacatcatgttgcccaaattcttgcaaagcagctacattcgctataaggatgacaccaacagctttgcaacctggctccttaaggcagccggcaaatgtggctaccaaccccagggcctcacttctaccgcgcccacctccaaaaatggcaaaaacaagagcagaaataaggcggcaaatgactcagatccagtccagtacaccatgactgttaaggatcttcaattgctggctgatgttgtggccaagtctgctctcactgtgcctacacaagttctcatcatcgtcaaaagagcgatcaaattgaggaaacatgtcacgtcttggtttttggggcaaggcgactccgacaataacaagcgacacactcattttatctccgcactggaaaaggtctgtgagaccctggaatggaagatgaacaactcttccaatccggatagtaatcaacctcctccaacctccgaatccggaggtggcgatgccgaccttgacatgttcctcaacaaatttgctgtacttaccgtcgaggagccacaagagactcaagagggacagcagaaatcccccgaatcgaaacaggttgtgaaggtggagattgttgagaatgacgaggatgaggacacgagttatttccgcctcatattcttcaaaacatactgcatgttccaggatttgaacaacatgcgggcgtttatctctcatacctggtcagagtaccgagataacaagatcgatcttatgaacgctgctatcgtgactgacagtgcgttgcaacttgcccgagatcttgtgcaggaggtggtggatgactggagcacatccaccccctctatcgataacctccaggaaatggtcttcaatgtcgcttgttttactcggggcatcgatgcgaccccatctattgaaatcggcctaccatataataaacacatgtccgatgtagccgagtggtgctatttgccaacacggatcttactggaatcattccgagacgttctgcaggataatcatcttccggtcttcaagaaaggctttttcggcacttacgatcccaaggctaacagagaggggatgtccgtgggccagaaattcaacgaagacaaaatcatttttgtccaactaatgccagagttctgcatgatcgataagtttggtattcgtatgcttacctccgatgcgattactgcaggtcttgttgagttttgcaggaccaaaaaggctaccctgtggcttagcttcgctgcacaggtgctccttgacgttcatcacatcatgcgttacagcattttaggtgcatttgacgaccttcggatgtctggactgcgtatcacaaaaactatcgacgactacttcaagggtaccaaatcacacccgcagccccagttctggcccaaggagggtgatgaagaaatcaaagatatacacttcactgtggcttcatggattatccaggaccccttcttagaacggaagcgtgtttcgatcccaggctatgatgtatcagaaaaacatgtgcttttctctcagcatgccatcctttgtggattgagcctgtttcatctcaacacccggatgcagtctgttggccaacagcttgtgactcaatggtatgatgtccagcaactggctttcttgtacaatctcgcaaacactgatgggcatatgaacttgatttggcctgatatggaagcgtttattaagattcacggagagtcacatatattcattggttctcgaccaaagaacgctagcgagtctttgaataggcttgaattggccacaggcatatcgtccgccgctaagtttgcccgcggttcgcgcaagagacaagacttccatcgccctgatggaaagaatcccagagtgctgacgccaacaactacgatcgcgaacttgttccgggcccagtatgtgtctggttttagggaagaagacggcattagaacaattgacaatgttctggatacgctttctcaggaaccgtgtctcagggagaccagcaaggagctccagccctccgatctgcaagtcatgttccaacagaagtggtcccatacccgaaatattggcaccctgcaacttcttactcttttgaagagcaggttgtccaaagaagagcctttgctcctattcaactacttcggcatgcacaagcgctccctggagctgctgaggctgatcagagcaaaagaacatcacaagtttgtccaatattttacgactgcgtacatgcccgatgaatctctcatctcaaacattgtgattctggtccaccatgttgcgcgaggctcggcacaaaatgcgcgtgcattgggaatgtcttccatgggcaatggcagtcagatttgcagtcgaattgtcatgagctgtggtgaagtcatgcgggattatcttcggaagaatggagatgtggcatgcaaagagctaagggttttctgcaagaacaaaaagccaatacaggatgagatcgactatgataagggcaggtccgaggagtttggctactggtttggtattgaagaggctttagacccaaaggttctcgcctcgctcatgaccgggatcccaatagcttagctgatggctctggttaagctcttcaacaatcgacgaatacaagggggattttatgtatcaattgcccttatttatgtgatattgatgcattcttatgtctgacatatactactggcaaaatatattgaatctatacgctatgtacattctcaacgaccgacgtcttctcaacattcagtcccgtcttagtctcaacatgctccttattcagcttagcttttagaataaaagccgaaaagaagacaccaacagcagacatgcacgtgtaaagaatccacatattcctcagactccaagcaaaagcctccctaacagcaagcaactgcgtgggatcagtaatgaatttaatcgactcgatactcgcagcagccgaatccccagacatctgagccgccatgctggtcgacatcccggaagccaacaagctggactgtttctggcccatactgttctggaagacgaccccgccaatcacaatggaggccgcagttgccatattgcgaatgaagccgatggttgccgtagcggttgcagtgtcctcctgtgagaccatggcctggatggcgattatgggcgtttggaagaggaatccggcaccaagaccgccgaggacctggtacccgactatctcgccgacggaggatctcacgccgaggttgatgtacagcccgttcccgatggtcattagtgccaggccgatccagatcagttctaggtatcgacctgtgcggtggattattgcgccggtaaacatgccggagaatgcttccgtcaccacaagtgggagaatgaggacgccggagctcattggtgaggagccgtgcacggattgtaggtatagggggatgtagtattccccggcaatgaagacctgtaagtcgttagtggttgaaacgaccaaggggatgctatactaacaaagccatgcgcaaatgccactagcaaggtggcaatgttagagaatcgggtgaagatatccatgggcatcaagggatacttggctagtttcttctcgctatagacaaacagcaaggaacacaaagacccaaaaacaatgagacagatcacctgcggtgatttccaggcaaacgtctcgccgccgaagtccaatcctaatagaagcatgagagtaagacccagcacagagaaactaccgaaccagtcaatggcgcggacgccatccataattttcgtctgggggttgtgcacatccaagaaaaagaaaaggagtacaaatgtcacccccgagaccgggagattgatccaataagtccatctccaagtgacatactggctgaaagcacctccaagcaacggtccaaccccaccagcaaaagcccacatgacctccatcaggccgagatataaactgcggtgtctgttacgagtcagtaaacacagagaagccaaaagcagataacccagatatcttacctgacactgaacaaatcggaaataataatcgtaaccagctggagcaaaccaccaccagcaacgccctgcagcgctcgaccagcgatcaacatctccatactagtagcagcagcgcaaacaatcgagctgaggaaaaaccacccaacagccaagagcaagataggtttccgcccccagatatcagaaagcttggcccagatacacgcgctggcggcggagctgagaaggtatgcgccgccaatccacgtatacccagcagacgagtggaagtacgcggcgattgttgggatcgccgtggccatgatcgtttgatctagcgcggcgataaacatcgatagctagtaggattagtaggtgaatatgaggatttggttcgtatcttactgaaagggctaccataatagcggcaacttggactttgcttcgccctttgggcggagcttcctggatttctattgatgctgccatttctgagagatctggagttggagatttcaatttttgaagttgaagacttgaaaatatttttcggatcggttttgtggggctcatctggtatggattcttagtcggttagtatggtagatgatactgatcttggatgagggtaagatatagcgttataggcctcgtttacatcagaaaagagtttgaatgaataaaaaagttccatttgtgaaagcgccacccacatatagtcagtatgtgctaactcaacgccaacgaagacgaaaaaaagagaccccagtaaaccagtagtaattcgaaacgaagtattagccaaccctcctaccaaccgtaactccaaagttaaccagcgccgtcgcagactcacaatgagcctcaaactcgcgaaccagcccatcaacaatcccacgtgcctgcttaagatcctcagcttgaccgataacaaccatagaaggtggcgtcagcgcacgcatcacacccgcgacccatttctgcgcgaaaggccgcatatggtctttcccagcagtagtgtaggtctcgcggacgacgtcggtgaacccatgcgcagagatctgatcatacacgcactgcggcgcaaacggccatagacctagtttcagcatggcctcgatcacgcatgaccgcagtcgggttattgctgttggttcgggtaccgcgtctgtgcagaacgctgtgtggtcgacttcttcccattggatccagccgtttggttctgcggttgttttgttagttgggagtccaagtttgagagtagtggctgttttttttttgtggcgagagtaagaggtgaggaaagacatacttagtaaagcgcgcgcgttggcgagcacacgtgcgtaatctgcttgtttcaagcctgctgtgaggagtcggatgtgtacgaggtcatatcggccgcggtgagcttctgggaacgggcgcagtgcgtcgtggacgcttagtttgattggcatctggccaggtcgttggatctcgtggccccgtgggtattgggctgaggagatgtcgaagccgtggagctcgactgacttgttcgggaggatattggcgacatcttcgagccagacgctgtagtgggttagcttgtgtgtgacagtggttttggtttcagatcctcaaatcaacatacccagtgccagtgccaatgtcggctactgccgtcaggtctcttggaatagacgggtgaatgacgttggagagctccacgagaaagcgatgctggtcattgagactatcaggtgttagcagggagatcgatagatattcccaggaaatatttgaacataccgtgtagtctcggcctcatctcgatctagcaggtagactggcgagacactccccatattgcccaagactttgaaaagcctggacaaattggagagaagtctctggaacgaggaaaacattttggccattttggtaaggtagcaaacacgaatgagtttgatgtgaatgagaaagtgactgacagagtcatcttcctcttcttatagtcttttctctgatcataaaattctctgaatattcaaatatccaaatatccaaacctcaatcacctcaatctccatatgccagcaaacaaagaaagtcatcttggatctccacataataaccacgcgctagttcacatccccgcgccacgatcgaacggattgacctatccgagactcttcttagatcttgagtattagacgttcatgcatggaatcccctattcggcttaggccgagtttcttgctggctagtgacatggatacatcaaactcagcccaatatccagacagccttaactttcctgttggagaggggcttatacgagacatctgtacatggtagaattgggaagtcggaatgcaaaagtcccggcgtcgccgtggtcgtctactccgtaaaaaagccccaaggcgttgtcttttggctttatggcgtcaaacggagtgtggaatacggactggtcatgagtctacagactatcggtctggaggaattcagatgtaatgaacgcccaaagaatgccacatccccgaaatagatacatatcaaatgtaattttagacagttattttacaaaatgagaccccaaaaaaagagagataagacaccattggctctcaagacttatccaccaaattagcaaacacataccggaaaatctcccggctcttatacaaattctccacccgcatgcgctcgttatccaagtgggcgttgtcactcgcctgcccacaaggcaagttagctgccggggccgaaaactccttttccaggaaccggatggtcggaatcgacccgccctcacggatgaacatcggtttcactttggctgcgccaggcgcaacaggcggtgttctggcaatcggatcagacttgggccggattggcaatgcaactgactcttcactcgatgtcgatgtggcttgtgtgagggtggatgacgttggcactgtggaggccgtttgcgaggaccgtttgcgcgcggcttccttgcctgctgatgaggtcgttgtcgatgtgattacccgctcaacgtgcgaggctagactgtcgtctgagtctttccggcggagttcagggattgggcccgcgctgggtttgggcttgctcgctgggtgaatgtttggagactgtgcgataggtaggtattggagattcgggtcctcttggaccggggtccacgctgcggtgatcgcctctgacagcgtggcgaagatttcgttatctgggtctccgagccaggcgtcggatttgccagtgatttcgactgtgaggtcgttttgtgagtcgagcagtgcgaattgctcttgtgcataggcggtgaggtcggctgcgacttcgtcggcgtgctgatcaggtacgatacggatcgatagagttgccttggctcggcgcgcgatggtcgttgcgctcttgcttccaggaacttccactgagtggacggtcaaggcgggttcgcgccagcgatgcgtcaaggacttgatcagcgcctgactgtcggggatctctgggtgctgcacaagcaatacatcggaaatagcctcaaacctcttctgctcggcgtccgtgagtggcctgacagcatcgtggaagccaggcagattaattttgcctttgcgtccgacaatcgtggacaaaagcatggtaatatctttgactggttcatccagcaatgtactgccgtcgataccactgtgaaggtcagggtggtcgctagtcacgaccaaattggcgtgcacgactccgcgcagcccataagttaagcacggattgtagtcatcaagccagtaactgttcgctaggagaacccagtctacagatccgatctgagccttgtgctcgcggactgtttcgtggaaaccttgggatccggattcttcctcgccctcaatgaggaaaatgacgttgcatcgcaaggtcttcgtccgggcgagatcagccgcggcatacagtgatgccagaataggtcccttgttatcagagacaccacggccgtacagaaacccgttaatggaagtgagctgatagggatctgtcctccacttgggtcggttcgtctccgcacccacaacgtcatagtggccatagaagagaatagtcttgtccaccttttcaggtgatgtagcgttgaatctagcataaacaatgggattggtgtcctggccggtaggcaggagcttggtcttcgcaccgaggtagttgcagtgtcgccgaaggaaagcagcaccctggttgcattcgccagcgaatttgggacttgctgagatagtcttgaaagagacgaactttgcaaggctgttgaccatttcgtctgggtaagatttagcgagcgttcgacgcgaatagactgtatgggacgtaccgttgctgatcggaggaagctcttcctgggtcgagaaaaactcagtcagatcccagattcctactgagttgtcatttccaccagtggcgtagagctggcgatccttgaaccgtccaacagccgaggcgagcatggtgccctcgtgagcgacccagccaccgacctcttcgaaccgagagttgaatttctagcggcggtcagcggaagtcgatttgaaggcgacaaaaatagaccagtacataccttgaccgttccactagagtcaccacaaatagcgataccctggatcacgtgcacagcccacagatcaccggtatgtctagtgatccgcttaacgagctgctgagagtccaaattccaaatgttaagggcgccgcccgccaagccacagtagagtagtgatccctcaacagcaacacttaacacaggatctccattctgtagcttggcgatttgggacggagccgcgccaggatcctgacccaagcgccacaacttcaccacaccatcgcccgcaccagtcaaaagaacctcctcggaaggagcggattcaaccaggcctttgactagaagcatagagtagacgtagccatgatgcgcgaatagcttatgatgatcccgcttgaagctcaacacatgaccaccgtcggagagggcaccatccgatgatccgggagctcgagtaccatccggtcctcgggaatcaaagaagcgatgcgtccgtttggacggatgggcggacgatgcttggttcaatgttaaaccttcctcggaaagatcacaccactgtttgggtcagaatgtcgctaaatagggtacagacacgggtcaagtacctggatactggtgttctgtgcaccgcagtaaatagtttggttatcggatgaatagactactgaaaatatatcgcccacatcgtggtgtgaataaatcgagtagagacgctcaaatgttcgcgtggaccacacctatccacgtcattaatcccggccccgagattcttcaattgcatgactcacattgatcacggagtcgcccccacttgaaaatagtaagttcccatcttcggagagataaaggcctagcacactctctttgtgtgcgtggacggataccacgagatcaaaggtttccagggaccacgcctaatgaaacggttaggctcaagccttggcgtagcaaaacatagacagaaaagaatcgaaactaacgacaatatctcctccttgcaagccagcaaaaacacagtgttcatcaagagccagagcgagaacggagcgactggcgagcacgcggtgaccgatgccgcagtcactatttggcagggcactggcatcggcatgagtatgagaatcagactcccaggttttctgatcctcctcggacgtgctttctgattcgactaagtccataatcagtccaatatgctttaattgcaatggtctgcaacggtccaatggtctgtgatggtcgttgtggagagtgaagtgatgttggtgttctcgttttgtctccgctgcaaatgaaccaaacagaacactggaaatctcccttcactccattctgctttctttttggttttcgaggttgaagagcttcagtttttttggggaaatgcaggaatacaaagaaatatcaaagaaatacgaatcatcaaggcggtacggcaaaaaaaaaggaaataatagcaagaagatattgcaccatcgataaagtatttgactcaccatccctagcatccctttgattccgacaacaagtccttctatggagaaaagacatcagttgtcgaatccattcgcttgagctctatgccacggtcgcatgtccattgcgtgggtttgaatattctaggaagtcagaactatgagacgcaccttggttcccacaatagccgtgctaagggggtactggggcgacggctgatcatgatagtgtatgtacggagtatgcggttcaagattcaggatggattcgagatagatttagatcgagtgggtttgcagtatcaatgaaaatagtccatgaaaagacaatgaagtgcacaccgatgttgatctgcactccaatggaatcttgaaagctttattgataagggagagatacctacatgtactccggacttgccagctgagatcctgcccgagacctactgggcgcaacgctccaacccctgatggctttcttcttcagccctggactagaaacactagcctgcaggtgcccatctatgatgaatgtgtctagggtcatcttacaagaaccagaagaaccccggacaatgactcggaatgaaagtgatacaacagtaatggcgccattatcggtcttgatatggtcattgcgggaatatacctcccacaactgcccatcggtactctatactccgtagagacacaatctatatccctggaggaaaaaaaggagagtctccggggtcatctcacatgttaaagcctctcagcaccgccacacgaggagctgacgttgtccgacaccagccacagtggcggtgactcctcccagccaatcagcggtcacatgtcaccgctctttgcacgtcttcctcctctggcgctatctcaccagctgatcaacagcccatgcagactacactacaccccccatgtacctacgtcaaaagagtctggattattcctttttcctttgccctttcgccggaatctaaatataacaatgtgatctccctttccctgaaaattctcttccggatccccgcacatgcagctataccgcaaagatcgactttggcgcccaacagcgttcgagtgcgtgtgttgtgagctcatcgacttggctagtctctgatacgtgtcggtctcctcaagtctcatccaattattcttccctatagctctgtaatctgatcctgtttgttgctctgcccaacgtggatgcgtttgacccccccagcctccgtgtcccgcatcacttctccaaggccttagaccctcgttgttactccgatcggtccttttgtgctgatcaaggcctgaggttaccaacccaactgctttattaaccgagagctctccagggctgtaccttgcttattatcctataccctgcttagctcttcgatacttgatctataccccggacaattccttttgaaacagtctgtgtccccttcaccgcttccttatcggctgtcgatctcgaccatcggatgactgattttcggtaaggtcgtcgcaacgacatactctctgctatggcaccttttggtcaaacgatcgctgtgattgacaagaccggcaaggttgtgagcacggtaagttcgatctccggcggaaatccgagcattctgaccaggattagagtaagcaattattcggtgttttcacccatgccaaaaacgcctatcgggagcgcaagtctgccttccaatcagaacgcaatgcaaaaattgcagagcaacaagcactcgaaggactcgccaactatcagatcgatgattcggtagcctcttctgaacggaaccatgggactcggtcaaagcatcacagcggccacggtcgaagctctcattacgggccatcggcagcaatggcccgccgtcacacctctcacgatgtgtcggtccgaggtgcccctcgtccaacgggtcggtcaaaatcggatgcgcatatcgacatggatcttgcatacggagacgcctctcatgcagccttatctcgatacaaccccccagagcccaaaaacgaccaacaacagcttgatgttcttgtcaaccgtgcacagtggattcttgaagaggcacactgtttgcatcatggtgctgccgcgaccatggcccatctccagcagaacccaaaagccatggccgccgtcgccttgactctagcggagatcagcaatctggcccgcatgatggcccccaccgcattagcctcgctcaagtcagccgcgccagtcgtcttcgctcttctttccagtcctcaattcctcatcgccgccggagtcggtctgggcgtaacggtcgtcatgttcggagggtacaagattatccaaagaatcgcagccggtgctatgggagagtccggcaaaacggaagcagaaatggaagaaatgatggagttcaacacagccgaaatcagttctgttgagacgtggagacgcggtgtcgctgaccagcaagtctacagcgctggaacatctgtcgaaggcgagttcatcacacccgtggcagcggccatgtcgggcattgatgtgacgactgctcgggcgacacgggatcctcgtttcaaatttgatgaagatgcctcggtcgcttcatcccgtcgctcccgtcgttcacgcaccacccgcgctccggatcgacgcgatcgaaggtcaaaagctcctttggaggaaccgagtgggatcttcgggcgaagctcctccaagtccaaggcgccatcgaatgttcccagccgcacctcatctaaacacggcacctatgtcaccgaaactgagaaaagggagaaggagaaaaagaaagctcctagccggctacgccttatgttcacctcttccacttgacacccaatcctctccattcgacagaatcataacatgtatatccacctgtctacgctcttccgatgttatttatgggcgcagatgcgtttcatacggcccattcagtgcctttgatccactcaactcttacgacgacccatgacatatgcgtcacttcctcccattcaatatttctttttggatatggttgtcgctcgctttctatttttcttcatcttcattttccttcccttcttctccttcttcttcttcctcttcctcttcctcttcttcctccaactactttcagctatgcagccccttcacgcaagcatattttggtgttcattggcggcatctgctgtattatacaaacaccaaagaatcatttagatgaactacatatcttaagaaaaaaaatattttctatcatacatattctgctacgtgttcttacactattgatgtctaactcggatatacatgtacaatcatcccatccatcaattgccaattaactggtaggcaagttcgtctaattgaccacaagagtgccgagcctctacatataaagtaagaatagagatgtaggtaggcgcagaacacgctaatatatataatagtcctgggttcatatggtctgaggtagattgatagttagcttccagctctcataagtgatagttagggagatcttagtctttatgaggtagatggactcttgtcccgtattagcaatgacctacctcaaggagacctactccgattaagttagatcatgacttccagctctgagctcgagacagagaacggtagaattcgatccagctgtctgtgatcgggagaccaagcatcgagcatagaatatatacactaattcatctaccatggcgccgaggaacctttaacaatgctaaggctaggtaactctttgatattctgaatactagtcatggtgttctcaaagaaagccaatgatcgacatcgtaaaccccttggtggatacttgcacccaagctcaggggcacagccctctatgctatttatgttgtagagctttgaagatagacaatctatacagggaacatctacatttgaagagatagagagcgtgtaatcagcaggatagtcatcgaaccccagtcataatatccaacggcaatgcccaatccatatatctgctgtgaagcccaccaagatgcatcatgctacaccaaaacagccctcgcagggatcgaagtgaaacccagtctcattaaggccccccgtgggagaaatgatctgacgttagccggcagatgaacggtttccaaacagccggaggtttcagcatagaatatcccccattggctaattccatgctgacccctgtctactcccggggaatcggaggtgcacgccataaagccggagattattacatagtatgtatgaccatttttcccatttcccatttgggattgaggctggtggcggtaagagaatgtatcaaatgcagcatactccctaggatctgctttaaaccctcaaatattcgacatttatgcaatgctgggtggcccggagggacccgttagcccccacaggaagccgcaaagtaccctcgcttggccaaggacccaaatgctataagggaatgatgtcccctttctgattcctccgatatgggaggggtatggagtagataagagggtgagatgtggatcagtgcaggctctagagcagctcgggatctgataattgtatgtttgttttgtgagatttcgcctcgttcttgaaatagcgcaatcttttgaacagacatactggaggggtaatttcgtagagtacttcaaggcctggtttgccagaaatctagtcatttgatgtatttattctcatcatacattgctccaatcctcctataacggaagtttcaagatggagattccaagggcaaatgtgcctttagatgtgattgttgtcgggtaagatttccgttgtgcatggttcaacatgcgagattgtcatgctgatgttttgtagtgctggtattgtttctgaacgccgaagagctgcattggctcgagacaggagttgtattaaccatgattgaataggcatcggcggtatggcggcagccctcacattaggtcttcgggggcaccatgtcattgttcttgaagctgcacggaaggtatatgtcgaccgaaattcatagtatatcaagcaaggctaaccaatcatggcagctcatggaagtgggcgctgggattcaagtatcgccaaacatgctgcgtttattcgaccgtgagtctgccttctgccagaaaaatatccatgctaaaccggtacagggtggggagtctcggacttgattcacgcccaagacgtagccctagagcacatccacgtccgaagatgggataacggtaaactcctcgacaaggtgccggtgaataagactttcgggcagcaagtcgttattcaccgcgccgacctgcacaacgctatcatcgacagggccctagcgttgcccaacattgagctgcgtgagaactcacccgtcacagacgtacagttctacccagcaagtgttagcctagccaacggcgaaatcattcgtggcgacgtggtaatcggcgcagatggaatcaagtccacgatccgtagccacctgctcgaagactcgactattaaagcagttgcgactggcgatgcggcataccgtatcatgatatcccggcacattatggagaaggatcctgaactgaagaagctcattgacgagccgcaggtgactcgttggcttggtccttcgcgccatattgtcgcgtaccctgtccgcaagcacgagctgtacaatgttgtcctccttcaccccgatagccatggtgtcgaggagtcttggaccacgaagggttccaagcaggctatggttgacaactatcatgggtgggataacacggtgcggaaactgattgatctggtcgatgataatgaagttttggagtggaagttgtgtctgtaccgtcctctgagaacatggatccggggatctgtcgctctaatcggtgatgcgtgtcatcccatgctgtatgtgctcctgagatttggctgttggtttcaagactaatctcgccttagtccgtatattgcccaaggtgctgcccaggccgtggaagacgcggccgcgctcggtgtaatattgtcggctatttcatcacgcgaggagattccgcatgcattgagtgcttatgaaaggtcccggaaaacgcgcgctgagacagtgcagcactctggatcgaagaatcgaattacgttacatttgccggatgggcctgagcaaatggctcgagacgcgctgttcaaggcttcggacagcggaagtaaccccgataagtggtcggatcgtaggacacaagagtttctttggggttgggatgcagagaaggcggcgttggatacttggaatggtatgttccgttatttcctggtcatgtcatgtgctaacttgcggacagaagatcgaggacagaccaggctcaatgcgaatctgtagattttgccgacacgatacatcacctgctcataatcggttgtggtaaccataaagggactcgaattagagtagatatacttagagatagaaatattcacttcattagacgcatgagtgagctcgttcaattcatacaagacattgcatttttgctaccaattccttaagtgttaatattttctagttcattatacagtcattcgagcccaagaccatccatcagacatcggtggaacattggacaggtagacttgacatgttggcccgaggaagccagggacggtcaacatttggcattccaatcgttcaaaattgaacaatttacaacctctcgccagcggcggccttcatctgaccgtacttcttgagacgaatggcagacacgttgatgaagccagtggtctcggcgggggagaagtcaccgatctcatccatggaagactcgctcatgtcgtagagcttctctgtctcggaggagcgaccgagaatggaaacggtgcccttgtaggcacggcagcggacctggccgttgacggacttctgggaagcggtgatagagacctcgaggaactcgcgctcgggggagaagtacatgccgttgtacaagagctgaatatgttagatgagaaaatagaatcatggaaagctcgtgcttaccttggagtagttgtaggtgacgaaagtatcgcgcagagcacggacctcacggtccataacaagaccctcaaggtcactagacgcaagttagttgtgccataagaaatttcgcaatacaatactcacaggtgggcagagcgcaggcaggtaagaccgggggtctcgtagcagccgcgggacttgataccgatgaaacggttctcgacgatatcaatacgaccaacaccgttgcggcgggcaatggcgttggcggtgaggaagagctcgacagagtcggtagcaaccttcttcttgccaccctcagtgtactcgagcttgacggggacacccttctcgaagtagacagtgaaatcttcgggctgatcgggggcggtcagggggtcctgggtcagcttccacatatcggcgggaggagtggtatcggggtcctccagaataccggcctcgtaagagcagtgcgcaaggttctcatccatagaccagggcttagacttagtggaggtgacgggaatacccttctcctcggcgtagtcgagcaaatcctggcggcccttgaagcgctcgtagaagacggggtcgcgccatggggcaatgaccttgatgttaggctggagggcgtagaaggcaagttcgaagcgaacctggtcgttacccttaccagtgcagccgtgggagacagcgaagcagccctcgcgctaggtttgggtcagtatgacatctttctgctagcagcgaagtaaagcgtacctgtgcgacctcaatctgggcacgagcaatgacgggacgagccagggaggtaccgaggaggtagacgttctcgtagacggcgttgcaagcaatggcggggaagcaaagctcctcgatgaactcgcggcggatatcagcaatctcgcacttgagggcaccaatcttcagggccttctcgcgagcagcctcaaagtcctctgcaaagggttattagaccggggttggatgataggtcgacggaattgaatttaccttcctggccgacatcggccactatgttcatattagtagttgatcttgattgacatggcattgaatcgacttactgaaacagacgacctcatagccctcttcgatgaggtacttcactgaaattcggtattagtatcctcaattggttaatgggttgaccgatgttcatacagatgcagctggtatcgagaccgccggagtaggcgaggcaaacctgtgtcgaactgtcagaaagtgtggatcgggtggcggtgtaagatagaatggggacttggggatctgataagggagcgaaagcaatagttcatacctttccctgtgccattgtgaggaattgaatcaaattcaagaagacttaagacgtggagtataaaacaaaggaagattgagtcattggaaaaaatgtcaattttggtgcgggccggggaagtcacgggtccgagatgataaccctgataagatagatcgttgcccctccaatcttcgtccaactcaaattcgagataactgctccagggctagaacaggcttataagtgatggctttcagacctttcacaaagagatctaagctgtgaagctcattatgaatagtcaagtccaggattcattctgtttcccatggaaaagacgagcaaagatgtatgtttcctttcaagataccattgcagaatatattgagtccgatccattggaaggcagtgcataactagcgtatagctccgtcattctatgttctatgttttacattcgatattcatatttgcatgatactgtcctttatcagggatactatgctgtatgttgacttcgtgataggtccggtctgacttgtgtgactggtttgccctgtttgcatcatctcggctatccgcggcggtttccccgcgcaatgcccccgacaatgaacaaggagcaatttaaaggcaatcatccctacaaaaaaaaaatattatgtatttccattctgttcacatcccacaattctagccaaagatggcttctttacgaactcctttgcggtttttcgctcaagctcctcgccggttctactctggagctcctactccggcagcgaagctaaacctacctattgactacaaaaccactccgattttacaccacacctcagcctccttgtcaaatacatcagagtacccggcagctgccacgagtaaacgactcaatctctaccaagcaatcaactcagcattgcggaccgcattgtccaaatccgatcgaactattgtgtttggcgaggatgttgggtttgggggcgttttccgatgctcgatggatcttcaaacagaatttggatcggatcgggtcttcaacacccccttgaccgaacaaggcattgcgggttttgcaattggagcagcagcggaagggatgaagcctatagctgagatccaattcgccgactacgtgtttccagcgtttgatcagattgtgaatgaggcggccaagtttcgctatcgagagggtgggacgggcattaatgttgggggtctcgtcatccgcatgccgtgtggcgcggttggacacggtgctctgtacgttacgtggagtgccaagcaaagcggtatgctaatcaactgatcgaatagataccacactcaatccccagagtcgctcttcgcacatattcccggtttgcgagtagtcatgccacgctcccctgctcaagcaaaggggctacttctgtcttctatcttcgagcacaatgatccggtgatcttcctggagcccaagatcctctatcgtgccgctgtggaatatgtcccgaatgaatactacaccatcccgctaagtaaggccgaagtcatcaagcctggcaaggacttgaccgtcatctcatatggacagcctctttacctgtgctcttctgctatctccgccattgaaaaggctatgccgggtgttaatgtggaacttattgatctgcgaactatatatccctgggatagacagactgttatcgaaagtgtcaaaaagaccggtcgagccattgtcgtgcatgagagtatgatcaactacggcgtgggtgcagaggttgcctcaacgatacaggagagtgcattcttacgtcttgaagcccctgtcaagcgagttgctggctggagcacacatactgggctgagttacgagcaattcattctgcccgatgttacaagtgagtgcccaacgcccttcattcttcatttcgttctatcatcactaacccatagtattctttgtaggaatctacgacgcaattaaacaaacacttgaatattaaactgggatgcctcctaggagattataatgatacgaaagccatttttacctgagaacatcatccacttgcatttcaatgattgtgaccaggtccaaggaattctatcaagcaaaataacaatgccaaggtgaactttgcttactcgcaatagtctgtcttgttctcaatggcttcacaggaaatattaaatactgtttctagttgccagaattgacacggtactacaatatgttgttaactatgtacatcttattattttcaaggtctctcgaaaccatttatattatatctcttctttcaagtatatgggtgtttgcattgtcttccctttctggctgttccctcgttctcacgtgtccatgtgccacttttcaccgtcgagcgccttctttcccatcttcccaagctctttaccttcttcacttaaccccattcaacttaaatctatgtctggctcctatatcttgttccctcacttgtttcacgatgacgatacaattgatgatgtgactcttgctcttttgcaatggcgatcagcgcttcgacagcaaatgagaaccaacaggacgttctagcggccacgaagatatcgacacaacgttaggaattaggtatcttgcgggagtgcactacttgttcggaaagttatcctgagccggacacgattcggaatagctgcccacacgtttactgccgagggtgtgtcatccgccttctccaaaacgctctggctgatgaaagcttgtctcctcctcgttgctgccgttctcatttgccgttggaagctgcgcgtggcttcatcgacgatggactgtgggagggatttgaagctggatgcctggtttcattctcaaatgctggaattgtggactccaagcatgcaatttctgccgatcgaacaggctctaattgacagcccccttttctcaacctactttgatgcacagggtcagtctccccttccccccgggtcaacgcctattctcactcaaagcaattacagggaattggatctccgaaccaccaatactaaaaacctcactcgaggactttgtcacaacaatcccaccgggggaggagaaatatcagtttttacgttttatacggaaaattctgacctgggaccaggaagtgagagccaccgcgaacgaaattataccggacgaatggcttatgaggctgctttgaggggacgctctagggagaccctcgggtgtattcggtgggcataatatccctagttttcagcattgtctgttaatggattctacaatatatctctttaataactataaaaataatactacggtaacctccaatttgcaatatctacagggttaccaaaaagctaattgagaactgtggccagtggtagacatacataaagtagttagcaacctcggtgaccgtgttgtctttaacaagacaaccagtttgtgatattctagtcttgaaagaacatatagtcatgtatgccggaatatgagtaaaaacacggaaacgcgatataaaggcccaagaacagccctttcagccctgagcattatacgcgcaataatcgaaattattcgcacgattacctgcccacgtcgggaaagcaaccgagttgccagaaccaccgaaaaccgcaaatgtagccaggaacaccatgacttgggtgccaccgtccagcgcagcagacaggaggtaattccacttcacaaaccactgcggtcggtaacggcgcagatagaactgaccgaacgcgccgaggatgtagtagctagtgagagaagcgttcagaccaacgaagagttctccaaggtaccacaggataatggccgagttgaggtatgaccagattcgctggtgcgggaagagacggtgcatgatgtagaagggcaatggggcgatgaagccgactaggaaagctgctgtgacccattcgtagcgcgcgccgatggagaacatcttgggtgcgatggaccatgcaatggcaagagtgttgaactgctggatttgggcgccggaccagatgtttgttccttcggcggtttcgaggatggttgcttggttttggacgatgctggagaggagttagactggatgggaatcttataccggggtaggtaagggatgggacttacgttatcatcatcacatagttgagaagggcgcccatgacacagccgatgacttgtgtgacgaacgtcgctttcggtgacagtttgttctgttgggcgagtttcagatcacggagaagcagccacccttgcgagagaccgttgtaggtgtatgtggtgaagtacatattagctggagagttgtcagtggaatgatctcaaaagcagtcaaagtagtggagtgtatacctaaaggacgtccgggcatcatgtaaccagcaatcatttggaaaatcggctgcaagttgtatccgaagcccgtaatggcatactgcgccccgaagaagaccataaaggtgacgaggaagatggtcgcgacaataaagccccaccacggaagggtggacttcatcacatataagcatatcagaccagtgacccagctggcaacgaacactaagaaataccaactgctggggacttcat
